United States Patent Application Publication US 2008/0114160 A1 - sequence listing, part 67

SEQ ID NO: 24224 - DNA, 13916 bp, Oryza sativa
ggaagtaacatgggtaaaataaatttctttagtagtattagatattgcacgcataaaatccatgtcacacaaaacaacatacgacataaccctagtgcatcaagcacaataatggagtaatgtctattgtatacatgtgacttctttaaataacactgcacccaatttcttttaaattctgcaggttatgaactgcccttcacattttggggaacttactccgcatacccttttctttggcattcttctgccaattttcaggaaccttaatatttctagtgatgatgaatggggagcaaaacaagacggaaccaataaggagattatatctggactaaattgcaaagtgtgggtgcaatttgagaactacgacgatttcaacagtgcaatgcaggcattatgtggacgttcattagaaaaagtaagattttcatattctgttaccagttatctctcaatccttaactttttattagttcacataacacatataaatgatattgtgagcataccctctagattttttttttgaagtcaatatcctctagattttcctttctggtttccttctatataggttttttgtttcaactgtgcagctctgttttagcattacctactggcaattatcatgcactgacgttgcatagcacacatccttcagaccttcacatgcccttctgatgtgtgaacttgtatgctagaggtatttgtggtagtgtaggattgtgtttcttgtatcctatatattttgtcctgttggccttttcaaatacatccaagcgttctgagtcttccaataaagttagcaggatatcacatcactatcttccactgaagttaaccatcaccctctatcagcgtgtgtttgtttcaagggatgggatgggttgggttgggttgaacccacttttagagtgccaggcagtaccttcatgcgttagcttatggttatctggttgcttccttgtttggtgaaccctgccgataaacattccatggtcagataaatggctatgtttattgaaagcaaagtgaccacattagtgtttactaactagagagatcattactaaattagctagacaagaggactacaaaattactaaggtattagatacttcaggtattagaaattattagaatgcatcagcttctatgaggattgaggaccacaattgttggtaggatttgttgctttccttccacatacagctctgatgagtgatgactgatatatactatctcatattcactaccttggcaccacaacttaagtttaagctgcataaatttgttacacatggataaatccacatatgtatactatatatgccagaacagcctcaattaatgtcttgttatcatttatgttttatgttttagaaaacataatggaagctgactcatctattctgtttgaaggaaggatcacggttgaaggtagactatgaagtaacttgggatcatgaaggtttcttccgcaatgcacaatacgagcctgttcgcagcaatttagaagagagaaattcatcggctcatggaaggaagaaacattacacatcgcgaattgagtcagatcatagaaagagatttagggtaggacaacatatcaaatctttctaatataagtatttgtgatgtgatgtgcattcatcttcattgggtgcatcctgatgcatattttcatcttgccgggggtttaatagtgctgaacggctgggagcatagaatgcaatatcaaccgcatcccatttagttatcatggatgatttgcctgtggctgtattgataattgtatatatttgttcctcttggcccgaatgctgtattgcttacttcatttttaccattctctttgtaacattttctaacatctattatttcccttatgattcaggattgatggatatagggcatggcatgatggtgggattacttggttccaaggacagggaaaatgattgtactgtatcattctgttgtttcatcattagtctaacagtaaagtctttctgaattaggtattgcgtagttattactattagcctatgtcctggttgattcccagagatcatcacaacacagtcttgcttgtgatttgtaaaagaatttgcactgttggcatctcaatgtatgctcattcattgttcaatcacaaactcacaattttgctgaatgagaaattgcaatggctaagatcagcctaagcctgcaaattctaagcataactgtttgtattggttaaaagtcagataatgtgaattgacattgacgaggcaggtacaattgcattttcttctggattgtcaaacaagtaagttctctaacttctagaagtaaacatgcttgactttctattcattgtgatatgcgtggctacacaatcacatgcctgaatctagaagttctttactgatgattgtacctaaaaacaaggtcaacggatagagccaaaaaaaaaaaacatgtttccacaacgtataaacgaatggcgctctctcaaatcaaccagagatccagaagtcgaaggcatagttaacatacatagagatgaaaataaactgccagtacaccagggacgagttaatggacaaaattctgtaaaatttatgaacaattttgggtagccacacaagaagggggctgatgctacatgaacactggatgcaattgcaaccaaactgaatcgaaacggtaggaaagataacaaaaaaaatctgatcttcctggccaccctactgtacaaacatttacaaacacggcgttgattttttcacagcgtgtggtgaatgaatccacgcgaattactaccctttcttcccatgtggatgacttctcggcgagatcaactcatggacaccggagctacccctcttgccgtgcgaaggacccagcaatggcgtcacggccatcttcttgtcgctcgccttcttgccgagaaccttgacggcggccttcgatctcctcacgccgtgcgccccgccggcgccgccggcgccattagagctggccgtcaggatcggcacgaggtaccaccagacggaggtgcagcagatggcgaacaccttgccgaacaccacgaggctcgccagcagcagcaccgccacgaacggcatgtagtggcgcggccgcacgtccgaccacgaccacctcacgccggccttccgcttcgcactccccggctccgccgccgccgcggcggcggcggggcgcgcgggcttgatcacgtcctccctggggctggcgggctccgacgtcggtggcgtggacgactgcgaaaggtcgccgacgtcgcggccgcttgctgcttcggcttgttcttccttcccttccgctgctgctgttcctcctcctcaggcgggagcttgacgacgatgggcacccaccctttcccctccgactgcacgaccggacgagcacatgctcaccaccaccaccgccgccgccctcccccggtgcgccgccgccgccggcgccgccgacttggcgaaggatcttctcccgccgcgactcgagctcggacagcacggtggagaacttgtcgagccccctcgacgcgtacgggttctccttcttcccaccaccaccaccgccgccctgcttcttcttcttcgcctccggcgccgccgccttgccgtcgacgtccttgaaactgcccgtgccgcagaacaacatctcttgcatattaccgtgtgcggatcaacgatttctggcgccacgggcacgagccttttaaagaggatttgccaacgcaacgcaacgcaacgcgatcgcctctgtttctgtcccgactcgtttatttcttgggtctccgcgacgacctgctcttcttctagtacgtgttattattattttttttgtgtgtttttctttctggagcaaagacttgatcttcagatgttggcgcgtgattgctgcctgcctatgcgtgtgcttggtcaagtatggatgtctgaaagaaatatgtattcaatttcgttcagaaagatactactgttcagttttgtaaaagaaaattaatttcgtgccttgcttgccacgattgacccggtggagttgtgcgagtaacaaaatgcagaggaatctgccgagagcaatttggccggtactagctttttagtatgtgatgataactaaaatcttactattaatttactcttgtgattctgcatcaagctagctaccgacaatgacagttacccgtcgatcgagctcggttcgagctcacgatctgcgccggattgtatatcgagctcagctcgagcacagaatcgatctgattatgtgcagctcggatcagattagctctaagatgctggttaattggttgaccatatcaaatgggatcggatcattacagttcctgcatctattattccttttcttgaaaaaaaaaagagaaaacaacgtttctgcagcacgatttttttgctgcaggtttcgggtaatcacgttggtttcacgagctaacggcgctgagattggtttttcgacgtcatcggtttctctcgtttcgtggttttggagatgatgattgcctgcatttttctgccagatcatgatgtcatcgcgttttgcagcgttgatttctcgcgagcgtgagagcttctggcccgcggtaatatttgattgctgggcaaggcgtggactctgaattctgaaagcccttatcgctcgcgccgcgcagataaccttgaacagttgaatggatcaaaactcaaaaggctgcgtgattaattcatctgaaaacgagtcaaagtttcgagtgcaggtataagtcaaacttaaattataaatgtctattatttcttttttgaaaaactaactatgtaaattttaacctgaagaagaacagccataatatttgaaatcaatccggtagcctactgtaattagtttaaccagttttagttaatggcaggggagctgatcttgtttttgggtgcagttaattactacgttagttcgtaatcatttaatttgcttgactcaacgggctaaagacctgtggcattctagtatctctatctgctttatctgaagaagaatgttcgacggaagtggtcaagaacacggcagatagatatgacgacgtgcatcacgtacctcacgtacagtacaatcaagttaattcatcgccaattcctactagttagttagttactcctgctaattcttatcaagttcatcactgacatcagcgagacagttattatatagtatagtacttcactagcaatgtcacaattgatcatcgttacctggctgaaaacaattgattatcattcaacatcaccacaattcacacagtttacggagtatgataaatctcttcaaaatttattgtaaaaaaaatcagccaaagatcagctaagtactatattattttattaaccaattcactgacgaatcaacagacagttgcgtcagctatatacggcttgaactctgttttttttttaaaaaagaaatttatgtacgacttgaaaattgattaatcatcagtattactgagttagccgccggccggcgcctgacaaggataagctgccacgccagttaaattaacatgtgaatctaattaagctctcgattaatttcaaaccttctggatggattgtgtctaaccatgcgtgcagaaaattaacgcaggatgttgctgtcacttgctcatccatgactatcattacgaccatgctttcatagcagaatgtcataatgcaccgcaactatccaataaaaaaaagtcgttatcgtaatgtttttctaatagaacgcaaacaaagaagacttttatgtatttttctacgtgagcacgtacattaaaatccacattttgtactttctggaaaaaatcttactggatatgaatgaggacagggattgagattttagggttgtgcatgatttcctcgatgatcgtggaaaaataaatagtggattaacgtgaccttagaagagtgttacacgtcagctgttgcttgttaaataaaatgcactgttctagaactaggaaaaagatccaagataggaataccgtttgtatttattactgtattcaggtggacttatttgtggatttcgttggcatcaatgttgaaagtgatttagagatgtcatattgcattttcatgtgatcatagtcatacgtatttgtcctacacaatgttaatcacctttcatttttaggcgaaatactagagatttactccctcgttttgtagatatttaacgtttaaaacaagtttcgatcaactagtataagtttataaaatttaattagtctatattataagcagaatacacttatacttctaattcttttgtttttaaactaagcatgcgaaactattgatagttaaagtttcaaaataagatccaaatattttcctaaacatcaaatattcaataccaaatggtgtattaaattatctgaatacacttattatgggtggttatgctcttgatgaacttcatcacagggtagttgatataacggaactgaaaaatgaagtctataatttatcgaaggaataagtttatctgaggtctcttaattttacaccgattccgtttttcgttcttgaaccctaaaaccagatacaaccagtccttaaactgtcaaaaccggtgcaaatgaggtctctcagtggtttggaaggcggttttggctgacgtgggcctaacgtggctggtttgactaggtctccatcccacatgacattgacgtagcgcttacctggcaattatatctcggaaaataataaaaatcgtttcccacatgtgagctacacacaaaaatatttttaaaatagtggggcccacgtgggcctcacatgtcattctctctcctctctcggttctccctcttcttccctccgccgaccccgacctcttcttcgccgtccttgatcggcggcctcggccagttcggcatcatcacccgtgcccgcatccctctctcccctgcattttgtactctctggaaaaaaaaatcttactgtatatgaatgaggacagggattgagagttttagggttgtgcatgatttcctctatgatcgtgggaaaaaatagtggattaacgtgaccttataagagtgttacacgtcagctattgcttgttaaataaaatgtactgttctagaactaggaaaaagatccaagataggaatatcgtttgtatttatactatattcaggtggacttatttgtggatttctttggcatcgatattgaaaatgatttagagatgtaatcttgcattttcatgtgatcttttttttttcagaacttcatgtgatcatagtcatacgtatttgtcctcctacacaatgttaatcacttttcattcttaggcgaaatacaaaagacttactccctcgttttctagatagttaacgtttaaaacaagtttcggccaattagtattaagtttataaaatttaattagtctatattatgggcataaaacattgatactaccaagtcttttgtttttaaactaagcatttcaaagactattgatagttaaagtttcaaaagtaagatccaaataggtaaagttaactataggacactcaaaatttgtgtttgttgatagaaatcataaaaacgtgtcacggctgaaagacactcttaaaaaactgataatttgctaaatgacactttcggctcaattgaaaagaaaagttcttaaaaaagacaaggatgcccccacggtcaaaagattttgaactgagactagggtgaagataaaatatcacgtatactagtgatgtacttggggtgatgctaaatttggagttgcataatttctaaattcgtactttaacgttatgtttgaagcatgtgattctaggggcattcttgtctttctcaagaatttatctttttaattgagtcgatattgttctctaacaaattactagtatttttagatgtctttcatttgtgaatgttttttcgatgtctatcagcaaattacacgaaatttagatgttttgtagtaaaatttgccatccaaatattgtccggcctaaccatcaaatattcacgaccaaatggtgtattaaattatctgaatacacttattatgggtgattatgctcttgatgaacttcatcacggtgtagttgaaataacggaactgaaaaatgaattctataaattatcaaaagggccatcaagaattattccagaggcagcccaatataacattgccggcccagataagtcagtggttcatctggaccaaaacccaacgagctagtctaacctcggtatgggccttcaactccaaggctgcagatcacccactggaccataactgggcccagcacacagaaacaaatcgaattcgcaccagtctgggccgcaaggcccggcccataaaccaatcggatcccacaacactgggccgagaagattggcccaacatgagctgcttccaacatatcctcggtccagccgtctcttctcccaagttctgaagtgctctctctctctctctctcggtgtttccccttcggccttctcgtccgccccttctctcctccaccatccgcctcaccggcgtacggctccgacgagatggccgccccgctccggcggagcctcccctccctggggcgcacgctcctctcgccgtcccccgcgcccgcgcggatgctctccgcggcggcgtccgacgccctcgtcgagatcaagccaggcgagatcggcatggtctccggcatccccgaggagcacctccgccgcaaggtgcggtgcttcgctgaccttacctctgatttatgtagtggcgatagattggctagccctcgcggatccgtgtgggaatcgctcgagatgtccaggtttggtgggttgttttggtcgttactcgtgtttagggatagaggcatagagcctggaggcgtcgggtcgtgaactcgtcgtacggactacagtgctatcgctagtagacgttcgaatcgtggagtggatagaaatgcgaatttggtgatgatgttttacgcttgtgtggtttgaactgcgtttagaacttgggaggaatgtgctgctctccaggttgggttctcccactttagattatgttagtggagggctggaggcaacagagtttgatcaaattatcctgatttggtttatgtactgtgaatgactgaatgtatataggtgtatgttcttacctttcaaattgtttgtgattagagttgacagtattggtgttagagaactgtacataccagagtttagatgatgctaggatgcttattatttatccattttcttggtgtacatcaaacttaaaaatacatttgatagaactaactgcatacaaagaaagatgaaattgctagcaatgcttagctattgaatttagataacttgttggactatgaactaatgtctgtttcataccatttcatagttcttgtaattacctcaaaatccatgtagaggcctacttgtagagtggtagtttcttgttctgacttctgaggaacagagcttccatgaaatagttttctctacaacataatctcgttaatacgaatattgtttgatgatcaattcttctgttgtttcaaagatccgtcttaacttcaaagagcttagaagcatcttatgatatggcccaatgctgatagcaccacttcagtcacatttttcatggtattatcaaccttatgtttgtctgcagagagaggatgcctacacatcaatagatcttatgtttttgcagatttattatacagagtgagccctagaaaatattttgattgtgatctatgttcttgtagatcattagactgttaacaagtggtctcccccaccttttagtgtttatacagtaaacggccttctaaatggcctacgacaggattgtgttattcagataggtttaaatatttatactgtaaagaaaatatgatttttgttgctgccacttttgttcttttaagactcactgtatgcttttcaactacctagctgggaagacatgatcaacttatccttgtgtatttgcaggttgtaatatattcacccgctaggactgcatctcagcagggttcaggcaaagtcgggaggtggaaaatcaactttgtgtcaacccaaaagtatgtttccagttttgttttattggttattgttgattcattttcatgaattatttacctcaaaccctgtgttgctgtttggtgaactgcctcaataatatatcaaatgaaaacaaatagtctcatattaaaacttgatttacattcataacagaagaattcattgacgattgaagtctgtttctttttttcctttaacgtgagattacccccccttttttttgtacaatgaaagccttgcaactgatgcatttgacctctcattgaggtggtcaccttggtttggtcaaacagtgtgtacttagtctatttcatttcttttatgtctcatgcatttacttcatttagctttatgtatcacctccttattatatagcattctagcatacaattagatattactatttcagttgctgccgctttttccccttctaacatttgtgtgaataataggtgggagaacccattaatgggatggacatctactggagatccatatgctaatgttggtgaagcagggcttacgtttgacagtgcagattcagcaaaggcatttgctgaaaagcatggatgggattatgtggtgagttcttactatctgtctatccattcctgatacttaacatcaggtttaaaaaataaggctatacttatttctgaaatattaggatatattggagcaggatttaattgcatattctctcttgaatgtataggatcatttgattcttaattctttacaatttagaggttaaagtaaggaatgttcttttatagtgttctgaattctgatggtcaggtttctgaaggaaatttggtccatttatgggtgcatggtcttttattttcagattgccttgcatccaatgtgccatatgatttaatgttatttgccttaaatctttgtcttcagaatcacttgtcgatgtttcaattttgaaaaataaaatctctaaaaatccttcgtataactcaaggagtaaatctgttgttcccgatttttgttgtacttgtaattttagttaggacacatggaactttgattttatttctgtggcaaactagagctttttcaaacaatttgtaactcgtatattatttgcgtataaaatatgttctcgacagtaggaatgcttttggggggctatggtgcagtattcattggcataccacgagcctttatatttgttggaatccacctcctaaatttcttaagaaattagaactctttactcacataatgtctatttcctgcaggttaggaaacgccatacacctcttttgaaggtctgtacacctccctacgtatcttccattttactgtgttgatgcattttttttatatctacccagttggttgctttgattcttgcatccttataattttgtcaattcatgcattacaagttactactaagtgccccttttttaactttgttcaacaacataccgtgttctggatggtggaatatgtgatgttgaacgtggtctgcatcattttggtggatataacgtagtcacagcctcacagtcccacaggaaatagttgatattgtggttcaagtgccaaagtgaagaaaaagccaccagtgaatagaaaaaaaaaacttagacaatttcatctatactaatcatattagctcattttgtataaaatgaggctatgtagcttattgcaaataagtatacttattatttatgtgcttgcatgtagcacatacctgatacatgaaacatggtagacggggcagatcatgtcaaatgcattacaatgtgcccttggtgagaagattgtagggacgaaactgtggcatacttttaagactgagggagtgggcggaggcctacgtaggagggaagttgagagtgccatcttggaagtgtaagacaagaagaggagacgtggaatcatgtgatgggatgctttaacattgggtgtgaggaaggattaatcagattagtttgaaggaccaacttgagcaggggttgaaatgaatgccaatgacccaaatgggagagacgacgggaggtcctgatcgaacgggtgttctgctacatgatggtggcactcgactgatttgttgaccttcgaattttctgtctccgtgactttgaattgaacgaaaggcactcctttcattctagaaagtagatagcaatagagcattcacattaatcacaacttagcaagtcagaagattgatagggaaaaatccaaaatttgcatcaactgtaggagtacatcgaatgtgatctagtcagagagtccctcatcctcatcaactcctatcttttgttagtaccaagccgatgaggacaagctagtcaccactggctaccatagtagttgaatttacgtgcctaaagcttacggatgcaacgcgaccactgttttggcagccttttcagggtgcatgcattctttcatacatcctgccaagggtgtaattaaccatctctgctaccctttttgctaaggatttgaaggacaaatactgcgggacgaaggggatatcactcttctcccagattttttgaccaatttaatacataccgtccaggttgttgtgcattaagttagtagcttccctgtaattaaccaattgtttttctgtcatgcaggccaaatcttatgcagagaacttcaagtggaggggtcccccgaaggcagagcaagcctgagcactaatcttgcatgctacattgctagcaggacatgcacaagatggtgtttacccccatatgtgttgtttttggtttctccaatctgttgtgcgagtgtggcttagaccgttcctcaaccaactctcaattataataagcgtgcactgtgatcaaatagaatgatttcctgtgtactaaaattgtttaccattatccttccacatcatttcataaagatcctttacctgtttgcttaggttgttaaagcaaaacttaagtgttgttctgccctggtttgctctcaactcttggaacacgacagtgaagacgtttttctttattttgtttgataacgcgacacggataatgtgattgcgaccacgcatttgtctaacctgggttgtccatgcatgcatctatcctgggatgtccatgcatgcagacgcaatcacttgtcgctgtcaaatggatcattagtgctaaactacatgagaacaaacaaatctcactaaagcaaaagttacaattttcccttgcattctccggtcaacatcatatatactttagaacctggccttgcatcctataagcttcgcaaaagaggaagcagccgatctagtttgctactactagtaacattgcaccttaacacgattacatctatgcactactaaagtttgctccggcttgatgcatcacgtcgtcacgcgtcgccggcggcgcggcggtgggtgttgcattcgtcgccggcggcgcggaacctccaggcgaagacgtagtccctcgactcgcactgcagccgggtgacgtcgcacggtgcatggacggatgaccacttgccgtcgcgctcccacgcgatcttggccgagcacgagaaccccttgcatgtctccggcagcgccgccgccgccgccgccggctcggacactaccagcgccacctcgccgctgatcctcctggacgcggcggtggccacggcgtcgagccacgggcactcgggctgccccaccattcgcttgtacgcgtcgttcaccagccggacgcggttgctggagtccgagaccaccgccgggagggagtccgactccagctccgcctccacctcctccgccgtcttcggggc

SEQ ID NO: 24225 - DNA, 16466 bp, Oryza sativa
ccatggcgagacgtacaccggacgaacgaacgaacggtacgctcgctctcgcaggtggtgaacggatgcgttggggcccgagtggtggggtggtggggttaagaaggcgtgggcggccaatcggatgcgcgcaggggggaggggcacgtgggagggcggggcggggtacgtgggcgaccgcgcggggacgcggccgacacgtaggcggagcggagtcgcgggccgcgcgctccggtggattccagccagcagcgcgaggcgtatggtggggtgaggtgaggcgaggtcgcgtactcgcgttgcgctgcatgcggcgtccgcccccctcgggcgcatcgtcccccgtggcgcgttccgccgcggtcactggctggctggcgtgccccgcgtgacggcgtgaggcctcattggcagaaggccgtgtggcgcttttgcgctcgcctccaccaaccggctcgcttgtactctagcaccacggtaagtttagcgtataggcggacaccgggacacaccactttacctttttttttttttgtttttcactaccagatcgaatgatcaatctgcgtcaaaactgctttttggtcataccttgccgtgcatgcatgcatgtacactccgactccggtggtgtactcatgctttcgagattacttctcagctgaggtacatattgtttcagccagcacaaaaccgcctaaaagttgatatatccgcacgtggttttgctggtcatgtatggtctacgagactatacatgcatgtacatacaaaatctcggagggaaaccagacgatgcaatgtaaaccacgacgacaaacgctttgctatctttccgatgaattaaaagctggtgacgacggtctccagcacgtggcacacatcaagaccgggcgaacgcttgcttacgtcgctcgtcgggactagatgcatgcaccatccgtttcctatagccaaagccggagtttcttcgcctggacgaggagcaaaatttatcaaagttcatatcgaaaaaaatttacagaagacggtgcccgatgaagtgagaagctttttacaccggtgaaatttcccaaacccaaacataaatcgactggatatgtaaaacactgtggatctaactcttctgttccaaaaagtacgcggctcgacggtaaatgctctactgtgacgacctgtccgcccaataaaaaataaactagtagtagaaaaactttacgcatacatgcagctgcggtacacgaaacagcaggcaaagcgtcacacgtggagcatgcatgtcgcgtgtcctactggagcccaaccacgggccggctagctacccggccgaatgcagcagcacgaatttaaaccggccagccggagcagcagcagggcaaatgcttctctcttcgatctccctgctcgagaaacaaacttttggaccgacgctacagctccgtttcttactctctctttttttttataagaacccacccttttgcatgcacggcatgtgctgcgtgccgtggcgagcgggtagcaacgccgcgcgacgagtggccgccctgccattggcgggcgcgcgggtgcaggcgccgctccgtctcgctcccgcttggcgagtgggtgggcgcgggtcagggtctcagggaacggacgaaaaggaaggctttcaattcgcaagcgcgtacgtcgcgaggcgaggcgcggccgcgcgagcgcgacgctacgccgtacgctagttgcttgcaccttgcagagttcagttggtgcggtgcgcgctgcggtacagcgcgcgacgcccggccgcgcgctgccgtcgtccgtcgatcgttcagtgcggcagtgcaacgcgcgaggtcgcgagctttgctcctcgtgtgcgcatatgcaatgcaccggtggccgtggcagacacgggagagaaattccgccctgattttgcacgtacgcactctcacggtctcgcgtaatccttagacatcttttttggaaaatgccccgcgtcgggcgctacccgcgcctccgtgccgtccttaccacgcgccccaccacatgtgccgttgcaataataactcacgttttagaataggtgtcgaatataccagtcttatttggttatagttagacttggagttgtaaataggtgttaggggtagagttacagtcagactctataacccgacatctctcttaaatagagaggggagcaccacaatgtaaccatggcgactacaatgtagcgtagacacgcagggagatgatggcagtgtggccatggactcgtagcggctatgagctatattgattggggaggagcgcccataaccagagccccggggatgtagcttcggctgaacctcgttaacaaatatcgtgtgttcctgtgtcgtcatctggcgtgtcttgggtgatcaacgacgggggagattgttgggtttagtcccacatcggtaattgatgatgggggagcacaacttaaaaggtggggtggttctcacccatcagactaatcttttgggttgtataggcctaggacctaaagttgtgactccggttgggcctgtgttggagtaggcccaatgtgaccctgggtggcccatgattggtggcccgggctgcgcactctaacaatatgaaaatgttctattaagagaatccgtttcattttgtgtttgaatgaaaatgttctattaagagaatccgtttcattttgtgttccatcaaacactgtttcaggaagtacactcgtgttgtttcactatgtatagattaaatgttgcagtgaattgaaacatcattccattattttgctgaaacattgtttttttatatggtgaaacagtttcaaaaaccgttgtgtcatacgttgtcgcaaaatgtttcatgaggtgatttggttgtgtttcagctttttaaacgattgaaacatttttgatctacttagtgaaacaattttgatctactcggtggaatagcgtcggacacccgatttgtaggtggtcccctctttttcatgcacaacttttgtatacaatggtcattttcaagacacattagtgagtcagcatttttacggggaatataataactttcatctctttataaagcttattataaaatttatgtaaaataaatggcttagtaaggaaacacacagatgttagggtggtgagcgtgtgagtgggtgtaatggtgcgtctgctctctactattataaaaattaaaattaaagatgtttttatcggtattttggtacgtcatccgtgtatgagtcggtttttaagttcgttcacttttgaaaatcatattcgtatttgagatggtttgtaagtttgttcacttttggaaaatacaaaagagtcatataaaaaatctctttaaaaataccacatgctaacttgagacgatcagattcctaactgtagctcatgattttcttatatatatatatatatgtatatatatacacacatgtacatatatacacacatatacatatatacatatatatatatatacatatatacacatatacatatatacatatatacatatatatatatatatacatatatacacatatacatatatacatatatacatatataaatatatatatatacatatatatatatatatatccaagtgaattctcacggtgaatttcaccttaactaaattatataacaataataagattaaaataatcttcacacgttgtaacgtatgggtattttttgtagtcaaaataaaaggtcgtagtactccgtataattattctgcttttcagcgtgtgtagtggtgtgctatgtctttgccatgtaatcaaaagtttattttgaagtgagcgtagcaactggttaaataacttgtgggggaatcaatatattcggttcaagttatagacttgaggtgctcgcatttacggctaattattctttcagtaatagacggcacactcatcaacaccgaaacatcattgatgactttgccgatcttgagatgtgacaattcagtctttttgaggtgttcatagtgatagggtgtacgcgtatatttatagggaggtgtgtgtatgttagagtttgtatcgaatatgtgtacgtagtcgattacaatgtaggactaggagtttgtaataggtgtaggtaaagttagagttggactctatcctaagctctcttttaaatagagagatacatctgttataaaccgcattacaacttagtatatgtgagagggagcggctgccgatgacatcaaatcaagggtccttataactctaatatgttataattatgtttgatctgggaggagcattcgtaatcaacgcccttaggttgtaggcttcgattaaatctcgttaacaaatatcgtacctcagtgtcattatcgtgtttggatctcctatgatgttttttacatgttcggttatcgatgtgatttctaggccggttctataacagtgtgcgcaagttgttagcatttgcatttaccatacttgtaaagaaaaaaagaacttttgtagtccaaaaaaactatttttatattttagaaaaggtctgagtaggaactgggaacgggtaagcctaatggacgggtgatcgccttgggcgattagcacgcccgtccctcccctaacacgcacacatctccccctttctccacttcctaccacactataaatttcaaaccatttaaaaatataaaagaaatctaatacacttgaaaacatattcatgtgaataaactttatagttataagtatatataaagaaatttcgtaaagactttatgtatagaaatattatatataaaaatatatttgaatctagattcgaattcgaattcgaaccgggtatataaacttttaacttataaactttgggtatacaaactttagatgtataaactatgtataaacctgatgtgtaccaactttaggtatataaacttactaaaacataaaagtaatgcggtgcgcgattacagtggggagggggctgcgcgttagcttttccgactgggaaccgcatgttttgccctgcaactttttgaagagaaatagttgggccgatccggcccggccagtttttccgtgggccactttttccgtccgcggggtgacccaatatgagcatcaggtccatcatgttattttagtcaacttttaagaccttttcagagctcagctcgagctgagaagttgagagatttggaggtggagcccaatccgcagcgccgccgcacgcaggtctgcagcagctgcaactacgtgcgcgccaatccgcttcccaaaaccaaccacctactactcgccgcaagggccgcagcggcggtcccctctcctctccaatccctagggttcgattccgatggcctcgccgtcgtcggtcgcctccgctcgcgccgccgccgaaggagcggcgacggtggctgctcggggtggcgccgagcccgcccgggccctgcggctgcctccggcgaacggggcgcggcgcggtgtccggtgctgctgcggggccgcgaatcccggcggcggtagcggtggcggtggcggcgcggtcgcgcgggaggagttcgtcgggttcttcagggaggcgtggccgtacatccggggccacagggggagcaccttcgtggtcgtcatctccagcgaggtcgtgtcagggccgcacttcgacggcattctgcaggtattgggatggtttgcttctgttatttgatttcgagtactagtattttggatgcacacggtgatttttcccggatgaacagtgcttgcaacttaggtacaggaagatgcaggcggtgattttcttctcctttttttgtgtgtttcatatacggcataaatttaatttattatgtagagagagagagagagagagagagagagagagagagagagagagagagagagattgtaggtttttctagtggtcagcctatatttgttcatgtccttgattaatagggattggaactgagttgtcagaatgaaaattaaccaattttgtgtgaggtaggactaataggagactggtctccttgattcccatggaatgtgagtctgattcattgaccctaaatgaagttagcactattatggaaaacagagatcaaatcttcagcggcctcttaaaatgattgcgatcctttgagtcttaactcgtcgcagtaactccacagaatttttcttatcttgttatcattatggagttagaactgaattataatttatcatatgcaggatatttcacttcttcatggtttggggattcaatttgttcttgtgtcctggaacacatgtccaaattgataagctcttgtcagaaagaggtcagtgcaaaccatccttgctaggttctcttcgccatccattcttgtgctcactcctgaaacatagagttttttagggtttaaaaatcctgtaaaaattcctaagcattttattagaaacaaatggctgagctaatacttcaaaaaatggctttagctttacctcctgactctaggaaatagcccctgtatttattggacatatttatgctaaggctatgccattgaaaaagttttgaatttgattcttaagccttatgtgtggacatcttatcaaaagtatacaaagcaacatataggaaaactattcagtgcatacacaaaacatttttttttaaaaaaaactcaagagaattatttagtttctatagcttatggctgtcctggatgtcatgaaacctggtcgaactcttctgctcagttgtgatgagattgtgttagtgaattgcatactgtgtgatttttgaatggggactagcttgactgcagttgtgatttatattagtaatttgatgaagcacattcactgaaaaatgaaacttcatcagtccttttagctgtgatgataatatgtggaatggctattatgtttatcttgccttttgctaacttgagtatgtttgattcttcttgcaagttacaactatttttttagtatttcctactgcatatgttcatcttataaattttcatctagggaggatggctaagtatgttggccagtaccgagttactgattctgattcattagaggctgcaatggaggcagctggaagaatacgattaactattgaggccaagctttctcctggtcctccaatgttgaatcttcgtagacatggtgttattggacgttggcatggtcttgtggataatgttgcaagtggcaacttccttggtgctaaggtaatatttgttactaactaagccccttcggcttccaagtatctggccttaatctggttcttttgcttatcttgtgaagactatgctcagggcaacttttatacttgtaactctccatgaataaaaaccacttttctcctttaaaaggcacataattatacatttttgttttcatcagcctgcctttaattgacttgttcacctcttacagacttgtttaccctgttatgtaaaacactcctcctaagataatgtatgcagaatgatgcaaattaggcaataagcattggagggttttagttgagatgaccattgacatctggacaacgtagtagttactaaagttgttactgactaacagtaatacaacctttgagctactgagtcgcttttgaggcattcccttcaagtggttcgatttattcccagtcgccctatcatgtaacttcctaacctctttgttaagaactggtttttaatgttttacgaaaagtacccttcaactgccatataaacagaagaaaacactattggctggaaagttgtccatttgggtgaagttcaaattatcatttttgtacactgaagtaagagttaagaacaccatggacaactctaggatcaatagtcatggccttgttggttgaatacaattttagtactataggaacattgtatgtgtgtgctcagtgcctttttccattcgaatgtgcatgtggattatttttgtttatttttccaagtcttttttgtgattatgtccatcacttatgctgaacttcagttcgtgaaggtcctgcagaactaaatttatgtaactctcttcctttggcagagaaaagaagtagttagtggtattgattatgggttcaccggcgaggttaagaaaattgatgtttcacgaataaaagaaaggcttgatagtgatagcatagttgttgtgagcaatatgggatactcgagctcaggagaagtgctaaactgcaagtatgtttttttctctatccatgacctttgtagtgactatatgcacacacatttttactcttttacttttatgagaatatatgtaaatgtcctgtctatattcaaagattctgaagtactattgccccatctactctttctatatactgcagctagcctactaaactaaatttgttctatcttctttggctgcattcagcacttatgaagtagctactgcgtgtgctttagccattgaggcggataagctgatctgcattgtagatggccagatatttgatgagcatggacgtgtcattcctttcatgtctcttgaggaagcagatatgttgatcagaaagcgtgctaagcaaagtgatatcgcagcaaattatgtcaaggttgtggacgaggagggtatcagtcatttgcatgaggatgtcaaaccatttttgaacggaagcggtcctcttggtgcatatgctgcttctttccataatggcttgggtttcaacaatggaaatggtattttatctggtgagcaaggatttgctattggtggtgaagagcggttaagtagatcaaatgcctatctttctgagttggcagcagcagcatttgtatgccatgtaagtgcttctcttctttcaagtcatgttggaccaaaaaggagccccttatctcatttttcattatttactgtgttactttaggcttgctgaggagagaggatagtacaatagtgtaacctttcaagtttgaggacagtttctatttttattcttgaatatgaaatttgtttcttgtatgctagggtggtgttcaaagagttcatatcatagatggaacagttgatggatcactgctattagaattgtttacaagagatggtacaggaacaatgatagctaggtatgttgaacttctgttatcagtttttgatcaaatattacagtttccatgcacaagcaaaatctccgacgcctgttttatccttatgtgcacttagatgcatctcctgaacagttaattgcttgtaacatcatccctaattcctacagaagtcatttgtgcacaaaatcaaaggcctttcctaacttttcgtcatagtatatgcgagttctgaagttgtacccttggctgcgatggcctgcatcttttcatcatagtaatgctacaaatatcctcagcatgatatatatatttttataaggaactaaatacatttaagaatttagcttctacaagttaacgttgagatgtctatttatacagtaatacttggttttcagggatgtgtatgaaggaacaaggatagctagagaggaggatcttcttgggataagaaaaattcttcgaccactagaagaatctggtgttttggtgaagagaactgataaggaggtgtgctaaaatcctatctaatgatctttacagcgtatgctttcgttgaatccggttgtgtgcttcaatttagctctaatttatgctttatattcaatttagcttcttgaagcactggagtcgttctatgttgttgaaagggatggttcaatcattggatgtgctgctctgttcccatttcccgaagataaatctggagaagttgctgcgattgctgtatctgaagaatgccgaggaagaggtcaaggggacaagttgcttggtacgctcattgctttatgtcatccctgtttggtttccttaagttagccatcaaattgtagttggttcaaacttcaaaaaccaatacttcacaaagaaattttacagtccttgagaggtactaggaggtaccaaaaatttttagtacaaatttggtacctcctagtactggaggttccgagaggtatcaaattttacactagaaaatgtggtacctcttagtgcttcatcaaggactgcaaaatcactctcacgaaaaacaatcaaacagtatttatcttcatttgaaatagacggatttatcttcaacaaaatccaatgtcttgtcataagatgcaaaactgaaaaagcttgatgcgtttaacattatttccctgagatgcatttaacattatttcggtagcttaatgcaaccacactcccaccatcctttccctgaacatgcacacatcatgtgccagtgcatatcccttcgtccacctacttattttgtcacatgcacatgtaagcctaaaaactataagagggaagaaactacctgcaaagagggaattcatgctgtagtcttgtaactactagtctactaccaaactatctgattgttactaagccaggaaacatgaatgtggattttctgcgcatcattgttccagttaacaactcctcatttgtatttgaagagcttttatgcacctgtattgatttattatggaaagtctattgtgcatcttgttttactcaagattatgatgatgcttcagactatattgagaaggcagcaatgtcccttggtctggagaaattattcttgctcacgacacggacagctgattggtatgcaactttatccttctcttggtccattatatgggttgtttcatatgcatgatttaatgactaaatagcctatcattgtgctctgtttcgaataacaaggagtattaatacttagctaataaaatattcatagaggacgatgtaacagtctgtgttgtgcaatatgtatgtcactctgtgctgggagtataatttctttcttgaatctagctgatgatctaatatgttttcatatggcttagttaggacctgtacatactaaaaatatcaaggtacttcaagtacagtaaacacatggagaaaaatgacaaattactggagctatgttcagatattacaagattattttattttgtgaggattttaggctagattataatatctaagccttctatatatctctagcgcttaatttgaaactgatgcaggtttgtgcggcgtggcttcttggagtgttcgattgaatccattcctgagcaaaggagaaaacgcatcaatttatcacgaggatcaaagtattatataaagcagcttcagccaaagcacgccagtgttactcccaacaatattactgccagatgatataacgcatatggaattggtgcagttcaacactatatcagctctgagcctctgacgccaccaaattttgaaggtatgttgtactaaattaggatttcagggagagaaacataggaactgttagtgatgtcgatttttgaaatgttgtgttaatttatttacatggttgcaaaggaaatttgttgcacaatagaatcagagtagatcatacctggagaaattctatataagtaggctgaaagcttgaaaaggaacttctgataagtgggagtaaccggcaaaaagagaatattttacgtcaggttccctatttatgtgatgctgataacgacctcacacgcacgccaatagcgtgcacctggaggcattctactaccatagttttagaccaggcaagaccgtttgatggcaatacatttcgggtttggtcttccatgaaagtttggtaatcacatggcaggggccccagggctggcagcatacacggatcaaaatccacttaccagtcagttagactagcgactggttcatcacaaaaccggtaacctgattttgtacactctttgcacgcgccaagatgattttggcttctagacacggtttgtatgtggatatattaaatgtaaagcagcaaccgtcagagcttttatcataagctgattccagaagatgcacccaaaagaagcacaaggttggcgttgcatctcgatgatgaatgtttatgtggatgtttgattgcttacaaccaacttgggctggctcacgcggattcccttataagaaaagctgaaattgatggattatctggtttttagtcagcctattcaagaatataaacaaatgaattaattaactaatgtaaagaagctttagaaaactatttcaagaaaaatatcatattgaaaattttcgtacgaaatgttccgttaataaaaatctgaaatctagaatcatatcagggtcgaactaacgcaaaatgtaggactggcagaatcataacagggtcaatgcaggactgggatttgggttatctgggcgaggttcatttaaccagctaacagccgaacaacactaatggcgatgcctagtaacgtgtaaaacgtgacgtcgcaatctgattttgggttatctgtcttgtgccttttactgtataaaaagacgacgtgtgcctggcgcaatgatacagcctcaagacctggaaaagtatccagacaacgcaatctggaaaagaatttatcagaaaatatctaaaagcatgtcgccacacgaatttcacttcagctagtcgcgaggccttgatgttatatatgatcgtaattacaataattaaggaaaaaaattactgggcaagctgttcgttcgaacaagaaacgtaagattccttcaaaaagaaacgcaccagtcaaagtcagtgcccagtgagacccggcggcttatgaggtgatcagggtattttcaaagcaacgcaagtgttaccccgcagcaatggtaaagaaatcaaatggcagacataacaagaacgaattcaacttgcactccgcaacccgggttgaattccaccagcaagattggaatcaacagtagtacacaactatatagttttagccatccatcaaacactgatcaaataaatcaggttcagagaggttcataaacaaggcgaataacaggtaataatgccgaacacgaaatctagcagcattttctcatagcagttcggtttgatcagctccatgaaacaaatctcttcagctctcttgcacccgtcgcctctatcctcagaagcaggcgtccaggagacagcagcagcagagggcagccaagctgttacaacacatcattagaatcatgacaccaaaattgaaactgataaaggcagcaggtaagtatagtattgccatttgaacaaaggcatatgctcaatctaaaataagtccctaaatatgtccagccgtccattgacaaactgcattattcaaattgcaactaggttagcaacacaattagtgatggaacacccgccaagactaatcataatcatctcggggggaagaagagaaccgttctttggtattagcgcgtcaacgaaaatataatatctctctataaaaaaccaagaaagatatacttactacggagtatagtagtattatcctaggtgacctctccccaaaggaatctgtgaaaagcacatttttattctcctacaggcttttgaacttatctttcctctagccaaaactccagcaaccaaccaaaattcacaaggaaacaacaaatggtaagcaccaagggaatgtgactgcatcacagccgtccatccaagatcagacggccatcactggtgcaaggagaagacagccagaccccctcgtggcatgcaagtgcaacctcgtcgtcgccttgcttggaaggaccgacacgtcaacgaaacccacgtttcaaggggtggtagttcacgcgtctattcagggccccaccacagcgaacgtgcgccgccgccgccgccgccgccgcggcggacgcgccggccaccgcacccgtcggcgtggacagatctgagaccagcgtccggtaattactactactactccctaaccgcctaaatagcactaaaattttgatctaatcaaacaatctagtactacttcaaattcaaaatctactagtagtgcacaagagcaacgaagaagatgctgaattgttgattaaaaaaaaagaggcgagacgagacgaagtgctcaccatccctccatgaaggaagggccgctgctgtgctgctgctgctggggcggcggctgcgcgtacggcggagggtagccctgctgcggggggtacccagccggtgggtagccctgcgccggcgggtagccggccggtgggtaccccggcggcgggtagccgtccttccccgggtaacctgaacaaacacaagatccagacacggccaagattcagtcaaaccatccacaagaaaccacacaagcacacacataattttttttaaaaaaaagccgaggaggaagaagaagaagaacacggggagccggagatttcgaaccttgctgcggcgggacgccgacgggaggttgctggccgtagtagctcatcttttcttcttcttcttcttcctcgggtatccggcgatcgaataaactgattgaatacgatcaccttgcggagacgggggcggctttatagataggccgtgtgggcgaatcgtgacgggttattattgctttgttccgggaatatattttcgctttttaggcaaccgcgtcccgaacgtggcccggggtggtgggcgatatggtaatttcctcgagccttcggcctggaccccaactctgattatattacggtggatggctttccaacaccaacggtgcttttggttgtagggagtttttaggagatattgggagtttagagggataagcctattaagtgttttgtttggttgggagacatgggaatttttgtgggatgaggatgaggaattgaggaaggaactccctccttttcaatatctggataggggtaggtaattgggagggaattcctcctttaatttgtctaagcaaatctcagccatccgtttttattaatgacctaatctccaactaaactccctatcaatttccattacctctaccaaacaagatattgggattaaaaatcaaattcccatattaatctcatcatcaattccctcatgtaaactcccaatccccttccctcgagttaacaaacaagccgcaacaggttaagttagaagatattgtttcaaaatactaaacggtttcataaaaaactttctatagagaagttgttttaaaatatcaaatatatatatttattatgtgttaattaggttttacttagaaaaatatatgtgcgttgcaacaggcaaatgctatcttaatattatacggtttaaataagatgaaattcactgtgggaatttacttggattttttttagaaaatcatgagcttcaattagaagtccgactttcatctcagttagcatgtaaggtttttttaaagaaacttcttatacgacttcttttgtattttcaaaagcaaacaaacttaaaatccgactcatacatggatttctatttccaaaagcgaatgaacttaaaaacagactcaaatacggatgatgtacaaaaataccggtaaaaacatcttcaatttttataatagtatagatttattacaaagttgacaaatatattcatccatatttgatattttaaaacaacttctacatagaaagtttccgtatgaaatgcaccgtttaatagtttgaaaaacgtactatgaaaatcgagttaaaaactaagtctttttgactgggaatactgtcaaggctttgcctagcagtttaaattttatagaaaaataaaatatttacaaagttacagataatacacaaaagagaagaaaaggcaacaaagctataaagtgtgcaaccaattagaaacatattgtttcagggaatccttcattctgtgcacagatgcagaagagtttatttcacaaaaagggatttccaggattgaaatgaaggttaatattttgaaagataagtccattgctatgcttctaaatgtgccatgacgccataaagaaaatctcaagaaaacctctttgactaaacccgagccttgccaggacaaccatctgaaaaaaatttcaggttttggttccaatgaattcccaaatactgtcaacatctagcactaaaagcgcaagtgaaaaaatgataaagtcttgtttccctctaatcaacattaataagaaaagaacatgaaacggagtgtttttgagaaaaataatgtaactagtgttggaaatttggtcataattcggcatattttattccaaaataacaagataataaacatgatatttacaataggatttgatccagtgatagtggtgaatgtaatcaacatgagcatgcttaacgttgaataagcatcaacaatcacataatgacacaatgttgacattgcgatgaacattaacagtaaaacttctaattgaaataatgtaataaggttataccccaagaatggtcctccgctggagtttgaggcagtattgcctccgttggtgttgacgggagtctccttctccttgtctccagtgttcgacatgttggtgaagatg

SEQ ID NO: 24226 - DNA, 22156 bp, Oryza sativa
aagttaccaatggaataggaagaggaatagagcaactaattgtcatcaactagccatgaaccatcctccactacacaaccatcaaccatccatcaattaggactaattgatataagttaccaattccttaatcaaatggattaattctcaaaactcttcatcccattgatatcccatagaagaatgaattcacatgaattcctagcataatgagccttggaatttatttgatttaattgatttaaatggattaattacccaattaaatctaacaatccccaccaaatttcaaggctcatgagaatgctctctattccatagcagcttttatataccagtgtttcggtgaagactgttaagttgaactttcacctagaaaaagagctacacctgaccacaactgaacaatggactatgccttgaattgtcagtcttgtgcagttaggtttcactcaattccataactgatactaggcaaccattagtattccctcgggttggagcttataagtcatactccaggcctttcatgagtatctagagatcacccaaatctcatagactgtgactagcagtcgaactcatataggtgtgttccttctaagatgttctgcaggtcaacatctctgcttggaaaagccactcggatcacattaagacataagccatcctaccatgcaggaaagaagagaagcacatcatgaaaatgagcccttttcaagggtctcttctctcagtcacacaatagtttgtttcaccatccaaattcacgggatctccgatcataatggacaggtttccactattatgcaaccttaggtgggtatcaagcccatttccctcgatgcactgtctatcacattacgtggtagccccttggtaaactgatctgccagatttctagccgtttggacatagtccaatgctatcactccggagtttttctgctttctgacagatttcagtcttctcttgatgtgtctagatgacttcatgttgtcctttgaactgttcactttaataatcactgtttgattatcgcagttcattaggatagctggcactggtttttcaaccaccggcaaatccatcaggagttcacgaagccactcggcctcaactatcgcagtatctagtgctgtaagttctgcttccattgttgacctcgttaagatggtctgcttgcaagacttccaggaaacagcgccacctccaagtgtgaacacatatccacttgtggcttttatctcatcagcatcagatatcagtttgagtcactatacccttctaggtacttttggaatacccggaatagtgaattccatagctcatagtaccctttagatagcgcattactctttccagagcctgccaatgatcatctcccggatttgaaaccaacccggctcagcttgcttacagcaaatgagatgtcaggcctcgttgcgttagccaagtacatcaatgaaccaatgatttgagagtatctcagctgatcccttgctattcttcggtttttccttaatagcacgctgggatcataaggagtaggagctggcttgcagtcactatatccaaagcgactcaaaaccttgtccacatagtgggattgcacaagtgtaatcccaccctcatctcctctttgtagtttgatgttaagaataacatcagcctctcccaaatctttcatttcaaaactcttggacagatagtctttgacctcctcaatcacattaaggctggtcccaaagatcagtatgtcatcgacatataagcacaagatcaccccttctcccccaccatagcgatagtatacacatttgtcagcttcgttcacacaaagcctgcagatgtaagcgtggtgtcaaacttctcatgccattgcttaggtgcttgcttgaggccatacaaggatttcaatagtttacacaccattccctcctgaccttctagtacatacccgtctggttgatccatatagatctcctcctccagctctccgtttatgaaagctgtcttaacgtccatctgatggacgagaagaccatgagaggctgccagagcaagtagtactcgaatcgtggtcaagcgagcaactggtgagtatgtgtcgaagaagtcctcgccttccttttgggtataacccttggccacaagccttgccttgtacttttcgattgtaccatcaggcctaagctttttcttgaaaacccatttgcatcctacgggcttgcacccatatggacgctcaacaacttcccaagtaccattagacataatcgagtccatttcactgcgtactgcttccttccagtagtcagcgtcaggagatgaatatgcctcttctatggttcttggggtgtcatccactaggtatacaatgtagtcatctccaaaggattttgcaaccctttgtctcttactcttgcgagtatctacaatgttgtcctcctcaggattttcctcaggcgtttgatcattgtgttctatcggtgcaaagtgctcatggggcatgacagtttctttactagaagtgctaggtgtatatttcataggaaattcattctcaaagaatgtagcatctctggactcaagaattgtaccaacatgcatgtcgggtactccagagtttaatattaagaatctataacccacactgtggatagcataaccaagaaacacacaatcaacagtttttggtccaagtttccgctttttggctataggtacatttaccttggccaaacagccccatgttcgtaggtatgagagatttaatttcttcctttcccattcctcgaatggtgttacttccttatgcttcattggaattttattcaggacatgacacgcagtcaaaactgcctcaccccaccattccttggaaagccccgcagtgtctaacatggcattcaccatctcagttagagtacggttctttctttcggccaccccatttgattggggtgaatagggaggcgtcatctcatgaataattccaaactcttcgtaaaaggatgcaaactcattggaaaaatactccccacctctatcagacctcaaccgtttgattttcctttcaagttggttttctacctcagctttatagattttaaagaaatgcaatgcctcatcctttgttttcaatagatacacatagcaaaatctagtgcaatcatctatcagtgtcatgaaatatttctttccccctttagtcaacacgccgttcatttcgcacaaatcggaatgaacaagttctagaggtgccaaattcctcgcctcagatgccttgtgaggcttgcgaggttgtttcgattgaacacaagtatggcacttggaaccttttaccaaagtgaattttggaattaaactcatgttagctaagcgcgtcatacaaccgaaattcacatgacagagtcgcgaatgccacacattagactcatcattctcgctaatatggttcacagcattatgattattacacatgtcattcaaagaaaagcggaacaagcctccgctgtcataaccttttccaacaaaagtcccatatttagatacgacacatttattggactcaaacacaagtctaaaaccttcttacacaatagagagccgctaactagattcttctttattgaagggacatgctgcacgttcttcagctgcacggtctttcccgaagtaaacttcagatcgaccgtaccaacaccatgaacagccgcaagcgacccgtttcccatcaacaaggaggaacctctcccgacctgataagaagaaaatagagaaatgtcagcacatacatgaatattagcaccagtgtccacccaccaatcaggtgaatgaaaaacagagagaactgtaggtaatattttaccgtaccccgatgttcctccgccctcgctaatgatcatgttggcagacttcttgtctttgcgctcaggacagtccttgggccaatgcccagacttgccacacacaaagcagtctccctttgcctttcccttgcttttcttcttaaaattggttgcagccttgggtttgacatcaggcttgactttcttgttgttgtgggatgcatgagggttcttcttctgtaccatattggcactagaacctccctcaacctttttgccccggacgtcctttgccctcgccttctcctcaacacccaaagagccaatgagatcaggaacactgaactcttgtctcttgtgctttagagaagtggcaaagtccgaccaagaaggtggtagtttggcaataatgccacctgccacaaacttgtccggcaactcacagttgttgttctcaagttccttagccagcatctgaatctcatgagcttgttcaactacagaacggtcatcgaccatattgtagtcatagaactgctccataacatacagctcactgccggcgtcagaaactccgaacttggcctcaagtgcatcccacatgtccttcccagaaggcatgtgcatgtacacgtccactatgttgtcagcgagtacactgatcaatgctccacggaacaggcaatccgaagcctcgaacttagcctcttcctcaggagaaagaggtggttcacttcgtttgccccgtgaaacatagaagcactgcatcgctgtcaaccacaatagtgcacgtgctttccatctcttatagtttgaaccatcaaaggcatgtggtttcagtgtagcagcaaagccaactaccgaaaatgacctatcaggtttttggattggtggaaattggtcataattcggcatattttattccaaaataacaagataataaacatgatatttacaataggatttgatccagtgatagtggtgaatgtaatcaacatgagcatgcttaacgttgaataagcatcaccaatcacataatgacacaatgttgacattgcgatgaacattaccagtaaaacttctaattgaaataatgtaataaggttataccccaagaatggtcctccgctggagtttgaggcagtattgcctccgttggtgttgacgggagtctccttctccttgtctccagtgttcgacatgttggtgaagatgaagtagatgttgacgaacagtgagtagtcgcgccttgcgctccccaaaaacctgatcgcccgcccgtctgtgcaaacgtcgcagcaacgcgtggtttcggaggcctactctcccaacgcgtgtgcacacactggtcgggatgggattaccgtagcagcaacagcttttgaaaatggatgaaagtgtgtcttcttcttctcgcgggagatcaaatccattcccattttataagaggaatggaagatgaagagtaagagtcatggaataggaagaggaatggagcaactaattgtcatcaactagccatgaaccatcctctactacacaaccatcaaccaacaatcaattaagagtaattgatgtaagttaccaatggaataggaagaggaatagagcaactaattgtcatcaactagccatgaaccatcctccactacacaaccatcaaccatccatcaattaggactaattgatataagttaccaattccttaatcaaatggattaattctcaaaactcttcatcccattgatatcccatagaagaatgaattcacatgaattcctagcataatgagccttggaatttatttgatttaattgatttaaatggattaattacccaattaaatctaacaactagaaatttttaagaaaacttcttttagaaaaacacaaccatgtccctattaacatattcgaaatactggtccggtatattttaagattgatcacatgtgtcttgctatcgaggagtatgtcgcttatcactaaaagaataattatctgtaaatgtgggtgggtacccatatcaagtttgagttggtttcatgtaaaaaaaaaggtctggacttggtttcatcccaagtaataacctaaccaattgacatatgctcatttcgcttttaagaaaatattttaaatcttatttttggaattgtaatggtaacggatgctttattggtcatgtgctattatctggttaatattgccgatgagtcattggctgatcggccgaaccgcccagtccaacggggcaggctgcgacgacagaaataaataaaaagaaaaagaaaagattaggactgtagcagccaaagaaacgtgaggacaggggcaatttatgcgggtttgtttgcaggctgattaatgatagttatttatgtcaaacaaattgacgaagttaggctggtcaccaattgatatatagtagtacttgtgattgcgccctgacacgacacgacgaatagtatgggagacagggtagctgtttaattagctgtccgcctatgcaaaattcatttttagataatatctacaaaattcatgaatttgccaggacagttgacgtggcctgggggcttgattgtgaatttgtgatgagtagggccgtaggggaactaatcgtgacccatgaggacaaccaaagccagaacaagggttggtcggggattaagccaggtttaaaaatttgaccggaaacgcaggtctttcagtttaaaaaaggagaggtctcgaagaaatgtttaaaatgctcagcaagagcttgggtcttggtcagaggttgagagccagagagagcctgcctcagttcaaccataccgggttggcctaccccgcgcttattatggccatgttgccgaagcgcgtattttctgctctgttccttagccgcgtcgcctttcgatcttcgtctgctaataacgtctcaactaccagccgcagcggcacagcacaactgcaggtcagttggacgtccgtcatcgacccgtgcagcgcacgtacctgcgactaaaatttctggtgtgctgaaggctaacctacgcgaagggaagcaggaaagaacggaaaaaaaatttggtggagaccggatgtaaccggcctcttctacagccccgcttcggatggatgccacgtggatgacatagggatcaaacggttagctcggtccggctcccggcgttgcgtgatgaggacacacgcggcttggctccacgagcagccgtgtctttcaagctctccgtcggctcaattcgacgaacatcatatcgcatctccttttgcctggtgagcagcgacccgcgtcttcctccggcactgcaggggtcgtccttttcctcctccggcgccgcagacgtccctgagactgacatatatgggactgggagcaccatggccgatgtgccgtgctccaccaccgacatcgcttctgatgtgctcttcgtgcttgtgttttttttggagatcttgtttggttggagggagtttttaggagggattgggagtttagaggatgatgctattaactgttttgtttggttgggagatgagaattttggtgagatggggatggggaattgaggaatgaactccctccttttcaatacctgggtaggggcaggtaattgggagggaattcctcctttacttcgcctaaacaaatcgccatccgttttcattaatgacctaatctccaactaaactccctctcaattttcaccacctctaccaaacaagagtctggcatgaaaaatcaaattcgcatcttaatctcactatcaattctctcgtgtaaactcccaatccccttgccaaacaagccaggctagagcttgaaccgtttagagtcgagggtcaggtgctgtcgccggccgcttctccatggcatgagaagaaaattaacatgcaaaattgaagtgccgtaggattaggaaccagaaaacaatatacaatattcatatcagggagaagaactggaggcagggtcatcgtcgatcgaagcggtaatcgatgaagtattgcgtttcgtccgtggcggccgccagaaattggaagacgggtacagtcgcagccagcatccaaacgcgccgcgggatcaattgcctggcgctgcggctcgccggcggcggccgcctggaacaggaacagaaagacggtcgtcgatgtagccgatatccaggcgaggagacacgatctgcgttgaatcgagccgtcggcgaggctgaaagccgcgtctgcgcctggagccaagccatttgcatcctcgtcacgcagcgccgggagccgggccgagctaaccgttcaatccctaggtcatccacgtggcatccatccggagcgggctgcaggtgaggccgattacacccggtctccaccaaattttttttcgaaagaactcgatcgtcagcttgtctactcccatgtgaatctctatccctattggtccacctactaatccactcagctcttcatctctcagcggtgtgtgacgcaataatcaattaagtaaattacgtttagcgtcaccttttattaccaaactttattttggatcacatgttaacccatcttaattttcactttggactagcttattttgtctttgttttactccattttggactatctaaaatcttttctcaagcatataacgactttgcatattggctcctgtaaaccaacaatcttcccgacatacacgtagtatatttttacaagattagagggtagatgtacttagagatgtgacttctataagattagagggtagatgcacttagaaatgtgacttctatgtaggatgttttttgcaagattagaggatagactattctagtattctttgcatatttagagggtagatacagctacacatacattactctttacaagattagagatagatgtagctagagaaatgatttgaggtgatccaatgtacaacgaagtaatcttacctagttcgaagtgaaaatattaactggaggatagtaaaaaaaacaaaattttggtaaaaaggtgggccaaagtttaactaactttaatcagtttccaccaaatgttgtcccctttggacattgacaacacaacataactttatctagtgctctcgaccaccatatagactcaagcactaagggcaaaccccctatgttccgagccacctaaaccatggctcgaggcctagtggttaaaactcgttttattttacctggaacatatgtaaattcaccatgtattttatagatggccaaaaacattgtgtgatcagtctaaatgtttttatagctaaatgttggattcgtccttgcaagcactattgatacattggttctacaacactaaggtgttttagataataacatgaaattttacaattaagcccatgcttttatttttttactcaaaacttcaaacaattaataagcattatccgaccatcaaatatcagtcacccatccacaatttcttctctttctcttattcttttttgtaccctatctccccatgcgagtaatgacaaggcgtgaccctcaagagcggtgcagatcagggcagcatggagaaaatctgatcgactaggcgctccgctcttcagcggcagcgggccaatgaacttttcaacgatggcacaaatcagggtgacggagcatccatgatggtaggcccctcctctccctcccctagttatcacagccttcctctcacccttttctcccttgtcgccccacacgtttaccctgatgagccatcacgtgcctaaggatcctacttggtgagccgaaaccacttgccacgcatgagaattgtgcatgcccttatgattttgaaaatgaatctcttttctttctatttttccaaatatcttctttgcgatttttggtgttggtatgatcgacttatgaacccatcacatcaatacatcaacatggtgttcatccccatggtgtcttggcttttcccttaacataatttcattcgtcaccattcatcaaggttgactttaagcttactacatattaatagaccaaataaccatattgggggtgggaatagatttgatgtgacctaacttgtattaaggctgagtttgaggagaaggggattgggaagatacgcaaaacgagatgagctattagcatataattaattgagtattaactattttaaattttaaaaatggattaatatgattttttcaagcaacttttctatagaattttttttacaaaaaacacaccgtttagtagtttgggaagcgtgcgcgaaaaaaaagaaacaaacaaactcctattgtcatgctgccgaatgcagcctagtcgacacaagcacatatgtatgtgactacactttgtaacttcaaaactattttttttgaacgactcgcacgagatggtgcgaagttctattgatagagcagaaaaaaattacaagattacaaccctggaaggtcgtaatcaggaaaaaggaaaaaaaatactaccacccacaccgacagcgccaacacataggtccggaagaaggctagcaccggaccggccgccactaagcgtgactgaccgccgctaggccgacaaaggaacacatacgagaatgcccaaaagacgcccttacaaccaacacaaagcccaactctatctagagtgtgcttgcaccagtcgttcgagtggtttcgacaagggatgcctaaacgacgtctccaaggagagaagcgacagaaaaccgccgccgccgtccgtcagggactcaaaagagccaagactgggttttcgcccggcaaacacccttgagggatgagacgacacgacaacgccctttggagggggaacattgttgtcggtccggccaggccgggctgggttttcacccgccgctcatcacctgcaagttcatggctgacgcaccgatgctctaccactgctcaacctctgctgacatgtggaaccactgcaccggcgcccccgtcggccagcattcgtgcgccgaagaccacgccacaccccccggccactcctactcacaccgtggtcgcctcatttaccgccggccgcgcctcatcgcgccgtgccggcctcctccaccaccagacgcgcctctcgcgctagtccagtctcccgccatcgaccgcgcctctcgctcacatataagaacgacgtcaattttctcatcacaattcaaccatacaaatatgttctcgaaattcaacgggtgatggaccggtagctatagcagtttatgacaacgaccaatatttatatatatgcttcgcttttctccttgtagtagtaccttcaacgcaattctatgcataccttgggtgtgtttagttcacgccaaaattggaagtttggttgaaattggaacgatgtgacggaaaagttggaagtttgtgtgtgtaggaaagttttgatgtgatggaaaagttggaagtttgaagaaaaagtttaaaactaaactcggctcttctcttttgttttaggataagatttgataaagttctgatcattgataacttttattttgtttttaaactaaacatttgagaagttatcaataatcagaattttaaaattctgataagtcttatcctaaatatgactggatggagcaatttttttagtccttttgtaactgctacatttattgcaatacatgagcattttgctagtaaaaatgcgtaaattacaaatgacgaaaaaaaaagtgacctgccggaagtgacaacagaaagggatgttggctacacggtcgcgatcccatagtacagtttacttggctggcagtatcgcagtccgttcgtcaaccggtgaatggcagcgacacgctaggcaagtcactgctctgcttgatcaggctcgctccctcttttgggttggccacggtagcgcgtacgcggcgcccaagctgtcggggtctctcaggtgagccaagccgccggcgattctacggatgccgctgtcacggtgcggtgtgtgtgtgtgacgcgacccgcgccggcgggcgccccccaaaactgaaaggccggaaacgaggtgagggaagagcctcatgctacgttccctctgacgatcgctaacatgtgaccgagccacgtctttttaccttcacgttaattcgttaaagaatctcaatccacggggtgttggtgggcttcacggcatcggggtactgggttgatttctgtgagatggttatacagcgcagtaagtctacttctagtccctcaatatatgtccaatcttattcatatccttgaatcgtggtaccggatatctagacacttaaaatattaaaacaggtataacttgcctccctcggcatttttggaaggtggtcaccgatacaacgctttgaattgtccagcccgttgagtcatcctgtaggatccacccgccagtgacccactgaccatgctcttccttcctttacccctcctaggtctggacgatagggcatccatccatggcatgctgcaagtgaggtggcggcgagttctttcagtccacctactttgcttgctcttgctcggtttcccctttcctttgaagatttgtgctcttctagtcttccctgatggagggcgtcgtcctcatcggagcggcgaagtgaaggctgcagcggccagcgctgtacctgcttgctatcaccggccatcatctggctactgtcaccacacatgtaaggagcatcgccgggcggcctagccaaggccccggaagcaataccaactgacaatggaggtcggcgacaggacgacagcgatgcccgcaattctttgcaattttgtgccatcgtccatgtcacgccacacaattcgtgcaagtcccacaaaaattgagaagaacaaaaaaagtatcccaattcgagccatcgatcatctcgtatgcacacgtgcgtcaaccgcgtcaggagatggaaaggcgtcggcgacgctggaagagcaccttggcatcggcgatggccttggtgcacgagctactggacgcccggctcgactgcgagatgcgtccggaacagtgagttgagggtgcgggggaagctccggaggaggcggttcaccgggctgacgcgcaccagctcacgcttcatgctcacgtggttcttcaccaagtcggtgagccgtatccgcatccgcaccacctccaacttcacctccgagttctcccaccacaccaacgtttagttgtcctgcggcaacatcgcgtcgcttcctatcccgttccacgaccacatcccaccgcctccggaggcgaaattgcttgaagtagagcacatgtgcggccatctgcatgggcagccgctcgttccgtgccgcgtgcaaatcccgtgccgttgccctgatgacgggtcggccccacaagattacttggcgggttggaccatgtcaaagtgccacgccagcgaaactgcgttctaaaacagttaaggaagacaaattacaccggttttaatagattaggagccaaggtatccggtattacggtttagtgataggaatcaaattagagtcaaagtgaacttgcatagcaatgtgtgggctgctaggcagatcgggcacagacagaacactgcccaagaaatgttctaacgaatttcaggcaacacgtgcgaaacaaaccatgattctaagtagcttatgaaagtatggcttgtcttctaaaagtacagtttctctaaaaacttcctacatcagcatccattagataaaactttttccaaattacttgtcagggaatgtatcctatgcacacaagttcttatctataatctatccaaccatccagttagaacacaccctaataatccatagtactcgagagtttgagactatgaggtactactgagtttgtcggttcagagattctggtaccccaaggcttaatcttctggcgtaacaatgtgaaggataaacaagtgggtgattttgtgatgcattctgtattcagaagagaccatgccaagtgccaagaacgtgaagctaccaactaagtcccaggaatgttccgtcacaacaagtgagtataaaagtcacttcggttaagatcaagcatggcgaccaagagcatgatcccgaagccaagagagtagaacgggattaaattcaccttttacggtctcgcacaatgcagagaagatcatggcgcggcacacgtgggtcatctccttgctcctcacctccgccgtggctggtgcgtcgcggcagccgcccgcgaccgcaagccaaggaccgacatggaccggccttgccggagagcaagaaatggaaggagcagccaccgcttcatccgcagcgccggtggcttcgctgttccccggcctcccgccattgccgccgctgccagcgctccccgctctgccgccgcttccaccgctgcccgccttaccgccgctgccaccgttgccgccattgccgccgctcccttcacccgggacgacgacgacgcggccgcggccaccatcgccaccgccgacggagtgcctgacgtcgctcgtggagctgctgccgtgcgtcgactacctcaccaacgacgccaccgcgccgccgggcgcctgctgcgacggattcaggtcgctcgttggcagcgcgctcatctgcctctgccacggcatcaatggcgacatgagcaggatgatctccaggcccatcgatccggtccgcatggtgctccttcccgccatgtgcagcaccatgctgccgccgcagtcgcttttcatatgctacagtaagccaacgcttttaattatatgtttttttttattttgccaaaaatgattttgaagtcacaagtgatttgatgttataaaagacataaatcacaagtcataaaattataacttttatggatttataatgttataaaagacattgacttgtgatttgattttcgcagcggaaacagtgccaccattggtgccatagttctacggtgcatatgctactgtcttcagtaacgcgttcggcgttcggccataccgtgcaaattactttacaattcttgtcttctgaacattcgatttcgaaattttgtttttcagactgagaccgatcgatgtaaaagcagatgggatataaagtttcatcaagattaactgctgattttcttaaaaaaaagaaagaattaattgttgattacttccttcgtctcaaatgtaagcatttttaaggtagtcacagatattaaaaaaactagttgataccccgcacgttgctgcgggatatatagatatataactttgaagaattatggctccagcaaaggttttaatattttgcaattcaagatatgagctttcttaacgaaacaggcatagctgcaggccttagcaagcatgcagatgaagttaattactttgacaaaaacgaactgcaccagaaaagtctgaacagaaacttgcaaatgtaagctaccaggggccaggcaaagtaccgattgtagctaacatattgcatttaacccaaaagattagtacagtttgttgacaaaaggaaatgaaattctataagagcatttgaattgtcgtgtctcattaattacctggcatataaatcatcacgtttactcataatcactagccaattaagtcgtacattcgtacgactatgacttgcacttttatatgtaacggtaacggtaagtatcattcatgggagtaccaaaaaatatcgtaaattttttgagtcaaaaactttgatatgtaactataatataattgaagtactataattacattgtaagtacactgtaattatattagtaactacgatataacttatataaaacttgtattcaactatgatttggttagacgtgacatatgtgaaaatttagttgtaacaattttttttcttcatacaaaagtttcgaggcgatccgatggtgacaaatctgaaaatttcaggggcaaaaaatttgtggaagttttctagcaaatccgatcatttatatatgttaaaatttaattaggtaattagatttataataattgggactatgacttgcatttttaaatgcgtatcgtttgtaataattatatatgttagaatttaattaggtaattacagctattggaactactatatttaagttttgccaaagagtgagatttacaggtattatatactaaactacacatagaacatataggctgtgataatattaggagttagagtaccatgttgttagcggaagatatttaaatgttgttaggtgggcaaagaatacgatgatttattttgagttattatagtgctctttttactattactccctccatttcataatataagttataaccacttttcttagatgtttcataatataagacatacatgcaagcatgcaattaactatgacattttcttcattaaattattattttttaaatcctccactctcatgttgtctaatcatattggatgcatgcattagtatttattatgatgatccaaactacaagatgataataattatttcttgttctttgggttaagggtggttgtgtcttatattttggaatgaagggagtatttagtagtagtagcttttattttaattaagtttaactgtgttgtttctttatttctcttacgtgacggtaccccatgaatggatttttattacttttgtcttttctgtttcatctctccgatggaagtctcctgactcttcctacgatcttcattattaatccaaccgttcacaccaaatccaaaggtttatgctatataagtatacctggctcaatgatggaagaaataaacattcttcgttcattaaaagagatatacatgaaattcgacttattcttttattttgggctatatccgtgatgccctatatattgtactagacacgtgggcttttaatattggcgggcccttcggagtattgccatggtggattcacgagtcttccagttaacttccgaagtcccttgaccatgctttttactttggttattttgagaaccaacggctgttgtttaatatctggctatatccaacagttctaattttgcccatgacgtggcacatctaggtgatgaacaactttagttttttcattactttagattagctaaaaggaaatattcccggtaaagaaaatcaagcttatgagattcgtgaaagtctaattaatagctaacataaggtatctgaaaatgtataagaatcgtatactatttattgctctatgctgctagctggtaaggatctttcaattgcagtgttattttgaaaaaaaaaagaagatactgttacattgtcctaatgatgaaagaaattataatgcggtaagaaataagtaaaagaaaagtgcaccttcaaaatctccatatcattcgcatgggagaagaaaactgaattctctcttaatttataggaatcataagttcgtgatcaaaactgaatatatatgaaggcagaaatttgtgatcaaaatttacctcatcaattagggtaagatcatgtatgtggcataaggaaaaacatagtgatatcatcaggttatattttttttgagtgggaaaagcaggagctctgcctatttcataatagaaggagagaaacataccttaccctatttgaagaatgtctataaagtttcgctatttgatgtaaagggagaaaaaaaagagtacagtatagacatcagctttaccaaaagctgataaatttgggatcgagccaatgaactcaacataggagaatgaggggagagaaaatgtacctcatccaaagactgatgggagtaggaaaggtaaacaccaggaagacaccaatcgactgatgtcaggagctgcaaatgaaatcatgttgacggggacaaattagctatgaaccctgcataaatgccccgtatagatcccattcccagccaagatcaaccaatgttttccaaatctaaagaccaaatcaatgccctgataatccatatgagccaccagatgaattggacgggaacttgatgaaaatcgtcagccctaataatccacatgagtactgataatatatcgtggtgagcgccgcgccgggattgaaagcctgtatgctcgcagagcatcgggaggggctcgtgctgaaagaggaagcatcaatatttagcatgaagaagaggaatggaatgggtgcaagaatgatgaaacgcatctggagaataaatggaattaactatacctaattgccctagccgacggctcggtggcagttgattagtcaatttgaggcttgccgttatgtgagtgagggttggtggagaatttgatggaggtctgcctcctcaagtcgctggatgctggagcgtggaggtcgcacgtagtgcactgctccctgcgagcgttcagattagatcgaacggctgagaattaaatggtgacgtggcttaaccacagatcagttttgggtcttacctatatagaaagaagggatagggaaagatgattggatgatggttgtaattggtagagaagataaagtaggtgaagatgatggttatgattgattgagaagaaagcataagtgggaaaatagctttattttgggatatcatggtgacgtggcttaaccacatatcagttttgggtcttacctatatagaaagaagggatagggaaagatgattggaagatggttgtaattggtagagaagataaagtaggtgaagatgatggttatgattgattgagaagaaagcataagtgggaaaatagctttattttgggatatcaccgagtactccatccgtcccagaatataataacttaaaaccggatgtgacgatttctagtactacgaatctgtatctgtagtactatgacacatctcatccggttctaagttgctatattctgagacggagagagtagtgactagcctccggcattcactttccaaagcaccattaacttgcaagttactatgctaaaaatagctgcatttaaaaccagatgtgatgatttctagtactatgaatctgtatctgtagtactagtgactagcctccggcattcactttcgaaagcaccattaacttgcaagttactatgctaaaaatggctgcattttatgatggatgcagtagtaaattatctttcgctgttgagtaccgagttgtttgtatatgtaaattgtaaagggtcttttatacaagtcacgtatagttctgtagtgctgctaatttcgcggcgtggaagacaaggcctggacatcagacacaacgatattgcacttgttggttgaagcatacgctgtgttctttgattctgcacatgagtatttctcaagttctcgtgaataaatcattcaaggaactgaccaggcagtatagaaacgccggtaagttcccaaaagacaaggggcagataaaatatgtaaacatatcacatcttcatagcaccatcaatatgatttgcctgaatccaagtaacatatagcaatatgtagaagtatattattacacaagaaccttctaacaaatcacccagcaacaccatccagccaccggccaccgcgttaatatactcgcggtgaatccatccatgcgaaagcctctcggggtgggataaatacagtagtccacgagagaccactaggcagacgcattgaccaaaagcctccgcgaggtatacagaaggacactaaagtgcagatatctcctttatgacctgctctttgtctgcctcgaactgttcatcctctgataaaccataacactgctattagctcatgtgcaaatgatatagaggcatatcaaatcccattgatgaacagctacagtgggaaagcttaatagatatgatttgtaccagctcaagagctgaaaaatgaaaaatgaattgaacatgcagtcttgagaacagaagaaaagcaagcaagtgtaaaaattgaggtaacaggtgttaaaataggtagtaaagcacctttgtcaatcttgaatccggcaaaaaatcggagaagcttgcttcggtttgtgactagtatgtttacaacctcagttggcttgtttttatttgccgcaaataactgcagtatgtagcaaatgtaataatcatacctgagttcaaataaacatcacctgctttactgggaataaatctgcagagtattaatactaaccttgaacacatgaaatgcttcaatttgaatatttttgcttgaatcctgaaaattcaagagatgaatccatgataatatgaatttctcagaaagaaaaatgctgatagtctgaaatgccttgatttgaataatcttggggccattatttcaagaggataagtattggtttttttctgtaaaatgtaatggcgattctacataggtcacacagcttagaaggttgactggctttgaggctcaagattgagttcaatgcaaattttggtttgaaacctatgaatcatcagaactggatcatgtgttgacagctccagaaacagagaaataaacatggttgcaatacatttgttgtgattaatgtattgctaggaatatcaataaatccgtgtggctgtgacagcattcttcaacatccctttagcgcacagttttttaatgtgtgacactgacaaatgtagactatcagctgggttttcatcttaacagctatctttaccgaaaactatggtccaaagaaattttaatgtataatcataatcatcatcataagctgcagaatacaaggatttgatgggacatgggaatggtgatttggtgatattttctaatgtttgcaggtacgtcaaatcatgaaagcctaaagttgcccgttgcattccttaaaattaataaaggtcaaagtggaagtgaaacttactctcaagagattcatgagaatcataagattatcttttgaactaacataacgcatcatgactgtagagttggatctatcaagcagcatgtctcccaagaactgaagggggaaaagtaaatattaacttcagaaaattagaaaacatagtgtacagtgtactcacagcatcaaaataaaacagtacttttacaaggaaaagatctttggacaccaaaagtgtatatgcatgtgtgagttgtcaaacagcaattaatagtagtgaatcaagcatgataagctatgcaaatcacttttcatgttccaagagaaggcagatccaaatcacttttcatgttccaagagaaggcagatccgtacatgcagacatatcacagataaacccacatgtaacagaatagcaataccttgatagcctgcctttttgttatgtagttggttgatgatagcaacctagtgttgaattctgaaaagaactgcagaagaaagaaagatgataaagacatgagactacaatagcagaaaagatgttacaatttaaaccatacactaactgaattataagtggcatacaaagcaggatacaacagtgtttgtacatcgacatggattaacaatgatgatgccaagtaaaaatactcacccagtcataattctttgacagaaattctgccacggtagctttatgccttgtcagaagttcctgttttgagtaaatcaatatgatcacacaagaagacacgtatgaaaaaggaacaaggggatgaaaaatattagccaagaaagcaagtgtgctcctgcacttcactaaaaatccaaggcatcaaataatttcctcgcagcaacaagttgtgaatattgcagcctgaatcaagttttaatggaaaaaaaattgccacatttttatcaacgtgacttttggaaaagaaaagtaaaatatagtgataccagcggccagtggacatagagatgttatatgtaacctatgtaacattcttagtataattcaggcatataagttaggaaaagaggaagaaaacccaacaaactttttgcagggcgggcttcagcaaatcaccttaaaggtcgcagaagcatctgatgcaatgtcaaaatttggaagttgtatatagtcaaagaacttcttcatgtggtcagactctaaaacgtacctgtgagtgaacatttaccaagataaataagcaccattccgacaggaatttctaatttctacagtattttatggtttatgtaaaacagaatccttagttgggataatatatgtaatctattatcttacgctttactacttcctccgtttcaagttataagatgttttgactttggtcaaagtcaaactgcttcaagtttaatcgagtttatagaaaaaatagtaatattttttacccaagataaatttattacaaaaatatatttaattattaatttaataaaactaatttgataatgtaaatattactatatttgtctataaatt

SEQ ID NO: 24227 - DNA, 33431 bp, Oryza sativa
ctatgggcctacagcacgtaaactacaataaccattcacatgaatcgggcctctctgttaattatgcattccttcacttaaatgggtacacaatatatcaactgaagaaaagaatcttgaatcaatatttggatacagcgcatgaaattccagtgtaaaaaataataattcgagatatgaagggttatgtgcaggtttccacaaaataaatttcaaatttaaggccctctttgtttaggcttaggcttttaagccaattttttggcttgtatgttttataagcctgtggctttgaagcctgtttaatgatggagtcatacctccaattcacataagcaacaaaaactactccaacctagcatttgtcttaacagtgtaaagagtggcttatggcaacgaaaaagctgcttgtttgtttaggctagacctttcggctcataagctggcttataagactaaacaaagagggcctaaatgtgcttgcatatccacttgataggttcataggcacaaaataaataacaattttaatgtgacacaccactccaatacaaacttagtgcttgcatatccacttgataggctcacagggatgatggattttgctgacatgatgttttctgatgtttgattcataatggttatcaatttcagttcagtaatgtcaccttgcaatactttggtggcgaatacattccctcagcatagagccgtaatgcaaagcaatgtccatattctcatacctggtaagtagtgaaaataacaggcaaaataagcaaagctagtctgaagcaataacggtacataagaaatatttggaatgcaataatcatgtggctactgcaagctaaaaaaggtaaacattaaccatatttgctgtattcccatggcataccgtcaagtcaattgttttacacagttattgtcaaatctaaatatgaacgtgcataattagtgctagctcaaaccattgtgcaaaaggcaggccccacaatcagatggcctgattggtgtactgtatttgttcagttggtgggacctatgggctgaatttgacagggatcagacgatcagccacaggtatacatggtaatgtggggttgaatacatgaatcatttcccttgtgtgcagatcaaagaagctggtcccattaccatgtcctgaatttgggtttgttcaaacgaacacttagtttcgccttttcttccactaccatggtccgagtcccccagtgggcatggtgcgaatgctaaccattcccttcacggtttgattttttttatccccactagaaatggcataaagcaagaactggacataatagttattgcagtagtgttactggaatattggaataacgtcacttgttatatactgactcatattatgtacaatatcaaccataaagaaacccaggggaaatggtttgtaagtactttctgatataccttaactaactaatgaaatactgtaacatacgtgcatccagtttcgtaatttaaagatggaatatccatctagatgtcttcatatggacaactagttttactttaactattattgagcattaaatccagcgcgctaaatatggaacacatggccaatcaagtatacagaggccaaagaaagcgcctgagaggcaatgtggcaccaagccactaagaagcaaaaagagcaagaacagctaaacaaacatgatacggccaaatattttataaaaggaaatgaaataatgttctgtaattgtttacttgcatattagactcacccagaaattaaggtgtccaaaagatctttatttgcttctagatactcagatgcaactatttttgaggagacttgctgcctttgcaagtttgcaacaacttgagttgcatctttcctggtctgcaagatatatccattaaaataagttagccatctaaacagtagcaataagaacagtacatgtatcaccagtaccatcgcaatccaccaaaaacaaaataaagttgcatacctctaagttcaatttcggaagacaaataattagaagccgtaaagtgttctctctgaagaattcttgggtcaattgcacgcaagcctcagtcacaggttcagattcaccattgccataaagaattgacttcaactccctgatatttttgcttaattctgccatctgcataaacatggtcttagctgcccataacatataggaatatatttttcaagttcatatgtattgtttacagaataaattgacccaaaaattcataatagttaataatattgaagtaatcatttgaacatcattatgccagtgcacgtttcatcaataagctttatccataaaggcattattaaatgctaagagaacattccatcaactagcttttacaggcaaacacatagcggtaagtagtgccaaggattaaacagtctacatagtcgaggaggttatgaattttctcagcattatttaatttgagatggcatcttagtaccacggataagagccatagcttaatccttgtagatgaccaccgacacactgagaatcttacactgagttacaactgcaggccaattgattatctatccaattatcataattgcataaacagtcataattaagcagcctatgggtctccgtggaacagagaaatttcctgttcatgctgaaaaagatctgattcatatgaaattaatatcaacttcctatgaactgaaatgcatgttttcgaaaaatgccgtaattgtgtcatatgccaaaaatgtatatcatggagttacatagactaccccttagttttgtacattccggatcacatcgatataattataccatcttaatagtcacaacctcacggggaaaacaaatctgctgccaaaagcaagtagactaaactcatataccagcatatcgcaggctcgcatctattgcatttatgataagttacatcaaattgaaggaacagagcacgaatcatggctaattaggtaaaaaggttccactctcatgagcgatcggggacgaatgtgcgcagcaagggggatggggcagcaaaaaaaacagtaacaactgcgtgttcgatctcaccttctcctcgcgcttggcgtcgccgccgcgtgatccggagtgtaggtcgaggaagatgaggagctcccgcgtctgccgcacgacgtctgccggcgtccgcggcttggacttgaagaggcccttcatcttggcgccgtcgtccgctgccgctagcgccgcggcggcggcggaggcggaggaggctagcggcggcgcccgcggcggcgagggcaggggcgaggcggcgggcctcctccgcccccccgacccgaaggagaagcagccccggaacagcgccactggtcccgccgcggcaaaaccctcccccactgggagaacgagtacccacccctcctcctcctcccccaccgcgacggcccgcggcgacgcggcgagggttcgtggggttcggggtctcgcgagatcgtgacgcgatgcgcgcgcgcgcgcggcggcggcgcggcggtggcggtgggcggtggccgagatccccctctcctactcccctatccacccacccaccggcgcggaaggaggcaagcctagggctagggggcggtgcgtttctcgacgcttctcccctgtctccttccctgctccgcttttctcccaactttttttttctccttcgtttttaactgttatctttctgtgcgtgccaattctgtgatccgctttggattcagcggcctttgcctgaacacgaatcaacgcaatcatcgaccagagaaatatttccacctgtcattgggatcagcaatcaacggcctcgattatccgctgcggtagacatgtcctcctaggccatggccattcacagtgggcttaagtggcattcagcctccacacccaaaaacgaatattccatgccacatcgtcaaaccgtgcagcttgctcaggtccgagtagccaactttggctacgagttcttcacgtctcaagcgggacccacactatgctagaggatagaggggaaaggggcgaggtagtcgacgggctggaggaggaggaggcgagagcggggaaggagaagaggaggctggcgtcgccgtcgttgtcgctgcccggcgccgtcgccgctcgggccgtctcgccaccgagctcctccgccatcaagccctccgccaccaagctactccatcgctggcgcttgccgttcttcggggggaggaggagggtggtgcgcgggcgagcgccaagcctcgccgcccctccggttggcaccgccgccgcttggctgcttggccggtgatgcactcagcgctcgctagtcactacggtggggaaagaagccaggagagagaggggggagagaaaaaggtggtaaaagctggtaatggtgggacccacacgaagcaacttgcactgtaatacatgtagctaacattgttcctggtctaggtggcgcgcgaggctgagcaaataattgtggcgtattgtgaatgcccttagagcaggattaatagtaccacccgcttctggctccaacctcttccacgtcatctccatacgaattaagagacatatgatacaatagctaggctctaatactacacacattacatatctatactttctatatagttggtacccactaaagctaaagcttaacaggcaagcatgccacatcatcacccactagcaattattattctagctcatttaaaatcccatgcaagtatgccacattttcactcactagcaattactattctagcatattttcaaatcatcttccttatattattttctcaacatttcaactatcatcatttcaacaatatttaacatatattcatccgtgaatcccgcagcaaagcgcgcggtatcacctagttattttaatataaatgggcctatctatcatcagtttagggtagcatggatgtagcaaacaggtctccttgcgctgcacctgtggcccagcgtctcggagttcgcgtgcagcctggcgcttatttagtcacccgctagcgttctctcactatccttctctcctccagcacagcatgcgagccaacgtagatacactatcgccgacggatgaatctttattgtacctgctcatccaaaccgtttgaatgctgttcaatctaacgaagcaacaagcatattttggttgcgagattggaactaacgaagactaagtttaacttgacgcacgtcaaacgagaaaattattagtacatgattaattaagttttaattattacaaacttgataaattgatatatttgatattttaaagcaacttgtgttagaaagtttttgcggaacgtatcgtttagtagtttggaaaacatgctaacgaaaatcaaggtaaaatctaaatcttaacgagaaaagcacttttacaggcagctattatgaactctgtctttcagacgaactcaacagatagcaaatgctcaattatacacaacagggcagtaaacacaagttaaattgatgaattgagatttcaaagtacatagaagtagtgaaagggtaaacttgcagtattccactgaaagtatatactccctccgtcccataaaaaacgaatctagaactgaatatgacatattataatataatagatctggacagaggtatgatcagatttgtagtactagaatgtgtcacattcagtactagtttggtttttatggcacgaaggaagtataccccttcggttgtccagcattttcctcttatttttccttttttttagaactagtagcattcgcctccttgcacgggtaatctgagcactgctcccacagtccaacggaatgggaccaatcccatcgtcggtgttctactacagtctaaaaaagcgtgtccagttgctacaccgtactatatgcaagacgagatgaaaaaggaatactattctcgtggctctctcaactggtgcatggtactatgctttcgaggtggctcgtcgtacgggtgagtgttgctcctgtttacaactgcatccccgtgtaccatgaatcgtaaaaatggcttcccttcaaataccataattttaaattatatctgttaaaatgtcaccttcattggtcttcttaccatcggatttggtggtccaacacatcctaacagcccaatctaacaatttaaagggtagtggcaatggtaccaaactttgtcggctctcaaaaacgatcccgatgttgaggaagaagagcgatctcaatgaccttgctagccctcgagcttagttttaacactaatgatggagagatcatctgatctgctaaggcgaatgcgatcgcgaaaggcccatcggagataaggacgagcgatgttagttgaggaagaagtgtcgagctcaagatttggcgagctcctttgctaccattgccgcaatccatttatagtcatgttgatcccatgctaccccaagctctaccacctaccatgctaccccccaccattgttacaagacccttttttatgatggcatgatctcaaattttttcactgccgacaccatcactcctccaaccgatgccggacctcctccgccatcaccaccacaccatgtggacatcccttccctgcctctcctcaagttgatggtggcaagccgagcaaggtgtccctgccctcgctgtctttcccatctctaatagtccacgtcgacagagatgcccccaccttaaccattcgctttgctttgccctcatcatcaacactggctcactgctcggtaccgaccctgcaactttggcggcggctccactttccacgactatacctttaagcccatggcccatggaacttacccctttgcaccatcttactctgtccccaccccccgatacctaactggtctgttttgccactaccatcacctgagatgagctcatcggagcaggaggagaaaatcaggctgcacaaatctccaagtggatgggtgaattcaaaaaaaaaaagcaagatatgtgcttcgattttatgtcaaacggaagttagcaatttcatatttatatttatatagggttgggtttaggcacggtcgcatggcagctccgctcggatggtacgttttgttggtaaaatttgtcggttccttttcgatatttcaatgaccgagaaaattacttcatttattctaagatccaataacttctcgtattcaaaaattgtcataaaatagaacttctccacctactctcttctttcaaccaaatataatcctctacttttaatttctttaactactatctcatcttgacctagcacaaccattcactgtgtagttccacccactttcctgatagatctataatcttataaaacttcttataatttaagacatagagaataataagattaaaataggaaaaatatgcagcggaaaatgtgggataacatatgctaatatgtgtatgcaatggaaaatctatgaatatacaaatataacaatcaaaattatgaataagcatggatgaagggagagagagaaaaaaaaagctgaaacacaagtgttcaagctctaaaaaaaatacaagtgttcattatttttttcttgttctctgtttgtcctctctgccactagtgacaggatcgacggggatgtggaacaacatagagcagccatggttgtgatggatgcggtgaaaaagaagactttgttaaatttgattgtaattttcctttttgatatggtattttctgttttctttaatataagttagaaataagatgtcccaggatatctttgttaaaaaaagttctcaaaaaagtgcaagtgttcattattttatagaaaatgagcatttgcatttcttagatactccctccgtcctaaaaaaagacaaaccctgggtttccgtgtccaactttgactatccgtcttatatgaaatttttttataattcgtattttccttgttgttatatgataaaacatgattaatattttatgcgtgacttatctttttaatattttcaaataagacggacattcaaacgttgggcacggaaaccagggtttatctttttttggaacggagagagtagatgtttgatagaatttacgttggaaagaatgacaaactttccaatctttattctttctgggaaaaaaaacttgctcttcaatttgtagcattgggaatcttttgtaggaatggtgattaaattttcttctttccttttaaaaaaccgtgtaaaattcgtacatttcaagatgaacccaacaatctacagacctacacaaacaggagtgtggattgagaaagaaaggtaggagtattccatgatcacagcatataggttattgatgtgctactttcgacatccacatccatcagtatacctgtatacgcagacatgcatccgacaagatcaatatcgcttattgattgtattcaggactcctattaaaaagccttgaaaccatgagcaagatcgatcgacaaatggcatacgaacaacttcagaattggcaccggtgcactttccacgctgtcccacaccgcccttctaggtagtacaatcagatggtgtgggcagctgcctcttccaatcagatggtgatgacaagcatcaaatgcgagtgtttctatgatcccccaagacagatgaacgtactttttagcgtttaatcgacagataaatacgcctcgatgcttttggatggtagtacaaagacgggtgattttaccgtgttccttcttggcgaatttaaccgtttttgatcgaaatatagctgaaaaggaacgaagaaaccaaaccatttttttcattaagagtactgatatattaaaacagagcagctagtttgctcgtcttgcgagatctgatgacaagcctagaacaagaacagcagcagcaggagcaggaggaggagaacgtgttattcctctgaactagtagtaagtttcagctgagatccgacggctgcaaatgccccatctctttgcttcagaagaaagcacggcttccgtagaatactttgggagatttctccggcccaccggccatcggcttcttcgccgccgccgcggccgccgcgcccgagtcggcgccgctggagtccgcgtcggaagcggcggcgccggcgccggagacggccgcgctcttgtcgctgccgttgtccaggtccagcgggagcttcatcttggcgagggactccgtgaactgctgcatgctcttcatgtacatgtccatgatctccttctggtcgaccttgacctcctgctcgaggttgacgcggatgaccggcggcttatccaccgcgctctcggacatggcgccgggggagttcgccgccgggctggcgctgctctgcacggtgcgggaggactccacctccgcgtcggcggcgtcggaggcggccttctccttctgctccgccgacgagacggcattgccggaggagttggactgcggggtggccgggaccgcggcggcggcgggggactccgtggtggacacgctgctgaccggggtgtcgctccggaaggtgccggccgagtcggcggtgctgttgtccgtcgagaagctctgcacgacgcgcacgccggcgacgtgggtctcggcggtggcgccgtcgccgtcctcctccgaggtcaggaggctctcggagctctgcggctccacggcggagcacggcagcccgatgtactccgacagcatgatctggttctcctccacgagattcagatcggggaactcgatcttctcgtactccttaccgttcgccgcgccgccggcgcggtgctcctccgcgtcggccagggccggcttgggcgtcggcgagatgggcacgacctcaggcacgaccccgatgtaggacagctcgagctgcaggaacccggcgtgggagtggaagatgtcgttggtggagagcgggaactcgcgggcgagcgtgccgccctcggcggcgacgacgtccgggagcggcacgagcgcgaaccccagcagctggtcctgcaggtagttcttgacccggctcagcatccacacctcgcaccggagcgcgccgtcgacgtccccggcgcgcacgcccaggcgcagcgactggtcgaacaccgggttgcgccccccgccgttgatgacctgcgtcgacgccgccggcgccccctcccccggcagcgacagccgcgcgtacacgtcctgcttgtggtagatgcagatgttctggatgtcccgcgcgctctgcacgtgcacgtcgacgtacccgatcagctcgccgccgccggcgccgccgctcccgttcgccgccggcgcagaaaccgccttctcctgctgcgactccatggcaacaaacaccaccaccactcgcctgcaaacaacatccaaaagagataacaacgaatcaaaccaaatccacacaaaattgagccgaatttccccccgactaaagaaatcgaaaccggtgggagagcagctgcatagtcaaaatccgacggtaggtggaagaacagcacaacgctgaactgtcggcagatgcttacaaaaaagaaaaataaaacccagaaactgcagcacacagagtctcctcctcgtcaacgtttctcgaacagatggaatcactaccagttcacagccccaagaactcgattcaaccacacaaccactcaagaactgaagataaataaactcccggaaaagagagggcgatcgatgccgcgtaggtttccatcccaataaagggaaagcgcaagaaagagcacaaatcccagggaatccaagagagcacagaagctacagagcggggaagcaaagcaaatctgaaagcagaaagcacgagaggattcggcggtttcgcctcttaccttgtctgtactggagtactactcgagaactgaagcagcagcagcagcaagcacacaccactggttggaggaatgaggaatcaggcggaggagagagcaggagcaggcagcgtctactggggggctcgaggatataacaccaaagggggattagggtagtagcagcagattttttttttttagtctcaccttgcttttttttttctactcccgtacctaactaagcttgcttttattgccttgtttggctttagcagccacacagccctagcctcaagaaaattaccccgagtataccttcactcattcgttcaaaccactgtatctgtagaagtgtagattatagaattagtacgtgtacaggtagcttaaaaaggggtagaaagggaactggaaaaagggaggatggcctgtagaaaggtcgggaaaaaggggtcgcagaaagtccggggcaatgcagtgagctcagatcaggcgggtgcgctgtttctaggctatattttactcccgttttttttccacggttttgagcgatatggcccgaaaaagtcaagcaaaggcatccatcgactcgcctctgggctctggctgcttgtggcggcagcgcgtgacgggccgcaccaatggggcgcgtccacctgcagcctttggatgagcaggcgggcgtatttttttggttttcctaatcggaaccgtctcgtctcgagtccgcttcgtggccgcggctgcccgcgcctgcccgcgcggtgccggcggggggtgggtgtggcgtgaggggccccgccgcgtccgcacgctcgcgcggagttttcaacggggggatactggccctttccgcggccgccatcatgctccgcttcagtttggtggatcggtgggaagaggatcatctgacttattttttttacgtgattaaattgatacagagtatatgggttttctgaataacgggtttattgacaaggaccccagatagattatccatatcctaactaaattatatcatattaattagtatatcgattaataattagataattactatatattgtatcctaggaaattttgttctaggttcatcactggtcgttgtgtgagagacgtttgtaacccgacttttaaaattggataaaaactcgtggtttgctagctcattcggctcatgtctttcgattcatttgaatttgtcaacaagtttatctgagattttaaattgttaggtatactagcttttatgagccaaacaagctaaggcaagtatcaaactaacaattcaacaaaacattctgacacgaaaaaagttcacatagaactcaaaccttagtgtacgcgtcatcctcgttggtcacatgtagccttctcgagtctcaactcaacacaccccttcattcattttgtcatatcacagcattccgctcggtcatagctctgttagatggatctccctccccttgagcccaacggctcaagggggccttgacccgcgtcctgatcgggggcgcccagcccaatggctggtgggcccccgttacactgcgccatataaaagggggtggaggccgaggcagcacacgatacgaggttcgtcgccgccgccactccaccccacaaacactaaccgatcgagagggagcgcagccagtgacgggaagacgccatcgccgcgccacgcttcatcgtcgggatcgcctacgaccaccgctgccacgacaaccgccgccgtcaagcacaccgtcgccgccgtccacgtcaagccgcgacaacaatgacgatgttcagcgcatcttcctccacgagcacctcaattggtcggtatctaaaccctctcttttcatccacaatgttattcatccacccaatagagccaacccgactagatctatacctaggtgatcctatagacgatctaacaagctctagatagatattgctatgtgtttggttgattgtacgaagtatgaaactagtgatggatattctaatttgtatgttggtttgatgattcaattgtattcaaatatttgtaaacttaaattgatgttgattttaatcacaagcttaacgactcagttataactacaactagcaaatacacttttaacttattaggataaccgagtaaaaaaaaaaagagctggctcgctatccacccgtatccgtcctgcaccgtactgcaggacgtggcaagactcaagagggtacccgtcgcgtgagcggagcggagagacttggcgtgttgggcttgttggtacgcgtgcgtacgtgcgaggcggccgtccgtgcacacgcaggaccggacgaaagggattcggattattgatgctcgtgtgtcccatgcttccgagaagaaacgtggttgacatgtccagtactctagtgtggttgcgatcgatctgcttgaaagcaatctcgtcgtgccgatagcatatgaatcttatccgtctcacttgcaaacagttggtatttttgttagcgttttgctctctttcaacgggagaattaattgaaggtacttgcaatctgttacggaagttccaagttgaaaattcaggtcagagattactggaaagagaactgtcaactaagatttgggcaattccaactacaagatttgtggaggatataaatcaactttctactggtagggttttagtaggccttataggctatagctactggtcaatagactcgatactttcaacttatattacggttagtcttcaaccaagaattaggctcagcatggggttttcacaaaatcaaagctcacgtaaaccacgagatagagatcatgtgtgtgccaccatgtgaaattcgtcggcgtcattcctctgctcaaactcatggactatatatgtgcacctctcactacttctagatgtgatattattgatcactgctttacaccaatcaaacaaaaccagttatttcaaacaaatagatgcttaatagtcgttgcatgcatgcttccagacttccagtcaccaaactgatattgtagtgcagctctagagttaagaaaaaataactttctgagaactttcatggtgtttgtattccaaaaaagggtatatatccaacggttttcaatcacaggtatcatataaaaggtatttaagtattagtataggtacttaagtactaagagtaaaaatataattttactagtagagcaaaaatggtagaattgtctcccaaatcagaatcggtaccgcgtaggtactactatacgagttaacatttccccgaaccaactttacaggttcttatttgcgtattttcccttttgcgtggttttctcttgatttacgttgtgtttaagttaaatcatttagctagcactagcgttacaggttcttgtatgttgcatcattttatctagagctactctgtttttttatgttctctattacatggttttttctagagttacgttatgtttttataacccgtacatgtcaaccagatcttgcctcttgttcaaatgatcaaccatgctagatcttctttcttgaccgtgtctcctcgtaggtgcactgttcaaacactagaagaacatcataggaggagatatcgtttactatcccaaaaaaatccagtcccgtatataaggaatttatgaaatgtataaataactaatcaatataaagcttcggtatatataaaagagcaaattgcactggcggtccttaaacttgtaagcaggttttatttagatccacaaacttacaaagtgtgtatcgaggtccctaaacttagtttattgtatcatccctgtccaaagtctcatttgaccgtggtcttacctacgtggcatgacatgtcgatgacgacatggcacattattattattatttctttttttctcccttcttcctctttcatttctctcttcttcggactctttgacacgggggagctcgaggtggctctagtggaggaagaagataaaataataggaggaaaaagaaaagggggaaggaaaaaaaaatagcatgtcatcgtccacgtggcgtgccacataggtaagaccatggtcaaacgacactttggaccgggatgatacaataaaccaagtttagagatctcgatgtgcgctttgcaagttcgtgtatctaagtgaaaccttatgacaagtttaaagatcgctagtgtattttactctatataaaaaaagatttgagcgcatttattataaaattttactgtatgttttagttttatgtcaaaaagtaggcttgattaaccctagaaggggttttcaggtagattaacctagaaaatatatagaaacattactctagcttttgtcactcgatagagggagtagtaccatgcgaatctctcaagtaatcaaggatcatggcgatggaggaggtgttgatagtattttggagtttttttcagtatccgcataaggacatttccgatttgtgacctccatattgtcttttagctttgtcacaacatatgtttaaggtttggtagaagagggggaattgaataaacaatacacgctgtgttcttacacaagagaccacgatgagtaaacgactgatgagacaagaatatatatagtgtgtgcgagtggatatatatgtcaattagcacattttctttttttttcaggggaaacggtaggagctctaccaattgcaattaaggaggaggagaaaaacatggttttcatcttacaaacagggccacaagcgaaggggtctcaagggactccccgctagacacataagggaggtcacaaaagctttaggaaatgaatagcaacaagcaggagaatgcgttgaagtctcatctaagaattaagggcttcatcaaattctttgcacatgccgatgatggactcgacgacctgaggaaccatgttgtattttgccattgaagatcctctcatttctgccccaagtcatcactggtggagaaagcgtttgtagtcccggttcataaccctcctttagtcctggtttgaaaaccaggactaccaatccaggactaaagatcgctatctttagtcccgggtgaaataactgggactaaagatcgatctttagtctcggttggtaacaccacaccaaccgggactaaagatggctcagccacgtgaccggctgagccatctaccaaccgggactaaagatcgagctgaccttttttttttgcatggccctgttgctgcatggtttatatatataaaccatgcatatatatgtttcaatacatatgtatgcatatattatatatatatacatatatatttatttatttatattatattgtttcaatacatatacatgcataatatatatgtattatacatatatacatatgtatgtatatatacatatacatatatatacatatacatatatatatatatatatatatatatgtgtgtgtgtgtgtgtgtgtgtgtgtatatatatatgtatctatatatatatatgtgtatatgtatatatgtgtatatatgtatatatgtatatatgtatatatatatatatgtatatatatatatgactaaaatatatatttacattaaagaaaatgtgtacatgcatatagaaaaatagacaagtattaattacaatccattatgatgtcctaactagctacgattcgacgtagtagtagtcgttatctcagaagctaaggacctatgaattgtatttccgtcgtagtagaattcacccttgggatcaaggatttgttcgttgatgaatcccatgagttgttcttgaaccgccgcgataaattccttgtgtgtgatcaggttatccctcatgcgaataaactatatgaatgtatgaaattaattagtaattaaacaacaaatcgatacgtatgaaatgaaattttgaatttatttctacgtacatcgagctctcttgtggtgatgatttggtctgcaaggcagtggcaatactcgcacacgtagtagccgcacaagttagttccctgctttgctttgcgcactataaataaatgacaaacggtgagagatctaattaatatacacttgtatgtatttgaattggagattgaatataaatgtagagcatgtgtactcacaggaaaattgaacttccacctaagtctttctctctatttgccgcggaccaaatgacggaaccgataccaagccctacatggagtttaaagctatgattcgtagtagcaattaattataacaagattcttaattaacataggaacttatgacagtacctgtctataagttcgaaaaccttgtcaaacgtagattcttttttatccattgagtcatatacgttgacggtgcaggcctccaggtcgaagagtaaaaggatccagtggaatctgcaatgtgcgtgggatgcattacatatgaaacacttagcatgttcgtacgggaatgaaatttgttataggaagacagtaaaaactaactctgtgttgtacggtaatagtatgaacgtcttgtaatgctgcgccttcaggagatggacgagattgtcctctgtggcttgcggatactggacgagcattgcgacgtttactttccaagggtcaatgaatccagtatcgaaaaccccccgccgtcgggccctttgaatctccattctacaatgataaaaggaagtatatattatatataatctacttatgtacaaggacctaattaattaaaggaaacgtaataagaaatctaactgaacgatacttacaaaatccagcaactcataatagagacgtcgagggcgtccagctggtacagttcgtagatacccttgaaattgatccagagaatgtcatctccttgcaagaagtccgtgtccctgatcctcgctccgatcatttctctaccggtggcgctcatctccatgtacagttgatggaacttgtacatttgtgtgggtagggactgtagctgctcaggcttgacaagtggtttaccgagttcgtacatgtatttcacttccgccttttcgattggtgcgcctcgtagcaattgatccatagttagcccggtgtcattaataaattcttgtattccaaaatctacaccggtcaccaacgactcgatctcttggtttggttgctctccaagctgagggactggtttggactttccagaagatgctttcttaagtgttcgctcatagtccgatagctttatggcctccttggcaggtgcaaacatacacctgaataagttcctggcactcgagtatataggaatcttattttctagacttcgaggcttcaattgtctcctgacttctgatgccacataagcgtcaagctccttttgcgtgcaatcgtaccccgggtccttattttttgcggcgtcaactttcgccttcttcgttgcccttgtgggggcaggcggtggagcttggggggcccttgacttggaaggtgccggacgaggagcttgcggaggagtcggtgtaggagcctaaggaggagtcggtgcaggagcctgaggtggagacggtgctggagcataaggaggagacggtgcaggagcctaaggaggagatggcggagccggaggagatggtgcatgagacgccgcttgtcgcctagggaggatgatgtatcacttgcgccatagtataatggcgtggcttgtgtctcgtagatgcgtctcaccgtctcctccagggtaatccaactcgaggtcctcgtacgcgccttccaccaactcaacttcgaccttggagtatcctgctggaattggcctacagtggtaagtacctaaagggtctgttggtatggccatgcccgacgccaccttcacgtggtgagaggttatttattagtaatcaacatatataagcagcaacttgcggaatggacaaatctaaaatctataaactacgagtttacctttattgataagttcttgaagggaatatgcagctcacatggtgtccgctgagtgatgtcatcaacagggcatgtggtttcgtcctgggtttgcatggcgtccatgctctatgatcctacctgccccgttgaggcgcagctgctacgattgcctgaagggctcaccattgcaggaagaatggtcggctggggatcatgggaccgatgtgcggccatgcgttcatcaaccttccttgccacctcctcttgcatgctgagctcgtagctcgataccctatactcaagatctgtaatcttcgcatcggtatctctcttgctactcattcgactcctatacgtgtggatgtcctccttgaatccaatcttccaaggaatcacccctttccctcgtgttcgtcctggatgctctagagtctgcagggcgagtgacagctcgtccttctctctgtcgggacggaacgtgccctgagaagaggcttccactgcgtctgttagtcgacgcgcagcctcgcgtatctgatcgctgaagaccagggagccatcaactgggttgagcgttccaccgtgagcatagtaccggaacttcgatcgatccggccatttaacggtggccggttcgatacccctctcaagcaagcttgcctccatctcctcccacttcggcatcgcgacactatagccgcctgacccccagtggtgatggtacttcttcttggcggcattttctttgtttctttccatcatcgcttgcccttgttgacctgtcttatatgcaacgaactcgtcccagtgatcccttagctttgggaatgtgtcgaagttcggtgtctgccccttcaggatatatttctggtacagatctcccttgaagctctgaaactgttctgccattttctttagagtccaccttttcactttgtcctctgtacccgcgggaagggtgaatgtctcgagcattgtggtccacagcatctctttctccgaatctgggacaaagctctcatgatctctgtgtgcccttgttctgcgccagtacactgtactgacaggcacgttatcccgcacacccaaccgctgtgtcgtacgtagttcttggctgcttccgccggggcactaggtcggccgtcttcgtccacttccgttatgatgtgccgaccctctagcttcttcgcggcacctcattgcccgcgtgccctcttttgtccagcggagggttgacttccactagcctcctcctcctagttcccctccacatccctctccacgttcccctcctagttcccctccgcatccctctccacgttcccttcctcgttcaagtactggtttggatcctcgttcccctcttcttcgttccagtactggctgcttccctccgcgattttatcgtacagtatatgttactcatcgcgatcagccatctgttcatacaagaaatagttgctaagtctataggtcatttttgctttaataatcttatatgctaacaatcatatatgctaagtcaaatatgctaagtctaactatcgtatattagagccctacacaatcttatatgctaagtcttattacaaatctaataatcttatattaaaactcaaataatattgtattaaaactctaatagtcaactatgctaagtctaagtgtcgtatattaggaccctagacaataattatatactaagtcttattacacaaatctaataatcttatattaaaactctaataatcttatattaaaactcaaataatattgtattaaaactctaatagtcaactatgctaagtctaagtgtcatatattaggaccctagacaataattatatactaagtctaattacaaatctaataatcttatattaaaactcaaataatcttgtattagaactatgctaactcaaacaatcttatatgcgtcttattacaaatctaataatcttatactatgctaagtctaagtgttgtatattaggaccctaggtaatcatatatgctaagtcgtctaagtgtcgtacattacaaacctagataatcatatatgctaagtctaagtgtcgtatattaaatctaatagtcttacttgcattaaaaatctaacaatcatatatttacatcacttgcctgcgcgaattccttcgagggctagctaccactccggcttgagggacgacgacgacaacgtcttttctgcaacataagatgtattaggataaacgcaaagtaacatatattgtatttcacgttcgcattctcgttaagttcacgtttcgttcacgatcgttcacgttcgcgttctcgataagttcacgtttcgttcacctacgttcattcgttcacgtgcgttcacgttaacgtacgttaagttcatgttcgcgttcttgttaacttcacttttcgttcacgcacgttcgttcgtttacgtacgttcacatacaacgttaagttcacgttcacgttaggttcacgttcgttcacgttcacgttctcgttcacgtacgtttcgttcgttcatgttcgttcacgttcgtttgttcattcacattcacgtacgtttcgttcgttcacgatcattcttcgttcgttcacgtggcggcagcggagcggcggcatggcggcgcggctgcggcttggcgcggcggcggtgcggcggtggtgtgccgcggcggcgtcggggcgtcccggcgtcgtgccgccgcggcggcgtggcgcggcccgacgtcgtggcgcggcttcgtcggcactgccagcgcgacgtcgtggctagtggcggccgcatcgaggtcagagtcggcatcgtcggcgcggcggagtcgtgttcggccgcgacgacgtcggcggcggcgtcggcaacgaggcggccggcggcggtttggggagagagagagatcgaggtcggagagagagagagagggaggcggcggcggctctcaccccagagatgcggcggcggcggaggcagcgatgacgacgcgcgcgaagcaacggcgagatacgacggcggcgtcggtgcggggatgccctagggagtggcggcgaaggagaagccgagagagatcaatcggggaaaaaacttctaagtgttggtggagaagacgagggtgcgcatctggaatatatatacacccctagatctttagtcccggttgttctcaactaccgggagtaaagatatctttactctcggttgttctcatcaacggggactaaagatattttcccgctatttccaaattctttttaaacccggttagggttaagaaacgggactactgataagcgcaatgaatattaatttccattacatatgtgtttctaaaatagaaaataatgcattaaaattatttaaagtcgaaaaattaatgacaattacttcgaaacattattgttgtctatagtaaattaagtggataaaacgtaataagcaaatatatgatttaaaattaataaaaattctaataaccatatatacttagcatatgaatgatattaaattgttaaaaattgtaattaacatatgtatatacatacgacatgcatgatttaaaattaataaaaattctaataatcatatataattagcatatgaatgatattaaattaattgttaaaaactctaattaacatatgtaaatgccacatgcatgatttaaaacttttaaaaattctaattatcgcatataactagcatatgcatgatttaaaattgttaaaaactctaagtatcatatgtaaatgccacatgcatgatttaaaacttttaaaaattctaattatcgcatataactagcatatgcatgatttaaaattgttaaaaactctaagtaacatatgtaaatgccacatgcatgatttaaaacttttaaaaattctaattatcgcatataactagcaattacatgatttaaaattgttaaaacctctaataatcgtacgtaattaacatatgccatacaacaattgatttatacggataatcaatacatccaaaatagtttacatcgtgtacacaataattacggcaatacatcggcggtgacggttgaccgcacgtactttctcctcactattgttccctccttgtgatcgatatgtgagtaaggggtgtcttcatttggtaggaggatgctagggtcaatcgtcaccgtgaaagggggttgcccatccaactgatcataatcctcgtcggtcttgtcctcaactccgacgatttttcttttgcctgggagaaccacgtgacgctttggctcgtcaggccctctgcccttctttcctttgctagacatatccttcacgtaaaagacttgcgttacatcattggcaaggacaaaaggttcgtccgagtatccaaccttgttaaggtcaaccgttgtcatcccactgtcatcaatcattacgcctccaccagtcaacctaacccattggcaccggaacagagggaccttgagaggaccatagtcaagttcccatatgtccttgatggcaccgtaatacgtgccagttgttccatcgtgtcccatggcatcgatacgaacaacgctattttggttcgtgctctttatgtcttgggttctcgtgtagaatgtgtacccattgatctcatatccctggaatgtcgcgatcaacccagatggtcccctagtcaggaaggccagttattggttgatcgtctcgttacctatgagatgttgtcgtagccacgcggggaaagtatcaatgtgatgccgtgtaatccatgcatcggacttaccgatgtttctagcgcgaactagagccaagtgctcctcgatgtaaggagctaccaatgaagattgttgcagaaccgtgaaatgggttttacggaataaattgttgtctaccgtcattattgctttccttccgagagttccctttccgtatagtctcccttcatggcgtgattcaggtaccccgattgggcgaaggtcttcaataaattctacgcaaaattcgatgacctcctctgttccataccccttggcgatgcttgcctctggacgagcacggttacaaacgtacttcttcagaacgcccatgtacctctcgaaaggaaacatgttgtgtaggtacacaggcccgagaatactgatctctttgacaaggtgacaaagcagatgcgtcattatattgaaaaatgaaggtggaaatatcaactcaaaaccaacaagacattgcaccacatcattctgaagggcttctaatctatccagatcgatgaccttctgcgaaattgcgttcatgaaagcacatagctttgttattgttgcccggacattgtctggaaggataccccttattacaactggtagcagttgtgtcatcaacacgtgacagtcatgagactttaggtcgttaccatcagcatccctttcctcctcgcccgtttgatttccttcaaatcctgcgtactgaccaaagtccggaatattgtcgtcttctacttcatcttcttccatttcaaccccttgctctccgtgggatgtccaacagttatagcttggcatgaaccccgactcaaacaagtggaaatgaatagtcctggatgcagaatactccttctaattcttacacttattgcatggacaacaaataaaaccattatgcctgttagcttcggccactctcaaaaaataatgcacgccgtcaataaactctttggaccgccggtcagcgtacatccattgccgatccatctacatgagatgaaaaaaaatcatacacaaataattattcttacaataatgacagtcatacaataattataaaataattacaaactctttcaacagtcatacaataatgacatatcattattcatacaaaaattataaaatattacaccaaataattcttatttactatttctaaagttttaaactaatattaatgtgttgtacttcttttaattttcattttagttttttttctattatttcatattaactttcactatattttccttctcaactattttataaaaccttatttagcaaataaactaaatttctatatattctttcttccccacacaaattttctctctcatcaacttacaactaaattttggagacaaaatagtgtgcaaaacatagctccaaatgtaatatgacaaaaaaacattggaggatgaagttgctaaccttttagacacctccgatttgtacataatcaccaaaataaatttactagaaattttggcatgacctcccctcttttttgaagaaattttgaagcttgctcaggtagctggaggaggaagaagacatatatatatataggggtgggactttagtcccggttggtgttatgaaccggggctaaagatccccataatctttagtcccggttggtgttaccaaccgggactaaagatcccgggggggcctgacaggccctgacagcatttgaactgatctttagtccggactaaaaatcaaatatgcccgttaccctttttaacagggactaaagatcatctttagccccggtttttattgcaaccgggactattgtggaattcggccgaccgacgaaagatggtttcttcaccagtgcatgtagatgaagagaccatcgaaatcacgcctttgttcttttaccatttctcttctgcaaacctcccaccatcctatcatgtcaattggcacattttcctctttggcgttggagaggttgttaacttgctataacactgttggagatgatacatggtgtggtacatgtaatcgttgttagccatacaagctcgagcttacgtatagagatcataatttttatttggcattgccttgttgaccgtccaacataagcataacacttgcctatagctccatcgtttacttatttgcttatcaactgttgcaaaattttgaattttagaatctagttttaattaaagttgattttaagtttttttttcaatcgtagtttcttttccaatattaactttttaaatagctaaggaattagggaaattttataattcttgagaaaatacctagaggtatcaaattttacactaaaattttggtacctcagggtacctagtacctggatgtatcaaattttacactacaaaatattgcacctcccgtgccttctcaagaatgataaaattaccccaaaggaattatattatgtaaattcttctaatctaatcctctaacaggggctgaatctgactaacagaatctcaaaagtgaaaacctctgattcttgaagctagcccatgtaacctttagcatgttgctcaaggcatgcgtgcgtgtatgtaatggatgaccagaaagaaagtaagggatggcataaagttgtacttgattgctacccacttgaatgtagtagtatcttgcattcttgcttgtagatccaatgatagaagttgcacacttgcactttgacccagatgtgctctgccaatgcagcccatggttttaacttgctctcacactacctgagccagcaatgtttactaaggctgtccttagctccacgctaaaattagaagtttgactaaaattgaaagtttgaagaaaaaaagttaaagtttatgtgtgtagaaaagttttgatgtgatgaaaaagttgaaagtttgaagaaaaagctgggaactaaaccggacctaagcaagaagccaaagcctcaccaaatacccgaaggctacattcctatagtcataagagcaaatacaatagcagactattagctagttataaacatattttaaagagataaaatatgagagagaagtgtagcgggctacagatctgtagccaactgtagcacggactctaagacgtaatgtgtgtatgacaggtgggaccatgtattaatagtatagtaaacaattactgtatgaattggctattaaattgtcaatagatgatttggagctagtagttagctatactattaaatttgctctaagttgcagaaggagagcatgatgcggcaaaacaccgcaaaaacccattgcactttttaagatcatgctaagaatttaatgttaggttcaccataagcttgtcctagtggcatttgttttattgttgttatctccatgagaggatgaaaaacactcaccatcttctaaacactcactatcttcaatgtcaagaatatatatcattatcagatagagctccattcagctggttcctctaggtccttttgcgataagtctgtcattaactcattatcatcttcaccatagttagtcagtcctattatagtttccagaatatttgtcattaccggagatctatttgtattccatctcgatcgtatatttgacctaactagttctctattgatactgtggatgcatattgtatactcccttcattttaaattaatctacatatagtttttttaggttattcctaaatgatctatatttttgtgttaatttattaagtctattcattatttgtgcattggagtaaatggatattgatgcatgtatccatgcacacaagtatttataacccacatgcaatatcttaatttgctatgatgcatgcatccatgcacacaagtatttataacccacatgcaatatcttaatttgctattggctagcaaatagtggagatgatgcatgcattgagtttgttgctagagtaaatatagtatgagagaattattagcttttttttagtcttagtgtacctataaaatatgtaaatcaacttggaatggagggagtatttcacaatatccaatgaatcttcaagtaaaaaaaaatatatttgagtctatagctagtatgcatataagaagatcaaccatgtggagtcacatgtggggcagcgtttgggcctgagccccacacatggcaacaaatttcattgaaaaacactcaattttacatagtctttgaaaataaaattatatatacttcagcccaacgcttgataagatgctgcctcagtgcctccggcctccaataagagctatcatctatatttgaaatgtggcttactattaactatctatttttacgataacaatctatatacaccaatatttttaaatgatgggtttaagaaccgataagcagctcattaccaatgacgtattggctgtcaatgatagccaacaccatacgattaccgtattttgaactaaaaattagattaagcttgtttgtttgctacaatagtaaatatgggcaagattttggaaatgccaatattttgacaacatattacatatatgtctcatagaaaaaaaatggtagaaattaaaccaaacattaccatccaatattttgattcaaaattaaacaaaccagccctctactctttgcaggtaaccagccctctactctatttcttttcttcatccaattttttttttttgattggggcgtgccttccacatggttcatcaccgaaaattacggtgaaaacagttagtaacggagcttgagcatagaccacgtggcatggtcgactgctcagcatataatatagacatactatagtggtatatatatacctccctcatatatatattaagctttcttatgtgatgattagtctaagagaaaaaaaaatggtcgctttcgagtggattgaatgcgtatgctatcctcgcccaaccgttccggtcgtcgcgattgtcacagctggtcgagtgacaacaaatcctgataatgcaatgcaggacgcagtcagtgagtcagtgacgctttggcttgtagcctcgttagtcttttgcttacatggtttggtctctgcactcaacggaagaaaatgtgtcctgcttctaccttatcagattcacagtactaatacatcacattatctattatgacagtattattacagacaccaacgtataaaacaatatatagaaagatataacctatgtaccagtaattgtaatagtattaatattattgtagagtatcctcacccggttgctacctgctagttggttgtataaggggcacgcagatggtccatgtgtacttgtatggaccgaccttaatttgccgatactacaaaataaacttattaactgcttgatcaattaaacgtacgacaaaaaactgaagttactgttcttaaaagaaaaactgaagttagttgaggaatccagctgcgagggctactacagacaagtagaaactgccatctgaagagtgagaacaacaactaaacgaggaggaagcaagcatgcacagcgaccgtattcattcgagaagtcggcgtttaacgcagcattcaacaaagttcgatatgcatgcacggcccgttttaatgcatgcaagaataggtctgacctggacgttggtagttgaccctcttgaaagattttgatcctagaccggggaccgtccgttaattagaggcggctacaagctactgacttattaactatactatggccgagtttagttccaatttttctatcacattaaaattttcttacacacataaattttcaacttttccgtcacataattccaatttcaaccaaactttcaattttagcgtgaactaaacaaacaaacccaggcatgaaccaaacttccaatatagtactgtacaaggacatgaattgaaacaaaagagattatattttagatttcatttcaaatttcagagttcctccatcgattgtctgtttaacagcaagaactttaaggccccctttgattcaaaggaaattcatataaattttagagaattttattcctataggaatttttcctatatagccctttgaatcaaaggaatttatcttatggaatcctatgaaattcctatggaatgtcaaatgccatgcaagttttggaggaattctaacatgaggtagaacctcatggaaactttcctttgaatccttatctctcctctaattcctgcgtttttactgcggtctaatcaaatggttattcctgtgtttttgcaattctctgttttacatttacattcctatcaaaatcctacgtttttcctatttctacattttcccattcctgcgtttcaacggggccctaagttttaagtttgaaattttgtcgaacggaatttcgtaacaggccggttactactggatttcacccgagggtaatagttctggtctctgcctccaatcagggttgacaataaacaccggttactacgttaatcgggtttattgtcagggtacggtaacggtaaccatgcagtgatcccaccaatccaaacagattttaaaaataatttaaattttcatacattttgtctgactttttacagttaggtacagtaaaccctgctcccaacagcagatgagttgccgccccaccactccacagtagccctgatggtacaacgcagctgcattttctcgcggcgcacatggccatgccgttacggcccagcaatcatgcatgcgcatccacggcatccctcgtctccgtgccggaaaaaagacgcactacgctcgcggtcgcggccgccggcctcgcgcgcatatgctgccaatctagcggtggttcgccacgccagcgagggagtcccatgtcccgacccccacgccgtcgccgtacgcgcacggtcgaggattgttttctctcttcaagttcaggtaggaggcggctcccgtgtgtgtcgtttcgttgctctcgccgagtgctgtacagtctgtgaacggagagagagagagagagagagctccatggattcatcagtcgggaggagggcaaaggtacggggggctgtgtcgtgtactggagtactatgtattttacagatcacggctcaatattttacaggtcaccagataacatcagacgcatattctatgccttgcggtcggctgtacatcttaaattactactactatccttataatataccctctccattccatttttattagatgctccataatataagtcatacatgccagcatacaattaactatgacatcttctccattaaattattattatttttaaatcctccactctcatgctatctaattctattggatgcatacattagtatttattaggatgatccaaactacaaaatgataataattatttcttggtctttaggttaatggtggttgtgccttatattttggaatggagggagtactagtaaagaatcgaattggacatatcccatataatttatagtactaagatacgttcaatttgattctaatttactattttttgaatggtctattcaaatttgtagtacaagcatctaatcagatgttagatagttatattttaatacgaaaggagtacgcaactactaatagtatagaaaacgatcaaatttagcacttatctcaaagtgaagctggttgctgattgttttctttctgtaccaggctaccagcacacaggcaataagcccgtatgatagtactacgcttctattgagatatccatgaatttatgtgccctcgctgttgcaagctgttcgtacacagcagagagagacgagaccttgataaaccacaggcgaatttggcttgcttgttgagtttaatggccaggccgcttaattaagacttcattttgatcggtcaaatctctacaggcttaagtactacacattcgtatcgacagcgaaggatgaagcagatcgaatcgacgtcaccgtcacatcctggcatgcactagaactgaaagccacacacagggatatctcccaagagcgagtcatatgaccaaactggatggcgtccatagactgaaaacgcctcagatttttgctactatctggtttgtttcgtcagaaaggtcatattctggtgcaaatgtgcaggctgatggagaaaacttgaaaacttctctctgaacacggggccaatcatttagcaagggtacaggataccgggggggccatggatacaatagctatcctaaaccaggccagctagccaagacaatgacctgagatcgtgcaaagttgcaaggagatggatgaagtctctctagccacacacggttcacgaactatcttgcagcagaacaacagccgttgctatcatgattcagctagaggtttattcatttttggttcatgtgttgctgctctgattgatagaaaccaacggtacacgtagggcagcctccattataataagtgtcgttgttcatgacaactagtagcaagtaaaatggtcggccagatcgtactcgatgctcccacacaaatacctgacaatttagactgatcatgctttgacccacggtagtttctaaactatgtgattacactgtggagtagtatcaaagtagcattgttagatttctaaccaaaagtatacttcactcttgcattgcatactactcaaaaaataacggttaaaatcacactcgtcaaacgtctcgacacaccgtcatgagttacgtttaaaaacagtagtactggctttaacattgatcacattaaagttgtatgctaccaacatggccaacacactgccaggcactattcatgattgatagacagctgagtaaggtgccatagcgcagtagtgctatcctgagtcctgaccataaccaaatttgcaacattatgtgtagctgtatgtaacccagatgctgggagcagcacttccagaggtaggagtaagactgaatgtgacacatcttaatactataaatctagacataatcatccagtactagatagcaatattttggaacggatgaaatatacggttacagaaaaggtgagtattcatagtttgatgcatgctaaccaggtgaaattcaggatttgccagacctaaagttggcatttcaagctttgcttacctcatgtctcacttacacgcgcgggtcctgatcccacaagtcatggacatgtgagttgttgagttgagtatattcatcacaattgagaatatcttgattcaacaggaaaagaaaggaaaccacatggagcaaagagaataatgaaatatttgcaaaataagtcacactagataaattggaacaggggaattcggactccaaaccagaaggaaaaaagacatggttgatgatccatcattctcctataacctttccaagccaagcaagcataccaccctagcatcctgtacacatctaaaattcaacgtcaccttagcagttaccaacaatccaaaccctctgtccccaccccctggatggctggatcctcctctcagttgatgttagttataccaactaaccatccgtcactcgcaaaccacatttgtattcacattaccaaaccaaagccatcaaccgttatttacagatgatcatctctacccctccttacacagctactccattctccaagaacagagcacacgaggttaaataagagcgaagcatactgcgaccacatgattacagcattacctggccaagctcgaagctgccacgggttcaaccctgcagccaccacctccttgccgttgctcgcggagatacccaagcaaagtttcagcctgcaaatcacacagctaaacataagtgtctccaaaatttggaagcagatttcagattcagtaaatctagatagctaactagtgaagcacacattcgggggtgctctttccaatccgactgtacaactaggcagataaagcacgacaggctagactatggtggcaaaatgataattgtcatataaataattaatatacttattgtttactccctccgtcccataatataagggattttg

SEQ ID NO: 24228 - DNA, 15052 bp, Oryza sativa
ttgagtttttgcttgcaacatttgaccactcatcttattcaaaaatttttgaaattattatttattttatttgtgacttactttattatctacagtactttaagcacaacttttcgttttttatatttgcaaaaaaaaaattgaataagacgagtggtcaaacgttgcaagcaaaaactcaaaatcccttatattgtgggacggaggtagtaagaactaagcaatgtttcttaaatcgaaggaccaagctaacagcaaaggtactgcagttttgacttgcagaagagtgaacgtgcatcctcttgtacctcgaaggtttagcaaatccaagactgtacctaagatatgtataattaataaagtgcatatctgcactatgtgaaaagaatctacaagtcaacaactagtgtactgcaaatctgcattgcgtgttagctagcatgatggttttcttaatagaaaccagggctgaattaaacagctttgataataatcaggtagtagaaatctacctaaactcaggtacgtgcacagtgaaccttttcctccgtctaggtttaatgtacttttcagtacttattataatggtaatcagacttcaatcaaactctaacaggtgaattcgttggatactgttcggtacaattatccaaaagcttcagtcacaccaaaagctcaaacccaaaatctacacttgaaaatcgacatactagaaatcttgcaaatcatacccaaatatccaatcccgatatgacattagcaaacaagaggaatgtaaagttgaaaaggttttaccttgtgcttggcacgggcagagccggactgcgagagcgcgacaagcggtgggatggcgccctcacggacaagaagcgcgcggttgcgggggcactcggagcagagctgcagcagcgccaccacggcgaactccctctccctcgccgggccgtcctcgatggtctcgacaagcgccggtatcccgccagcctccaccacggcgtcgcggccctcgacgatgcccgcgaggctggcgaggaccaccattgccttctccgacgtcccgctgccacgctcgccgacgaggtggatgagcggcacgacggcgccggcgctgaccgcgcgctccttgttccggcgcgccgagcagagccggtagagcgtggtgagcgcgtccttcttgccgcgggtggagcccgcggagagcagcgcgacgaggggagggatggcgccgcacgcgccgatggtggcgcggttctcctcgatgcccgagaggctgagcagcgcgcacgcggcgttctgcttggccgacgcggtgcccgtccgcagcgcgtacacgagcggcttgatggcccccgccgccgtgatggccgaccggttccgctcctcgagcgagaggttgagcagcgccgtcaccgcgctctcctgcgccaccgggtcggtgctccgcagcagcggcaccagcgccgggatggcgccggacacgccgatcagctcgcggatgtccgacctgtgcttcgccagcagccttatcctcgccgccgcggtgcgccgcgcgtctggcgcggcgtcgggccccagcgcccgcacgcacgccagcacgaacggctccacgcgctccagcggcgccgcctcgacggacagatccatcgactcaagctcattcagatccacggcgcccacctgcggcgcgtcggatctgggcgtcaccaccgccgccgccgccgccgcgagccgctcgagctcgccggagatatccgagttgaagctcgagtagtcactgaagtcccgcgagagctcgagcatctccgtggccgccgcgttggccgacgacgacttggccaccgccgcggggtgcgcgggccccgcggtggccgccagctcgctgagatggaaatcaatcacggagtccgtcaagttctccatgtccgagtccgcccccgccgcgtcgtacgcggccgccacatgcggcgagcccgggcaggagtccggctgcagcagcgccgaccggatggtccgcatggagtaccccgcgccgcggcgctgcgaccgcgccgccgcgcacggactctgccccggcgacgggatctgggagccggctagcgacaccatggcaggcaagggctaggagacaccgccagttgccgcaaagcgcgagagcgagcgagcgagtgatgatgaggagaggagggttgtgttgtggtgggtggttggttggttgcccgatgcagtgcagtgtagtactcccacgctgcgctacgctacaacccggcgcggcgtatatacacacgtacacgacgcggcagcggcagcatggctcgcgtggcgtcgcaacgaaacggaacgcgacgagaggcgtgcttgcgtgcgtggtggtggtggtgcggtgtgtatctttgtagtcgcttttgcgctcgcgtctcgtcccggggttgacgatacaggtgtcgaggaggctgggatgggttacccgattggtaccaaacctaggcgcaccagttcagcgccaacgtgcgatgacagttggggccaagcgtttctcgtgcagagctgtcagtggatgtgtgtgtgggagatggatgggggagagttgagccgcggaaaggtcagggagccatggcatgggcggccggccaccaacaccatgcaccgggtggttttacttttggtggctgtggaagcaaggaatcccctttctttccgtttgtttgttcctccccgtgccaggtagcagcagcagcagctctcgcgccactccgtgacggaccacggcctctcgcgttgctaccgccactgctgtagtagtacggagtaatgggcatgggtgttgccgccttggcgcggtgcgaggtggagacgtggaggcagcgggagcgtttcggtggggtttttttttcaccgttgggcaggtggcagcgacgtacatttggcagcgcggcgaggagtggggacgggacggtgttcacggtgaggaggtgggcgctttgcacgcgcgcgcgcgcgtggtcaaaaagtcggtggttgatcatggcgcagcgcatcggaggcgtttctttgattctttcaggtgcgcgtgcggtgaaaaaccgagggagtgggagtggggggaggaatttttttgagaattaatattatttttatggaaaatcgcaaaagtagtggtcaaccggggaaaatcgcgaaaataggtctctgtcgaacgggtgcagttcgatagggcacctatcgaacggccatagcgcgactggcgaggagatcggaaggctgccgttcgacaggactcgaacagcccccgttcgacaggcagggctgtcgaacagcccccgttcgataggctgggctgtcgaactgccgcagttcgacagggtcgcgttctccatttatttgtaataagttattttttttaataatatgtaatttattttagtgtgtaagaaaggaaaatatttttgtaatgttatatgtatgtgatttagggttttgataatgtttggtcagaaattgtagtatttatttgttggttaaaatatttgaattatttagtttcattatttgtatatttgaatgataatttgtcatgattcattcgaagggtatgctactgagtaattatccgaagaagtttatgaaatagtactgatagtactaagttaatcgtaaagtgtttctcaaatagtacggacagaacagaaataactaaaagcttaatacaaatagataagtcaaggacgatcagtgcccttcgcacgcttgctaggtcctcccttcttcctacgcctaatctgctcagtgggatatgtcaaattatcaggggggtgcctatctctagctgtctgctgtggtgtcacgtctggcccctgaccggcctccgtctcctgcgtcggctgtgtgacctgaggtgctgcgtgccagtaatccatccctacttcctcctggggaggatcagtggaaaagaagtcctcaatgaatgctgtgcgaggggagtaagcaggcactccgtgatgcgtcgacgccgaaccgtactcatcgtctgtttgtacaagagggagaaaccaaaaaatatggcgtagttagtaacgatacatataattagaaactaaagcgtgttattgtttaaaatgacttacatgtgtgctgtgtgtggccctgctctggcgcacgcggagtgatatgaagtccccatgctggtgtgttcaacacgttgtcccccgttggcatgtaagggaagtgtgccgacccagatgctccctgcgaggggtgaacataaggcggagtttggaatacctgcatgacttgactcccccgatcgatcaacacatgttgtcttctgcaccactattgccaggctatagcctttctcccttactttactaacaaacttcctccaactcccagttgacgcaacctccactactctccactgccatccatgttgacccctcactggccacacggcatttatgacaaatttatcgtgcactggatctaccccaaacatattatacaaccaccctaacacgtcgttcaaacccatatgctccggtgcattcagactagtatcatggaaggcatatacagtcaaatccaccccgctatcacatatttgtataggagcatcgccataatacagacgaatgggcatatcacctgacatcctgataaaacatgacaaatagtctcacgtttaatcatttaatcattcgataattaccctattacaacttatactacattgccgtgtactaatttacaactattagtaacaaacaactagtttaataatccaaataaaatataacacctttgtacatattttaacacacaacatatcaataatatgtactaactaagaactaatttaaccgtacaattacttaaatacctctaccaacatttagcaataacaaatatgtgctaaccatacatactaacatcgaacaatgcgaaacaattaacaactcttaaaccaattttttattaaactttcatatgcattgtacttagggattactaatgtataccttaacttcactgctggagggcatcgccaaccctttcctcccggccgacgcctcctcggcctcgtctccggcctgctatcccctcccctcgctccctccggcgctcacggcgacgatgtggcgactctcgacggcggctggcgatgtggtcctcaaacaaatcgaacaagcatcgcgggctggggagacggggttttaaaccggcctgtcgaatgcccattgttcgacagggtcggtggagggacctgtcgaacgcccccggttcgacaggcctggcggcgcggggtggtgggccctgtcgaactccctccgttcgacaggcgagcgtgtcgaacgccagccgttcgacagggctctgtcaactgcccgtcgttcgataggtgccctatcgaattgcacccgttcgacagggacctactttcgcgattttccccggttggccactacttttgcgattttccataaaagtaatattaattctcaaaaaaattcagtgggggagtgcgtccacgaacgatggcgacggcgagtgcgggagggggtgacaggtgaatgcttttgttgttaaccacacaatacaggacggtgatttcttttcaatctctttttttttttggctgcgcacacaaatcacgttatgatgttagtctagaccagaaatattgctaggatataagctaagcgtgcatatgagcaatggacatatcagcaaaccatttaggatattggttgattaccgtgtaaaactaggcttcattggcttcccggttcagcactaatctaatacggagtatggtattgcgtgatggggaacaacattacaggttgttaatatatgtacattgtacttacgaaaccttgctgtgcacaacactacaatagcaaaataagcccctctcgttaagcgaacattttggcccctttctaatactaaaacgctttacttctaaacaagattattcttttaaggaaggaacgagacgtcacgcagatttgggttgaactaactactccaattcctcaagcatatgttgagcaaaagctgcaatactgacctcctaggataccctgatacggctgggagcgtatccgtatcggatacgtaaaggaatacggatacgtattcggatacgctccgatacgcccgtacgtatcctctatttttctgattttcagaaaaatgaaataattagggatacttctctgatacgcatggatacaaggtacgatctaatcctaacttctcacgggataccaatcctcgccgcgtccatcttttcctacccaacggcgtcgtcgttctggagcgaggcaaaggtagagccaccactttgcaatgcgggcctactactgctgccgcacgccgccgaggcgccgcatcgtcgccatgccccgtggagccgccgccgccgccgcatgccgcacccccctagcttagcgcacgcagcacacacctctgctcgcggttagggattgcttcattcaagtgaggtaagtatcgtgtattgacggttcagggcatcctggatctcgatttgttggggccggggaaggagaacatcagtttgtgatattggacaccgtaaagtaagactacaaagccataagtgactttttgaagatccagtactactgcatgaggtctggtcaaagctatacaattctaagctttaatgtatctatgtattgctctattagttatctttcaattattggcaatcaattctcccattttctttgaggagtgcattgtttctttttaatttattatgtatatatagacgtatccacgtatccatgtttttcgaaaatagccgtatcccggtatccccgtatcgcgtatccgtatccgtatccgtatcctcatatcggggtaacatagctgacctctctcgctctaagaaggaataagttcaccggatatctctcaacttaacagcgagattttttgaggttccttacctgtaaaaccagaaatgtttacccctaaacttattcaaatcgttcaaaggaggtcccatggcagtatcgactcaatttttgcccggttttactgacgtggcatcctagttaacaaaaaaataaaaataaataaatatgtgggacccacacgtaagtgaaaaaaatatggggtcgacaatcctaatcagcaatctcctttttctccctttttctcttctgtttcgttttttgggggagcggcagcgggtatactgcctcgggaccttttttaaaggggcaattttgtttctaaccctatttgatgtctaatattgattttacccctactttttaggattttcatttttaccctcacttttttgaactgaatgcttgttttgcccctactttggatggtgaagttaatagtgttaagtaattgacaaaatggcatttataccctctcatgtatgttcattaataatgtttttgtccccattttatacatgtagctttagaacttatttttgggagtatatttaaaattagatgacccgcattgactaatataacaatttggacaaattctgaatttgatggaattttgacaaaatttcagcattttgatagaacttaaacaacattttaacaacattttctaaaatgtaattatctgttcctttagatactagtcaatgtgcttcatttaattttaaatatactcacaaaaataaagttataaagctacatgcataaaatggggacaaaaacataattaatgaacatacatgagagggtataaatgtcattttgtcaattacttaacaccgttaacttcacctctaaagtaggggcaaaacaagcgttcagttcaaaaaagtaaaacgaaaaaagtaggggtaaaatcaatattagacatcaaaataggggcagaaacgaaattgtcccttttttaaatggttttacatagtttagggatacacatttctagttctatggttaagggacctcaaagaatgttggtgttaagttgaggtatctccgttgaacttattccctctaagaaaaaccgaacccatttccagacggaatgagctcatctcaggtcccttaacttgtcaacgaatccaattttcgtccttcaactaaaaaaaccatacaacgggtccctcaactgtcaaaaccagtgcagatgaggtccctcggcggttttgagagcggttttggctgacgtggcgtatacgtggcaaatttgacttggtcttcatatgatgtggcattgacgtggcaattatgtggcaaatcaatcccaaaaacaaaaaaaaacttcgtgggacccacatgtctgtctcacacacaaattaacaaaaaaaggtggggcccacgtgggccccacaagtccctcttctcacttcctctctcccctgtttctccctctccctgctagctatggagcgacggctgactccgggcgtgcgcgcctggtctctccacctccggaatatgaacgacgcggcggagctgtccgtggggaccgcgtcggcaacggacacggcgtcgtggtgcttcgcaatggcactgatcaggcttgtgttgtgcacgctccacgctgaggccgtggtccgtggaggtccgcggccggcggctaggcggcgcggcggtgaagccgtgcgaggaggtgtacgtcgtcggggaagacgagatgttgcacaccatcagcctcactcctcccgtcatccctctcccttctctctcttcttccctctcctccctctctctcttcttcgcggggagcgccggaacggacgggctggtgggcagtggagcagcagccggcgacctcggcgaggcggcgccctcgtcgccgccttccctctccggcgatggccttcacgcggcacctggaccagtagccagtaacgacaacgacgacatggttggctcgtgcaactgcctgtggctcaagcgacatccccttgtctgcggcagcatcatcgtgatcaacccggtcaccggcgagtccctccatatcccgtcgccgccgttggcgaccagccgcagccgccacgcgggtatgatcagcttcggctaccattcgacgactggcaagtacaagatcgtccatttcccttccaatggcgggctggtggatgaagtcacgctggggggcaccgcatcgtcgtcgtcccctcccgccatggcggcggcaacggtgatggggtggtgaatatcctcacgctgggagacgacaccaccgccgccggcggcgcgcggtgggggcgtcgccgtggagcctgtgcgtcgcctggggcgttgtcagcgtcaacggcgccacgtactgggtgaccgagggcaagtagatcatgtcgttcgacctcgagcatgagcgcatcgaggccgtcgcattgctgccgacgatgagcaagtgctgcttgccggtgtccatggagaaggaggacgcctgctgccagctgaccacccccgccacaccggcccccgctgcggcacccaccaccccgcgcctaccaccaccacacccgccgccgcgcctaccaccccggctccggccaccgcggcacctcctctcccccggttgaggcttccgtcgccggcgctgttgtccaccgtcttggtccagctgccgcgtgaaggccatcgccgaagagggaaggcggcagcaagggcgccgcctcgctgaggtcgccggctgctgctccgccgcccactcgcccgtccgctccggcgctcccgggaagaagagagagagtgagggcctgtttggcacagctccagctccagcttcaccccttctggagctggagctcagccaaacagtttcggctctaccaaaactgggagtggagctgggtggagctctctcacaaaatgaactagagttgtggagctgggtttaggcagctccacaactccactccagactcaactcctggagttaaatttaggagttggagctgtaccaaacaggccctgagagggaaagggaagaagagagagaagggagagggatgtggggcccacttgggccccaacatttctaattttctttttgtgtaactaacatgtgggcccacgatttttattattttttctgtgatagaattgccacgaaagcgccacatcaatgccacgcgtaacgaagaccgagtcaaattaaccacgtggacgccacgtcagccaaaactgctctctaaaccgccgagggaccttatctttaccagttttgatagatgagggacctactgtatctggttttctggctgaatgacgaaaatcggattcgttgacgagttaagggacctcagatgaacttattcctttccagacttcagatccagatccaagttccaacccaacagctggcctattttcccaaggccgtcaaagctcgtaagcccaaaaggccacaagtctacgaaactaggccttttaccccgatctgacattccatcccatttggcccatgttgtcccagcccacagctccacacgtatgcaggcatgaaccaaacatttctccgggtacgcctcggtctcccgctgacaaattgcactattgcagggcatatctcctcacttgttcatctccagctctcctggcacactccaagcacaaccttctttcccgttctgcatccttccatcctcgccacctgcgatgatgggctcgggccgttccttgatggcgcctcgcctccccgcctcctcctattcctcgctgctggcgccgacgtcgtggtcgacgccggccgcgcgttctccgccgggggccgcgtctacgagaggagtgcagcgagctggaggagctgagcgccagcgtgcactggacgcatgtaccaccgaggcgaacggcggccgacgtcgcgttccgcgtgtccgcgctggcgatgatgaccagaacggcaccaacgtttttttctgcacttctggtcaggttgcaggatgccgaattgccgatgcccattgacgatgctcagagcaagtttaataatataacccactactagctaattcatacaatagttgcttattatactattaatacatggtctcacttgtcatacacacattacattttagagttcgtgctgcagctgggctacagatatgtagtctgctgctcttctctctctttctttattattttaaaatatgtttatagctggtttatagccttctattttacctattttacctgctctcagaatggtgaccgtgtagccgacggaccaccagtacaagttccagtcgaagcgaaccttaacggtcgtctttggtggcatcagcagggcagaaacccgagacagagagacagaaacaccacgttttagcacgtaaacgcaataacgaagttgctgaattttgtgctctcagttctcacaggtagcatcactggactgtctcattcaccgagtagctatctcaaaagcatcgatattgtggagtactgaagagttgctagggggaaatgtcaatacgcgcgattcagagcacgactgtttccgaaggtcaggccgacccccccatccggcggctccgattagtggtgaaaacggtacgaaaatttttaagattttcggctgccgtttccaatgaccatttcagtcagtattggttaccgtccgtgttagaaatggcaacggtaatatcttccgaaaataggatgaaggtttttctgaccgttttatcgataaccgtatttgtatggtaattttcgtcaaaattctaaaagttccatagcgactcaaccaatcaaacatatcggaagcctatgaatgaaggaagcctagcaggtttgtagcacattagaaaggggaagtgaccaaaggaaaacgctgttaacgctagggcatggcatgtggacgttgctgaactttggtctactcaacttatcggtgttgagatattgttaaattttgtttatattgttgatcaaacttattattatatcattaattatcatataacggtgttatgtgaagtgtgatgatgcaagaatgaagttataaagtcatcttcgtacataattaaatgtgtattaggccacacttttctgattctgacatgaattttcgacttccgaccaatgtcggttgattccgtttcgacggtcccatttccgatatactgatatcgttactgtttttgaatcttcgaatctactgttccgattctgttttcgagaaaaaaatgaaaatgaaaatagtatatggtttttctgaccgctctcatccctgctccgattatgtaaccacagcattggcattttggcaggcgccatggagatagaaccaagcgatggaaacaccatcgtttacctcgccagtcgccagtatgacgcattgacgccgacggaacagagcgccccaagcccccccaacccacagcattcagaactccatggatgggtttgtccttgagattttcaccttgaccgtttgcttcaagaagagtggaaaaggctccaaccaaggtggctccatggatggcacgtcaccttctacttttcaatgtacgccgtgtttagcttcaaagtttttcttcaaacttccaacttttctatcacatccttctaattttaaccaaacttccaattttaatgtgaactaaacacagccgtattctaacaatcctgattattttttaaagtataatgatctgcatctgttattatgtgtatgtgcaatttcagtccagtttctcgtatgtttggtctattgtgatcaaacggatatggcttcctatgtagacaaggaacagtacctcaaagcaatcgaggcttgtttggatcaatgccaatacctatcctcacaaaaaacttacgcaggggcaatgtttggaagttaccaaaattttgataattgtctggactaagatccatacaaatcattggttgaaatagactggtagctgcgcttggcacaagagcaagtcttatggaaaaggtagatttcacccctaattttattcatgtagactattcatcaattaaaagatagcatatacaataaatcacacatatattaattgtagtgcactaaccctaatagttttattttatttgtttgatcaatcttctcttccttttttttcccttttttattataatttatgtgaaggttaccccttataggaggggtgactatttctctcttctcttctctccagctcatcatacgagtgtatgtggcatcttggagtaaatgtttagatgcccatagcacttgctctaggcccattcatagcgcctcctactcataagaggagccccggaaagccatgtaggctagggctacgggtctaaattttgagttctttacgatgcaagtggctctaggagtggctataattctatatttcagctccccaacatcttttgttttagttctcattttttttcaatttgtatggaggtccaaaatttacactaaacaccctaaaatctaaaaaaaattatattaaaacccctctctcccttatcctcacccccctccccggcatgcccacctccttcggttaccacgagcccatggcgccctcctctcctctcctcatgtcgcggcggtagtcaaggagattgggggcacgatggcggtcgaggaggctgaggcggcgacgaagccaccaagcggacgatgacaacaagctcaggggtgcgtgacccctcccgaccgacgatgaggagatggagcccctcagaaggcgacgacctcaacaacgacggcatgggagcttggccaccaccgtcatcacctcccctcttaggcatcaaggaggagcgggatccgacctagatagtgccacctggatctagcccagcgctaggtggcagcgtggcatgtgaggcagcgcagctcggtggacagtgtgtccggtgagcttcagccagcaacgcggattgaagtggagaggacggtggggaagaagaagaagagaaaggggtcgacgtggacaagctcaaactctctcctcgccgacggtgtcaagctcgaagtgaggccataggcagggcgatgccttccatagtggttgtagcttcgccctccgaacgacctcgctctgactcttctgacaaggttcatgcgttcttagcaagaacgatgagccttgcaggggcatcgtggagccacatcaaggatggggcgtggtaaggaaattgccacatccttacattgtgaatggcttaatcatatggagaggaaagtcacttgttttccgcactcacgttttccgaactactaaacggtatgtttttttataaaaaaaaactatataaaaggtgcttaaaataatattaattaaaatttcaaatttaaaataattaatactcaattaatcgtgtgctaatggtttagcgtgttttatgtattttcttaatcttatacaatcattctctctccaacacttcctatttagtccttttgggatatgctaacagaatctgtgttttttttcaagtacaattcctcttgtattcgtactaagggagcattcgttttggaagaattttaacacataggaatagggaaggtggaggaataggaatgtatgcacacttcgatccatagaaattttcttagaggtttgagtagatggaaaatttccacgaaaaattttcgttggttttcctatacatacatttctataaacctaatgacactaataggaatccaaatactttgattttcctcaaaaaacgaataggccctaaaacaagtaattcaaaacgtgggtaaaagaattatcaacagttcaaaatatacgaaaaatagttaggtggagcgccttgcacgtataggtagcagaaagtcataatgtaacctaaaagttatggtgacgtttccgtgatgaagaagccaggaagcagatttatagaagcagaaatcatgaactaatttttagagcaagtacatatatgccatgtccttaaggattaactacctaaaaagggtactccgtccacatgaggcccaaagctactttccaaaagacaacgaacagaaaggcacgaaccacatgccatgctatgaaaggctacattaaactaaaccaacaggcaacagcagaacagctatatat

SEQ ID NO: 24229 - DNA, 30125 bp, Oryza sativa
ctaccgaaagctaaggggaagaggaggaacgaggagggagaacgggtaggaggcactaccgtgcggggtgaaggagcgcagtgatgatggccgatggcacggggcgtgatcgctccggcctcgggccggggaagaggaaggagagggtgtgcccggagtccacgtcacgcgtcctcgctcgtgccggctccttcgtcacgcacgacgacgaacggcgacggcgaacagggcagggcgcggcaatggcgaggccgaaaatggggaagattggtttggggaggggctcgggtttatagggcggcaacgtcggttcggaaaccgaccttgggcggcactagggggcgagggagcttcgaggggaagggataggcttcacgggcgcggtcaaacggcgcggaggacgggctggcgcggcgcggctgctcctctgccctggcgctagctccgagcggagggagagcagaggccgggccgagagaggaaagtgggaaacggagggggagaaagaaggctcgcgctatgccggtttggggaggaagagggatgggagtgggaggcactgcctcgcggggcagggcgcggcgctggcggcgcagcgcggcgcggggccggacggcgcaggcacgggcagcaggcggctgacgacggcggcgaccgcacgggcgcgcgcgcgcgaggtaacggcgcgcggggagcttgccggggatggagcggggagagagaacgggataacgagacagagagagggagagctcagctcgtcgtcggctcatgcgcatgcgcacgcgcacgcggcgcacgggcagagcgaggggagagctgagggggagagagagagagagagatgggccgagaggaaatcggcccaccgaacctgagggaggcacaatagacttttgcggaggaatttgatttgggaaggatttggattcgggatttgaatttgacgatagatcgaggattcgagatcagggattggcatggagacagacaacaagcaaagaaacagatttcgcaattagggtttttagaatttaaattttcccgctaggtgccacgacggaacgggcgctacataatccattatatatgttggcttttgttgtcgaaatgacaactacatacgtcgaaggacgtggttactcaacagtggttggaaggaaacgaagtgtattgaattttgaatttctttcttcgaatccccctattacatggccctaggggactatttatagccccactacaggttcttgctactagggtttaggttgtacaggggaatttacatgattacccttacgaaagggacatttacaggggtacataatgttataggagctcatgggtccctgatgggctgtctggcgatcgccggccctatagcccttaggcttgatgggtcggaaaagcttcctcggcccttgcgggggcgaacttgccatagcgaagttgtcttccttcggcagatagtcttcgccttgcacccttcgcccgagacgcccctggcctggcaaggcactcgtgcgactcttcgcctcatgccgttcttgctccatagccttcgccacgggtttcggcagatttggtcgaagggcctcatgccatccgccaacaagcccctcacgggcaaggggtgagattggagcttcggccgagaccgtgcaaaccatgtggtatggtatgtggcgccccctttcgaccgatgctcctgctgaaacctacattattcctgcgaatgaagtttgttacttgtgcggctattattattttgccgcgcttcgcctcctgcgagtggtggttatatattttcttttcccgggccgaacggaacagtgttgggccttcccttcgtgggctttttactgtgccgctcagacggtgggaatttactgtttcgcctacccttgcgacacgtggcgctttattattggtgggtaggcgaacggtcgcccgggtaacactacaccatgccccaagtttgcttactacatatctgtcaggaaaggacctatatgctgtcaaattatttgtcagcataacttttcccgacagatagggtctgtcaggccaagtgctgccggcaaaggtcttttccgacagataaatgtttgctgacatataactcgacagtcctacaaatgaattaccgacagacggaagttaccgacagatggtcctttaccgacagttaacggattactgacagatacgcagtttgcatatatcagtttttctaacatatattctgttagtgtgccctgcattgggttaaaaaaaatatagttcatggaatcaaatcctactgatctagaactgaatataccaccaacagttctcatgcatccacattccactagtactgaatataccaattccatttaattacaaatgccatgtacataggttagttgtacaaaaagagaaattctcctatacaatctacaaaatgagacaaaacgatggcaaatctacaacaggcaaggcatttcccttgtagagaaatgccactccaaaatatcttgtgaccgccatgataagttgagcatctaaaaacttgaatcagattatcagaaagacaaaagtattaagggtcagatatatagattataataatactccatttaatgataagtaatctatgcaacacctactatttcaatacagaattgaagatcagtgtcaaatgtgcaggataagtgtcaataacataactgatgtagttccatttaattcaatctgtagcatagcttcgatattctcacaatccaccaatattaaattaccagttccattttatgagaaatttatgttgaagcagtataattgcaatcgtaacagattcaattacaatttacaagcagcaaggattgcaatttatctcacaaactatgggaacaaactgattttagcttacatgatgtatgagcctttaagttagtgttgatcttctgttccttcaggtacccttctctgacacttcagcaagaagttgattgctcacccacaggtcgcaaatcatagctagtaaataaataaaaagaagataagtgctgaagtacagtttaattggctcccacttgcaaatgttaacttatattagaattgagatgtatgtaggtgacattttcataattaatgtagatggaaaatctgaagcccgaagactgtttcaaatttgtactacgacaactcactgcaaggacagctagccacctaatttgcagagatcaactaagggagttttatttaaaataattatactaggatggtacattctacaagtaaaaactcagtaaacacacaatgtacatgcatattcctaataaatggattgatataagttggaaatggcttcactagtaaatagaacttggcttgagtagttgctgtactatgtggtgcatgcaaagttctcaattagcatttcaattattccaactggtcctgatagctgatgcatgtctgtgtgaaatcaataatagatcaaatcttaaaaaaaaatgttcaccactctttctagtacatatataataatgtctgccatgaaatgaaaaggaaatggagcaaacataatctccaattttattgaatagtgcatcatatagaagattagcacttaattgttaataccattgaagttcttgtaatggaaaagtaagcggaaatctaaaaatatgaacaattatccgtttttcaatttgatacattagatcagacagaaaaatgtccataatgtggtacactacatgagaaatagtgcattttcttagtactaccacatttctgtaaacattacagctaacttcatgagaaatataaagcagaactggagcattagctaagattcatggggaaaagagacaagtaggttcaccctaaactcttttgcaccagtattaagcatggttgcaatgcaagtttccatcccatggctatgaatgacagccccagctctcatcaaataagcctgcaaaataccaatgaaaattagacagtttagaacacactagccgaatgttcgctctttctcttttggcaaccatgattggacaatcaataaatgagaattctataaaagctcctaatcaacaccactcccgaatacggtatgctcgatcctaacagaagacacgagagtagccactgctcgattaaccactcgtgagggggaatcgagtgcccctcgcaggcaattcgtcgaacaggagccgtgcaggctgtaatgagagagagagggggggggaccttgggtgcccagaggcggtcgtcggcggcgacccagcgccaggtgctgcgtgcgtccaggagctccatcacccgccccatcacctcctccccgagcacatccacggggtcctctcgtctctgccgcctcctcctcctcctccccctcttccgcctctcccactcctccgcctcccgcttccgccgccgccgccgcccgcgccttggttgccgatgacgtcgcctgcaccttgctcgccgccgccgccgccgcccgcgccttggccgccgatgccgtcgccttgccgccgccggaggaagcgtgagtgcgtgacggctgggtagggaagaaaaggataaggttgtggggaaattagggtttggtttatatatgataggctagatgggctttttgggcttgcaatatggtattattaatagtctaatatacaccctctaagttttgctgacatataattagctcgtactcttacaattactgacagatattttgaccaaaaatatatttagaattactgacatataacatgtctcattatgcactattgctgacatatagtttgccaaaaacctttaccgacagatattgtttatttttgccaacagatgtctgttggtaattccatgtcatggtgtagtataagctatatattccacccctctttccttttcaccggtacactcgccatttttaccgcttgcgccctcttcctccgtttctttattccacagcgtctctcgacccctcaggtgtttcgcccattcgctctcttcgccaccgcatacacgccattcgccatggctcctcgcaagccaaaccctgcttcggcgaaagggccagatcccggccgagtcgatgacgacagcaccgcctttttgggggtctctcttgtggacgacgtcgagctggcgaagttggtcagctctgggcggtggtcgaggggcaggctttcgccccggggaaagccgtggtgccgaagtctgtcgacaatcggacggtggtgttcgccgtgttttttgaggcggggctgcggtttccgtgcaacgtgttgttgccggagatccttcgcctcttccaggtggagcttccgcagttgagcccgtcggcgctagttcggatctccatctttgactgggcgtgctgcacttccgggtttcagcccagcgccgagctctttggcgccatattcttcgccaccgtgaactcgaagacggtgattaccccagctgggacgaggatgaccgtgttcgggagtgtgaatttcaacgttcgccccgagcggtccgatctctggccggtgaacgctgccatgtcgaagtgggaccgccattggatggcgaggtggttctatcacaccatccccttcgaggctggttctgaatcagcgaaaaccctccggtgccggcgtagggcgattgcgccgaaccggaaacccaagatcgctgtggacggcgctatggaggcgcggttcattctgctgcgcaaggtttgctcccgccttagctgccgtgacttggtggaggagttctgtatgcttcgcatctttcccctctcccagtcatggaaagtcacagtcgagcaatgcgaagaggctaacggtttgccgaacttggttcttcctgaggggatgaacagtaaggccgttcttttgctatacactcctgtgctttgttattttaccctgtttggcttttaatcgtgattccccctacttgcttttatagtgctaaccctcgaccaaactgaagccgaagcccgcaagatgatcggcgatgtgtctgttgtcgagttcagccaattgctgacacggcaggcagctggtctggcgaaccgggtttataatggcgaactgcctccccgggcgaatccccacaagactgatgacgaaacaggaccctcgcggaaacggatacgcggtcagataaagcttgcccccaggaagcgaagggttcctgcttcgtcggactccgacgccgacgacgaggatgatgccgaagaacttgacggcgaggaggaaggagaggaagaagaggaggtggaggctgtggctgataaggccgcgaacgaggcgatcgatgatcgcgtcgacacccctggctacactcctaccccaagtccaggtcacaacgagactggagtggagtcgaacagctccccccttcgacgaaaggatttggaaggggcgaaggccctagttgcgttctcgtcgggcaaggcggcgaaaggaggtctggtcaagaagatctcaaaaaagaaggggctcgtcgacattgctcgcattttcagcgacgacgattcttctgacgagactccgacttcacctgctggtcgcagtttggacctttcgaccgctccccttgctccgctcggcgtcgctggggcaggcggtagcgccgccaccggggcttccacctccgccgaacggatcgtgtcggctgcggcgagggtttttgggagccctgtgcgcgagccagctatttcgccgctggtcaaggcgaaggggaagtgtgcggccgccgaagcatctgcctcggagtattcccttgcggcgccccacttcgcccctggtgacttcgagacctgggcggaccttattccctttgtggagggagtaagcaatcttgtcttgcctgccggcaccccgagcctgttcaccgaacttaacgagttcgacgaggggtgttccaccattaaaagtttggcggttcgggtatgccctttcttccctcttcgttttcctcttccctcttatttttacgtctcgcaattaacctttcgttcttttcgcccgctcctatctttcatttagatttttgcggctcactgttcgacggagcgaaccgtgcgggcccgttttgatggttttaagaaccgtcttcgggccaaggatgatgaaataagccgcaagaacttggaggtggagtccttggcccacaccctcaaggaggcgaaaactgaggtcaaacgccttcagtccgaattggacaaggggaaagaggcctgggccgaggttgatcgcctcaaggccgaactggagaaggagaaggcccattcggcggtactcatcgattactacaaccttactgagctgaagatggaggctcttcgccagaaggctagcagggccgaggcgagcgccgcggaggagtcgcagcagttttcgcgggagatggcgaagaccaccgaatccgtgagaacggcttgccaaacgctccgcctcgcccttaccgacatgggtgcgaaggtgcggggggtccctgccgagggtgcctcagccttcgacttctccgagtggacccagcaggctggcggatcggtttcggactgtgccaccgcgtacggcgattgctgtgtgtgcgtatcggcggcctttaccttaggccttttgcaacagttcggctgcgagcacgtcgccgagttccctacctatgcgaagggggactgggagattagcgcgcaggacatttcgccagctcttcgcgcgtggagaaaacagttctggcagaaggatggccagtccgctgccaaagcgcgccttctggagcaactggcgaaggcagaggcggcggacctttgtgaagaggaaggcgcggcggccggagggggtggaggcgatgcccaggaccacccagaggtgtgaggccctccgctcttctcttagattttcatagtttttttttggtgctcgctagatgtggcgaaccgttgtatattcggcaagctgccgctaaaccttagaagaggcctttttgcatacttggactgtatggcaattttaaccactttttaatgatcaaagcctttggcatattattatttcgctcatttcgcattatgccataccttccccttctgttgcctattcttactatgtaagtcgtgttttgccttttctgcactgtctaccagggggttcgccgaaaatcatgcattcggcccccttctgggagctggcgaagtcaaaacgagaaatttgtggcattgaagggtctgccgaaggtgcgatgtccatttcggcctgtttatcgcaaaatggagataaacggtcgcagctataaagttttcaaggttgccaactggctgcgggcgcaccccgggcaaaccttagaagattacgatcatgttcattcaagacgtttggaggatatggctcgcttttggtgaaaccatcagaagactaaacgccaggaatcgatctttcagcgtcgttacagtttagtctgtgtttcaccccctactcctcttaaggttgtgtatgatattagtagtgatgacgaacctagtttgtctgaccattcattagggagggataatgaatacgggggcgaagatgtaatttacttgtgaagtgaattgtatcgggttgtgaaccttgtgttcttcgattttttttttcgaagttaataaagaatgtgctttatttccttttcgctatttttcgcatcgtcacattttgtgcttttgttaggtcggaacatgccggcccctttgcgcatattagcgaaataggtgtactgacttttctgcttttcgtcgttcgttttcgacctgtagcattctgtgtcgaaagagacacttttgcttttatgttgatcgaatcgtaacgttgttcggctagttattttccgagacaagctgttgcggtttcaacgttcggcgagcgatgcttcgaccgattcgtttctcccccctggccttttttgctgatcaggcgtttgccttggggtttttccacaaattatcaatcacacgaaaaaataaaaaagagggcgaaggacacatacattttatactggttcgggcctttcttaggcccaggtgaacggcttcatattctcctgcattgttggttgtgtcgaactgcagtcttgctgcgtatcgaatcggcacacctttcggcgaaaataggactgccgcaatgcctgctcccttgtgcgaccacgagccatcggagcacatcacccagaattgttcggcgagctcggggtcggggacaagtaccggtgtccattcagctacgaagtcggctagcacttgagacttgatagcagagcgtgcaacaaaatgtaagtcgaacggggatagctctgccgcccacttgctgagccggccagtgacttccttgcctcggagtattttgcctaaggggtactgtgatggcactatgactttgtgggcctggaagtagtgcttaagcttgcgcgaagccatcaccagggcgtaagcgagcttttccatttcaatgtaccttgtcttcgctccttgcagcgcttcggagacgaagtagaccggtttttgtccgaactctgtttcttggacgagggcagcactgacggccaccggcgaagctgctaagtataatagcagttcgcttcctgggggtgggcttatcagagctggtgggctttgcaagtattgctttagctcgttgaatgctgcttggcactctggtgtccaattaaactttcctgtgccccggagggttttgaagaagggcaaacctctttcggctgcctttgagaggaatcgattgagtgccgcaattcggcctacaagcttttgtacttcatgtacgcttgacggaggcttcatttgctgaatggcatcgattttctcgggattcgcctcgatgcctctttcggaaacaaggaaacccaacaacttgcccgcgcggacgccgaaaatgcacttctccggattcagccttatgcctgctgtacgcaagctgtcgaatgtcttttgcaggtcgatcgcatggtcgaaagccttgcggctttttacgacgatgtcgtcgacgtaagcttccacattcctccccaactgcttgccaaggaccttgtacaccagcctggcgaaagttgctcctgcgttccttaagccgaaaggcatcctgaggtgacaaaatgtgccgaatggagtgatgaagaatgttttggggatgtcgagcgggttcatgtggatctggtggtaaccggaatatgcatccaggaaactaatgagctcgcatccagctgttgaatccatgagctggtcgattcgcggcaaggggaagtcgtctttcggacatgctttattcaggtttgtgaaatcgacacacatgcgccatttgtcgtttgacttccacactagcactggattcgccaaccactcggatggtcaatctcttagataacccccgccctgagcaatttttgtacttcggctttcgccgcttcttggcgatcggcagacatcttgcacaacttttgttttcttggcttaatgtccggtttgactgctaggtgatgcatgatgagatccgccgggacaccccccacctcgtcagggctccaggcgaagatattgatgttctttttgagcacctctaggatactctcaacttcttcttcgcccatgtcgccccccagtgaaacgagctttgtggggtcggcgtcatcaatctgcacttttgttatcttgccatgagggatgggctttggcgtgtgcttcggccgttcatgcggttcggtctcaacactgtgcactgctttgctgattatggctagatcgccttttgaagcggccgaaggatgaagccccttgactactatcacccctgttgggccgggcatcttgagcttgagataattgtggtgggaaatggcttcgaacttgttcagggttgcacggccgaagatggcgtcgtagttgtacgggatgtcgacgacgtcgaacagtatttgctcttcgcgtctgttctcccccgagccaaaggctatcagcaaaagtgtttggccgagaacttgaactgcctctccgccgaaaccacggagcgatgctggtgctagggtaagggcttgggtaggcaaccccatcttggcatatgcttcggcgaagatgacatcggccgaactccctccgtcgaccaggattcgtcggacttcgaaaccagctatctcggctgagattaccaggggatcttgatgcgggaacataactccttctgcgtcttccagcctaaaagaaattagctggttccgatactgcggcgccccttaacccgccgaagtgatgctatggaccatacggatctgcatcttcttctgccgtttggacaactggcttggcggatcagcccttgtaatcacttggattatccttcgctgaacatcttggcgttgttcggctgggggtgtttgctcctgaattgcttcgcgggatgcttcgacagttgttccctgctgcagccttgggtcttgcgcgttgccacgttgcctaatgtttcggcattgctccgtggtgtgcgaagagcgtccgtgaaaggcgcaatagaggtcttttcggaccttcttgtgggctggctgctgatggttgctcgcttgctgggcatcgaactccttgcggagggcttgcacttcttcgaccgccatcatagctttgcccgcacggtctgttctgaactttctccaagttatgggggcctggccttgccttgacggttgtccttggatcgccggctgagactggcgaacagagaggggaggtggttcggcaatttgaacttgtgcttgagcttaagcggcgacgacggaggctttgtcgtactcagcttgtatagcttgtcgtcgcttggaattctcctcgcccctcgcgaacccgtcaatgatgcgaagtaggtgctcgagcgtttgtggctccttgttggcgatttttcttgtgagttcgccctcaagcagaccggccgatgcggcgtttataaccgacgcctcggttatgtcttgaacttggcaccgggcttgcgagaagcgacgcatgtattcccttatcgactcccccggcctttggcaaatgccgaggaggtgttgctgcgtcttcggctcctcataggtgcctcgaaagttaaggacaaaaacatcgcgcaatttctcccatgagtaaatgctattggctggtaaattgaaataccaagaacagacgatgccgtctagagcgagatgtattaccttcgcttttgtattttcgtcaccatgagccgcttcgatcgctgactcgtagatgaagaggaactccttcgggtcagtttcgcctgaatagcgcgggaagggtgggaacttgaactgcggtgggattggacgagtcatgattcccccactcagcggtagccccttttcgcctcccgccctgtttactgcactttgctgcgggtacggtgtggcgaagggcaaaatcgcagcttgtgcgcgaggttgcgccatggcattcaactgcctggctccaattggaggtacttgctgagccgccatggatgggtcaaaaattggctgcgacagcgtcgtggcagcttggattggtgcttggtttgttccgaagcctggagttggagcttgctgccgaacggttggtgcctgagcagcgttgacgaagtcgaactgcagtccttgattccatggcgaaactcccaggcccggctgaatcggtggcaaccaattaggcacaccttgacttgtattcccctccgggtgggccgatgggggtgtacttgaaatgcagtggggttggttgagttgctgaaggaaagcttggagttgcgcctgcaaggccgaaaccccttccgccactgtttgtggtgcttggccgggtggttgatggtgtacttgggcagcgactggttgagcttgcagttgcacgtgaggggccgaatgcactgctgcggccgattgctgcccgacgaagtacaccggcgcctgcgcggcttgtggcggaacgggctgggtcgtcgcttgcggatggacttgagatgggacataacctgccgaatactgaaggattggagccgacatggccttggcccgcctcgccgcctcgtatgcttgttgttgctcttgcatttggcgaagcatgtcttggagccgtgtcatgttctgccgcatggcttccatgtcggcttcggcttgtgctttggggtcagggctgacttgggcctgcacaacgacgggcgcagttggggccgctgccggctgcgatggagcggcttggggcaccaccagttggcttgtcgaaaggatctccctggtctggagtgcccttgccgccgcagccgccttcgccacgtcggccgcgttcggcacttgctcggaggttgcgggggccgaaggcggttgtgatggcgcttgtcctcctccatcttcggccacgggcgccaaaggctgtgctccttcctcggtggccatgtccagtccagcgtcgcttaccttccgtctggcaaccttctccttcacgaccctcttcggtggcattcgctctcagtggtttcgctcgaaggtccccacggtcggcgccagctgttgtcgaaatgacaactgcatacgtcgaaggacgtggttactcaacagtggttggaaggaaacgaagtgtattgaattttgaatttctgtcttcgaatccccctattacatggccctaggggactatttatagccccactacaagttcttgctactagggtttaggttgtacaggggaatttacatgattacccttatgaaagggacatttacaggggtacataatgttatagggactcatgggcccctgatgggccgtctggcgatcgccggccctatagcccttaggcttgatgggctggaaaagcttcctcggcccttgcgggggcgaacttgccatggcaaagtcgtcttccttcggcagatagtcttcgccttgcacccttcgcccgagacacccctggcctggcaaggcactcgtgcgactcttcgcctcacgccgttcttgctccatagccttcgccacgggtttcggcagatttggtcgaagggcctcatgccatccgccaacagctttaagatgggctaatagtaggaagtgagctctactattatccttgctctaaacttacttccctctttttcatgcgcacactttttaaattattattccctcagtcctaaaatatactccctcatttccaaaacctgagtcttatttctttttcaccaagaccaagaaacaattaattcattcactatgtgacaaaaccaatgaacatgtaaccaataagcattaaaatggcttcttggttcctatcaacaatttaatttagcacataatgactacaaataggacttagacttttgaaaaaaaaaagaatgaaataggtcttaaacttttggaaggagggagtagcaaccatttactagatgggacacgtcctagtacatagtacaatgaatctgaacatactgtccagattcattgtactcggatgtgtcctatccagtacaaagttgctatattttaggacgaagggagtatattcgtaaaggaagtagtttaggacaatgtttaagtcaaaccttgggaatataaatcaactctcaagtttgaaaatgtaaaaattatataaatatatttgtcttgaaaactactttcataaaagtatacatatatcacttttcaataaatatttttatagaaataaaatgtcaaagttgtgttttagagaccgtgtcgctgtccaaaacgacttcctttatgagtacggagggagtatgtcctttacaaaagttttctatagcaaaaaataatattgatatattttacaaaagaaaaactaatagtcctcaattaattacgtgttaatggatcgttgttaatggatcgttccattttccatacgggaaggtggaactggaacatagccttaagttgttctttacagttgtgccaatcatcctattcagtcgttctatgttctctctgtttcttagaggttactccagatggctttattttctacggtagatagagatgaagttgcaaaacaagaaagccatggggcgtgattaattgagttttagttattataaaattagaaaatcgatttatctcatattttaaaaacaacttatatatataattcaccgttttagctgtttcagaaatgtagatgaattggaggcagtatatactattaaactcgctcttaaactaataaagtgtgtttttttaaaaaaaaaagtttctacacaaaattttctataagagtcatatcaagccatttttaaatttttttaagctaatacttaattaatcatacattaatccgtcgctctctttagcatgtgaaagccaagagcaggtacaatagaaagctataaacaggccctaagagcaagtttaatagtatagctaactactagctccaattcatctatagccaatttaatagcttattcatacaatagttacatactacactattaatacctgatcccacctgtcagacacatactgtgtcttagagtccatgctacaactggctacaaatctgtagcccgctgccattctctttccttatttatcttcttaaaatatgtttatagctagtttatagcacgctattttaacttctcgaagtgtagctccatgaggcagatgcatgggtgtttcgctgcgaatccgtaggaaaggcgtcgatggaccggcgcgttcgtactcgtgaacagtgtctcgtcgctggttcggctttacgtgtactcctattaagtactactcgggtcgctgtgttgtgcccgaaagcgtgctaagcagcgggcagacgtgtcgagctatggttggaagacttggaagactgaatttgttcgtgactttcgtaggcatagtaggattggatcagtgagtgaccgcaaacgagtattacatgtgcgtggagattgattttcgtctttcaaggtctttcgcgttttatagtggagtatataatctaaattagatatcaaaatatgtttaaaagtttagtaagatagattaatatataatataccatttcacaagtatgtaagttcatatccgatctatacaattataaaaaaacaataaatttgactgtagattacgtattctatttgatattaattttatttttgtttatgtatagtataagcttaatttgaatttttcaggtttgtgaagtgatataggagtgtcacattgatatattttatatttttttataactttttaggtgacacgtaaaaatgaggatcatctcctcgagtgacgaatagactttccctttttatccctttgcatgattctcattgttttgtatagagttatatatagggtggtttactcttatacttcttagtcgtaggggcgtatctaggggtagtccctgtgggcttgggactacacctgattttggcccacaaacacctatctcttcccccgccaatagccgctcgtgcccaactctttcccgtcgttgcctcccagctccttccctcgccgcccacgctaactgcaccgccctgccgtgcggttgtgcccagctactcccccagcgccgcacgtggagaagagaggaggggagaggagagaggaagagaggtggagaggggaggggaagaagagactgacgtgcggggcccacgtgggccccacactaagtcaactgccacgtcggataaaaccggagacaaaaccgctgagggacctagttcgtactggttttctaagtcgggggatgcgttatatcggtttttttttattcaaggacgattttgtaactcgataacaagttgagggaccttcggtgtactttttccttaaaaaaaccaggcccaaacaatgaaacccaacagcccaagaggcaacttgggttgagtgcaggtggagccaccagggcgccagcgctactcccttcgaggcttcgggcttcgcttgtacaccacgccgccgccgacacccccgacaccgctttgttgtccgcgcaacgccgttgccaagtcttgtgggtctgccattcgtgactccgcgccgcaccgcaccgctcgcattcgtgggacgcctttccttgcgtcgcctcgcagcgagccagcgatggcggctggctattcgttctccagtctgtgcccctccggtactcctcctcttagaataatgtgggtcccatttacatttgtttttattttagtgccacgcaagcgccacttcgatgccatatggaagtaaacccgtcacgtaagtgtcacgtaggacaaaaccacctccgaaaccgacgagggaggtgatttactctggttttcagagaagaaggaggcgttatacccggttttccggttgagggatgttattcacacaagagcaagagatgagggaggtaaaatggacttattcctttgaaatttcagttctcttttcagcatcgagagtgggggagtctatccaaagtccaaacataataggaataagttcatctgaggtcccttaacttgtcaacaaatccgattttcgtctttcaaccgaaaaaccagatacaacgcgtccctcgactatcaaaaccggtgcagatgaggtccctcggcggttttgacggcggttttggctgacgtggcgcctacgtggctggtttgactcggtcttcatttcatgtggcattgacgtggcgcttacgtggcaattcgatccgaaaaaataataaaccccatgggccccacatgtcagcttcagccaaattaataaaaaatggtggggcccacgtgggtcccacacgtcattcccactcttcttcttcctcctcctctctccccatcttccctattctctctccaggcacgacgggaaagtcatcggcccgaggggaattggcaccaccaccaccaggcgacggtgatcccggaggagagcacctaccacacaccgccgcacatccctcctccatcggcagcagctggggatactgtcagccaccggcggcgcacgcggcgagtgcaggggcacggtgggtcagcgtccggcgaggtgcactgacgcgtgctcgccgggagagggtacatcagctactagtctttgcgccgagacagcgtcccgtgctctcgtcgtgacgccagctactacaactgccgccccggcgcctccgccaacccctaccactgcggctgctcccgcatctcccactgcccgcggctgatctcctcctccgccgccgccgaatccaccggggaagatggcattgtcatcgtcgtcgccggtgtagtaaactagtaatcgagctgttgttcttgtgttcttgcagtgccactcctacctctactaattagctactactgttaatattcctttgtttgatttgttgctgctaatccggccaccaagcgctctctctatctctctctctctgcttcattagctccccgtggcagcgatggcggctcagaggaggctgctcgccgaggcgcctccgtaccagccgcactcctcgcggcaccagcagggcgcactagggcaccatctgccgccggcttcatggggtggttgatggtgggcatgaagccggtgatgacatagcgggtctcgtcggagcagcggacaatggcgacctcctcgttgcggaagggggagacgcgcgggtttggtagccgccggagcggaaggagtcgtaggattcgatgccccggtggagctcatcgtaggggtgcggcacgcggaggagggctacattggcgtgcgtgctgatgactcggggatcgacagtgaaccggtaggcctcgccgccggcgggagatgaagaggggggagatggagagaggagaggtgtgagaatgacatggggacccatgtgggccccactatttttttattaacttgtatgttaaactgacaggtgggtcccatagggtttattattatttttggatagaattaccacgtaagcgccacgtcaataccacgtcaaatgaagaccgagtcaaaccggccacgtaggtgccacatcagccaaaaccaccgtcaaaaccatcgagggacctcatctgcaccacttttgatagttaagggatgcattgtatctggtttttcggttgaaggacaaaaatcgaattcgttgacaagttaagggacctcagatgaacttattccaacataataatcatcgttaagaggaaagccctggttcggcccggcacggcccagccctacaatccctcccaactcccgtgattctcacaggatcggttgctccgtcgtgggcgccgccgtcggcgccgagaaggacgcggcgtggacccagagcagcgacgccacggagacgaagaccaccgaccagagcacggcgatggtcggcggcgcccggtctcgcggcgccaggagcccccggaggaatccctgaaggtgcgccaccacccacccggcgagcgccagcttcgcgccgagcgcgccccacgactggtagtacccgtggtccaccccgtacgccaccgccgccaccaccccggcgaggttcgccaccaccacgctcgtcggcgccaccaacaggttcgtccaccgcatcgtaatctccgatgccaatgctgcctcctcttccccgtcatcgtttcctgccgccggtcgcttgggtggcgaagctgccgtctccgtggagaaggcgacgtcgatcccggtgcacgcgctgaggatgccctggaacacggcggcgaggctcgccgatgtggcggtgaccatccagagcttctcgtctcgccaccacgcccgcagtggcacgcggctccacctcagctcgagcgcgaccgacgcggccacggagaagagcagcaggatgaggaggacgccgtcgtagtagctcacgtcgctggggaacgtggacaagccggtgaagaggcagacggccgggagcgcgcagtaaacggtgaacggaagggaggcgagcgggtaggaggcgcgggccacgtagcccagccgctgcaggagcccgaggcggcggccagcccagacggggctgtgccgccggctcagcaggatccccatggccgccaccgctcgccgcgacgcccccgcgaggacgtccgcggggctggcgcgcgcgtaccgcctgaacgccggcctcgccggcgagcagtacgccgacgaccacccgcgcgcgtgcatccggaaccccgtcgcgacaccgccgccgtacatccatccaatctgcacgagaacaacgacatcaacatcatcatgggagcggaaggcgaagtgatcatcggcgaagctgccacctctttgccccatctcgtcctctcctcgaacgcgcagctgacgacatggatggcctccttgaggagagatcgcgctggcgccacggtcgcgtcaggcgagccaccgtcgccgccgcgtcgccgcccttgctcctcgaacgccgaggcgatgaacgcgggagactggccgaagtggcgctccagcgcggcgcggtacgcgcgcagcctcctcctcctccccgccgcctcctcctcctcctgttcgtcggagtcatcctccgagtccagcaacggcacggcggacatggacctcctcatcgcgttcatcctcttccccctcccgaagcagcacatcctcctccagtccgccgccgtatccatgtcgtcgccgtcgtcagccgccgccgcgggctcgaacccgtacagcgccttccggctgaagcagcaaccggaaccgacgtacaccgggccctggatgccatcgaggcatttcatctcgatctgaaccagatcgagcagcaagaatcagcgaggttacgcaattcagcaacatggacatttcgtctcttacatcgaagaagacggagtcgccgccgccgctgtcgcgcagtgcgaactggacgaagcacgtcctgttcccggcgaccgggtccatcataaagcacatcgcctctctcagcgcgctgctgttgttgacgcagtggtcgcagtccaggttgaggacgtaggcgccattggtaagcacggcggataccctgagctgcaccgatcaaaccaaaattcacatcgcaaccagatcaacgccatggacaggcaggcaggcagtgtcgcaacgcaccagcgcgttcatggcgccggctttgccgtggtgccggaaacccggtcgcttctcccgcgacacgtagaagagacgcgggagctcgccgccgtcgacgtcgcggtcgccggggtgacccaggagcacctggagagacgaaccagcttgatcaaaatggtgacaagcgctcgagagaagaggcggggaattttatggagaggtttttttgatcgatcacctgaatcatggcagggtgatcccgcgagttgttccccggccacggcgtgccgtccgacatgatccatccttcctccggcaccttgcgcgccctcgcggcgaggtggttcatcctcaccttgaattcctcgtactccctctgcaacaacggcgacggattcatcgatgcgtgcatgcctacaaggtgttcggcggtatcgcctcaccccaccttcatggcacggcggtccttgacgaaggacggcgcggcccggtcgcggaggtagtcgacgccgcgggcgaagtagagctcgggggccctcggctccacgccgtggcggcggcagaaggggatccaccgcctcgcgaagcccgccgcctcgaagagcgactcgaacaccagcatgtcggcgccgtcgtcgtggacgtagcaggcgacgccgcccgccgggtagtccgccgcgagcaccgacagcacggtgttcgccgtcgccagcgggggctccctcgccgcgtccgccgcggcgacgaacacgtccacgcccgccagccgcgacgcctccccgcccttctcgtacctgcatgggcaggaggagtctctgtctcagtgtcttgcctcacatggccgccggccatggcgatcgagatgaccttgaggccagcctgtcgaggtacgtgacgcggttggccggggagagcttcgggagctgggcgatcagccatgacgcggcgagccagagctcgcacgcgacggacgtcacccacagcgcgtgggcgtcggcgacggggcgggtgacgcggtagcggaagaaggcggcgaggaggacgagccggagcgcgacggcggcgcggtacaggttgagctcgccggacggtacggacagcctgctgctgagaggctcaggtatgtcatggtcatcaccactgcaaaaacacaaaccccaaaaatttcatcaattttttttcgcttccaatcttaatgaccatgttactaatttgattacccattttcagaattggttatgaaccattagcatggatatggtttagcattgtggggattgatgctataactgataacattttcagttgttacctttctgaagatgcaggctcaggatcagggcattctacaggcattatctctgggctctctccatccatctcggagctaacaggtaacacaattcagcaaaacacttgattcagtttttactctatctacaaagtcatctcaatagcgtaagtttggatgctactaagagtctaagaccagacaaaactctcttaaaaatggtatctgtataactgtaccgtggtgtcaaacccaatccaaccctaaatggctaaatcatatatagtggttatgttttaactatccaactagacgtgacaaaatgccgtattaataacttcctgcgatgattgcaaggcagcctcggtgaaagaaacaacttagctagacaagcaaactgcctctgtgcagtatcgccaagtaacagacaacgtggataatacagaggatgaattcgtagtacagacaacgtggataatacagaggatgaattcgttatgtacgtgctgaggaagcgaggaatcaggggaggcagtatctattgattctctcctgtaatttttactgatgtatataaagagtgagctatattgaagcctaatgacaaaaaaaaacacatactacctccgttttttaaatagatgacgccgttgactttttctcacatgtttgatcattcgttttattcaaaaaatttatgcaaatgtataaaatataaatcacacttaaaatattatgagtggtaaagcaactcataacaaaataaattataattacataaatttttttgaataagatgaatggtcaaatatgtgagaaaaagttaacggcgtcatctattaaaaaacggagggagtacaccacagatgcttagacagaatggtattcttatttcttaccggtgtttgtgcagggacaaacctgatcgacttacaagcggaacaatccggtgcttaatcttcgatctcttacaggtaaatacaaatcatatagggaaacatagaaaattaaatccgatgcgatcatgcgagctctgaaagaagttgcatttccatcatgcattacactcacataatcacattcctactgaataccggctactgttcttcaacaatataccgtactgacactgtcatcttcaacagtagacgtttgtgcgcaccatttgacggccggaatggcggaattacatacatttattacacttttgcagggctcggccaatccgccaataggaggtagacatggaaacaattatatgccttccagagttgattcgagaaggcataaataggtaagttcatttgtctcgatctggctagcactaacgagtacttattcaggtgcatagccaagaatggttgtatttaatgtagtaattaattttatctaagaaactacaaatcaatcaaaagggagcagcttccctttgagtcttagttgtgactctgccaaatggagctagccaagctaacaaaattaatcgaactccagattccagactacagattgcggttactagctgtctccgccggcactgctgtctggccctcttctgtttgctgttgtgttcttcagcacctggaaataacacatgaagttaaacatatgtcatctcagcatttactagcacaattatataatcttcagatacccttctataggcagcttttctttttttctgcagtctgattctcgtatcatgtactatttatgtatatatatatatcaggggtgttagttgacaggaagcttaattacaaggttatcaacataattaaaattatgtcaactgtcaattaagtgtgtatatatgaagagctgatcagaattcagaattatgcatatgcacatgtctgcttcgaaatacagttttattacctgcctaagcatctggttctcgttttgcagggtagagagcctctcctccagctctgagttgctcctctccaggtccttcaccctcgcctccagctcactcatgtacgccttcttcctctcccgagcctgctgcgctgacacccggttcctcagcaatctagtggattaattcccaaacgcccgccacaaaattaaggtcttatagaattaatttgcgagtgtgtatgattgagaacaaattatatggtgttctatatgcatgggcagtcaaaaatagatgtattacctctagtcacaaaagtatgccattttagtacttgtgtaggcaacacaagttagctttgatcataattattattttttctaaaattttagcttacagacatatgaagacaataattaaggtagccaactttgtcctagcacaaggattaaatattcaaattatgccttgttgatttagagaagtccaaaatgtctttcttttgcaaccaccaggagtaacattctaagatgtttttttaatcggaaaataaatggtttgattctttgggtagcagtgatttgttattggtacctttatgtagacatagagttaaaataacaagtaatacaaaaatatggtactagtaatacagaagtacatgtgattggatatggttctatattataatattattcaatcaaataaagataaacgtgagttaattaacttgaaaataattatttgcatatcagagtcaataactcaatatagcttgtgtaataatatcaattttgaaatgcattagaataaatatgtagcttggattcaaatgtatatataaaattacacccatcctattttcacacctacagatatatggcacaagttccatgtgtcaaagaatttgcattttgcataaaggtcaacatatatcatgattggaataacatcaccatatgctaaagtactgctaacgaaccttcccccatagacctgaaagtgttgggcccatttgtccaatataggacatagataatcttcacatgtagattcgctcgagtacaaagcatcgaacatcaaacaacttgtcccaaattgttggaatattgttaataagtttgtgtcacatcagaatctttatcatatgttaacatgtcagctgtttaaatggttggtttatactatgccaaatttgaaaggatacaaatggaaacatcccaatttgatttgttggttattacattttctaagaaaatgtctgtatacaaaatagaattttacaaatttggcatgtacagtttacatggcatataatatatgtactccttccggttataaatatacatcgccgtttgaatttttttgtcaaacctttaaaattttgactaccaataaattttaaaatacgtaatgcatcgatttgtcttcaaaagtaatttcataattaatctcttaaacttgctagatttaataaaaatattttaatgaaaaatagtcaatgtcgtgcatcgaagaccgataggaagcttaatgatatatatttgtgacctaagtgatcgagcattagacttctgatgggagattaatcaatattcatagtaatttttttctaaaacagtagaaatactcaagcaactgagcaaaaactagccttctagacccctaattaatcagtatatatacaggagttctctgaataaaaagggacgtggcgtacagtacaaatgtacaatacacatataaggactactccatccgtcccataatataagagattttgactttttgctacattgtttgatcactcgtcttattaaaaaaattgtgcaaatataaaaaataaaagttgtgtttaaagtactttggataataaagtaagacacaaataaaataaataataattctaaaattttttaaataagacaaattatcaaacagtgtaagaaaaagttaaaacccctttatattataggaagaatggagtaattaacatgacgtacgtatatatacagtacacatacgaagtggaggcctacactacacaccttttgaggcgccggtgctccttgtcggcggggctgcgtccgcggcggcgcccgctgctgctgctgccggcgacgccggcctgcgccgcgggcgacgacgacgacgtcccggccgccgtcgccgccgcgtcacctgcaacccgaacactacctctgcccgacgtcgacgtccccggcagcgccagcccgaactccggcaccctccctactatctcctcgtcgtcgctatccacccctgccaacgagatcgatcgctagatcaaaaaaatctgcataattaattaagatcgagacaacaagcgacagccatggcgatcgaattggtgatcatcgatcgatcaagaacacacacaaaaaaaaaaataaatcgagacatgacgatgagagatcgagcgtgtgcgtgccttccttgccgtcgtcggtgtttggggcggagtccgacgacctctcgctgctggaggcggccgccggcggcgagctcctccggtgatctcgttgcattctcttccctcgctgtccagcttatcccactcgctatcagtctatatgcagacactagctagctcgatcgctcgatcgatcgtctgggagctgagatagcaagcaagctagatagcagggaactagtaattgtgggcacgtttctctgtcccctggtgtgtctcactggattcttgttttgtttgattcgagtaagtaaggggggtatagcacagtgcctgtgcgtccggacatggccactctttttgtcgaaaacaggcatatggaacatgggacatttagcagcccaacccctgtcatttccatgtattacatacaagtgctcactacttttaccttttctttttcaagtgacaaagaagacgcacacacgcacatccacgaattcgcgaccttaacactcgctttaagagagaggtcgttgtcacatacaaattttgtatatatatactggttcaaatctactgctctaaattgcttttttttaatcatcaacgttggtaaaagatccaggggtctttcatgcaatgatgtaaacatatgtttttcttgaactggggatttttttttttgtgttaacaagtaatctactctcttgagtacgtatactacggccggtgtggtgcaaggtctgctctggcaaagctgaatatgcaaataataacatgtttttcacttgcgtcttcacagggcatttgtggagatcgatcagaattcatctttcatctattcagtgatagatcgcgagattcttcaaccccctgctaccaattctgagtttgtgttcaaggcattctatctcctttgtttctggcgcggtggcgcctatgaaatcatcgacatgacaatgtattccacggagaaccttcatcaatccaaaagattttgagattatctgtgtggaagatgcaactctttggatagcaagaaagaatataagagagcacgatgtagtttcgcattggaaagaactcttctccaccttcatttgtaatccttaaaagacaataattctgttaattttggtaatggaagttttaaggtgggggaaagtctctcccccgtctaccttttgaaaaaaaacatactacctctgttttttaaataaataacgtaattgacttttgaacatagtatgatcatttatcttattaatgtaactagctgggtggtccgcgcaattgcgcggctagcacccatataaaattatatatttttaatatgattttacttaaaatttattaaatagttatctcattgtcttaaatttttttagacaaaaccttaccatccctgtgtttctaattttatagtttttcaaagacacatcagttgctacccttacttctgtcatattattttttttattatcttgctcgatctactactgtttctattcattctccttggaacctttaaaaattagatctaaaaacttatagttttagagtttattgttctgttgggcttcttttttataataatttctaaaagtcctatcaaacgctgccattatactcctctacaaccatccactgcatcttctctttattgtcattgctattttaaaattcgaacataattatcgtttaggttcgtgtttttactttctagaagttctgctaaaagtcagggactttgtcactatactcctctacggttcgcccgctgccgcccttctttcttgtcattgagattttaaaattaagcatgattaccattgggatttatttttttactttttaaaagcccgaacctttaaaaattaaaccttatagtttttagagttttattgtctcgttgggtttatgctttttataatttttagaaatcccgtcaaacactgccactatactcctctacgacccgtccgctgcataatctttattgtcattgggattgtaaaaatcgaacataactaccattggaattcattttttactttctagaagacccaccaaccatcggcggctctaccattgtacttctatacgacccgctgcctctcttttttattgtaattgagaatttaaaaattaaatatgattattattggggtttattattttactttctagaagtcccccgccaaccgctttgactgattgcttcacgacctgcccgtcgtccttccttttaatcgtcatttggattctatttggtgttttattaatatattttagatgtctcatcaaccgccaccactctatttctctataggcttgttacttaattaatctcgtgatggtcttttctttcaatagtcttatttttattaccaattttagctatttataaattgtattcctaattgaaatattttttttctttttctaatttcagaatttattttatttattattatgttcttttgatatttttattttttattttcaattttagttgtttcaaatttatattcatactttaactctctttttaatttgcctaatttcggattttattttattctttattaagaattttaattaatctactatttggttcttatatgtactcttatttcaatattgcttatatttaattccgaatttaagttaattttaaattatattcctacttgaactcttattttcttttcttttttctaattttgatttttttattctgaattttaattaatctcgtattggattgttgtatggactcttcttttaaccttatttttaactccattttagttatttataaattgtattcctagtcgaactcttcttttttctttttctaattttgaaatttatttttttattattccgaattttaattaatcacgtattgggttcctatatggactcctctttccatattgcatatttttaattccgaatttcagctatttttatattgtatttctaattggactcttcttttctttttcttcgattaatgtgggaatttctaacctccacagcgaacgtggtgtctcctttcaaggctgttttaataatataatagatagatagatagatagatagatagatagatagatagatagattattatttatttttatgtgagttgttttatcactaaaattactttaaacataatttatatcttatatatttatataaaatttgtgaataatatgaatggtcaaaatcaatggtgccatctatttaaaaaaggagggagtatgaaattgtcaaatactcctactttacttattaggatgcattgcgtatagtactccatataacatcaatttgcaagaagtgaatggggtcaagtgaaaaaagggcagccctttttgtaagatccaccctggcgttcccatgccgagagggactccatccaaaccggtcgatcggacggccc

SEQ ID NO: 24230 - DNA, 3636 bp, Oryza sativa
acgttgatcgtgattggattccacgactgcagcctgcagaaacttttctactgcagatgattattactcccttcgtactcgcaaaggaaatcattttggacagcgatacggttttcaaaacacaactttaacttcttatttctataaaaatatttattaaaaagtgatatacttcctccgtccaaaaaaaggcaaaccctgggttttcgtgtccaacgtttgactgtccgtcttatatgaattttttttataattagtattttcattattgttagatgataaaacatgattaatactttatgcgtgacttgtctttttaatttttttcataattttttcaaataagacggacggtcaaacattgaacacggaaacccagggtttatctttttttttggacggagggagtatgtatacttttatgaaagcacttttcaagacaaatctattcatatgatttttatatgatttttacatttttaaactcaatatcttgagagttattcatgatttatattcataaggtttgacttaaacattatcctaaacgacttctcttacaaaaatattgcaatttctatcctaaacaatgaatctggatacaatggatataggttattcattatcctctatgctaggttataacatttcgggatggagatagcatcgtagaaagacgagtcgaatatttctcagtgtgaattttctacgaaaatcatgagaacgatgtttaaaagatgacattaaaattatgcgagattaactattctggccgtgttcatccggttaggatgtagagtctgaatttttagtccatttaaaaaaattaagaaagaattattggcatcgtgataatgataaggtcatgggcaccatctgaatttaaatctcgacatcaatattgcgcgtgagtagatatataggagtacgtgaggctaggatttttattggtctgtctttatttaagtgtgttaatatctgagagatgcatttaaggcgacgatctaagaagtgtttgggctgagctattcaacggtattcaacggtatgtgatacaagataaaccattaacccatgattaattaaatattaactattataaatttaaaatatatatgtatttaacttttaaaagtaatcaatatataaagtttatgcaaaaatacatatatgtagtcatttctataaattttgatatagaaatttgattttggtataggagtaccaaataacagtttggcaagcatacaagtgagaatgtaacacctcaacagcccaaacaaacagcacccttagaccatctccaaccctccatgtcatctagtttccatgatattaaatacattgccacataagtaaaaatcctatgtggcaagggagttaatgaggagagaggaaaaaaaatgaagaaaccatttctcatggaagaaaccatctctacacaagaaccaagaataaaaacaagatgatatgtggataaaaggagagagaagagagataattggataagaatttaatttgaagacaccatctattgaatacatagtttctacacatagtgtctatatgacatggcaagtatgaaaactactttatagtttctgggttgggaatggccttaggtatgtcgtgtacatgtagcgatttgcgcgccttacgtgggatggaaaataaatcctgatgttagactgtcagcaaacatgataatttcggactagctatttatcgacaacttttccctagtcggtacattccattagggactaactatacatattgataaattttctcttaaaattttattagatgtaaatatattacaatcatactatggccatgtttagttcctccaaaaatttttgacgtatacggacacacatttgaaatactaaacgtagactaataaaaaaaaattacagattccgcctgtaaactgcgagacgaatttattaagcctaattaatccgtcattagtaaatgtttactgtatcaccacattgtcaaatcatggcgtaattaggctcaaaagattcgtctcgtaatttacatgcaaactgtgcaattggtttttttcgtccacatttaatgcttgatacatgtgtccaaacatttgatgtgacggaatttttggaagtttgaagggaactaaacacaacctataatacattttaacttgcatgtaaatacaataaaatttatatataacattaatccaaactttcaatctaattatagttgcaaattataaagttactagcaaaatgcccatgcttcgctacgggtaaaggaacggttaaattctatgaagtacatcgttaacatgtatataataatgttccaatataggcaaattgttcattgcgttaatgataatcaagatggataaaaatattcctgtttagctcgcatcgcgaaagaaaaaattaaattaaaacatattaaattctaatttaatgaaatataattttttttgcaatattaattacactctttgaaattatagcaaaagtgctagtgctttgcaacgggaagtgtatagaccagaaaattgaggaaaagttaagaaaaatctacactatgtaattaattaaaatacaaattttctaaaatatttaatattttaagtaggtaggtgtaaaactaaattaattgacaagtaaagtaagtgtgagaaataaaatgacatggttaagtaagtgtgagaaataaaatgatatggttcaatttaattttattaaattcttcatgattagttatgctctttggaattttatttaaattttcagagcttaattgctatttttaataatacaaacatcatttaacaattatttaattggaaaaaagaataaaaatcctcccttttaggtttgggccgaatatggcaaagtttatattacctcccttttgcctatcctatgtatctggactattctttctccgttgaagttcattttacgtcctcatgcaaacacgcggtccattcagcggcccactaatgtggtggcccaataggccgacggcccgatgcgggagcagctggagccgtccgatcgaatgaacggtctagattgatcctaacctaaataaatacccaaaacctaaccctagaatacattcccccctccctcccccccggcaccaccctcccccgcgagcggcggcgtcggcggcggaggcgctgtaggaacgagatgtcgactagagggggggtgaataggcgatttaaaactaaatgacacctaatcaaaactaacctaagttgctaggcttggtgaggatcaattctaactaagcaactaagttatgttttgcaaacctagggtgatagtggctcaattatatctctaggaaagtaaatcactcctatgtcaatgtttagcaatcctagggtgatatgatctcaagtttatctctagaaaagtaaattgcacaaatgtaaatgcgacaatcaaatgagagaaggagacaagagatttttcaccgaggttcggaaactcaccggtttactactccccgttgaggcgagcccaactccaccgctcaaccacgaagccaccgcacgcccccttcgtcaaggggtgggcaaggcgaaagctggcccacggagaggactacccaagcctcgatcaccag

SEQ ID NO: 24231 - DNA, 17491 bp, Oryza sativa
ccctttaacacactagatggatgaacacaaagctcaagtgagtgtgagagaggtgcaaggggtgtatgcaattgaattgggtgccaagagagctcccttgctgctggtgggggagtatttatactcccacccaccaaaactagccgttgggggcgaaatcccccaactttgtgctctgccggtctgatcgaaggtatgtggccggtcagaccgtgctactctgcaacggctagaaaactagccgttgaaatgctgtcagagggccccatcggcctggccggtcagaccggcgtagagtgggcggtcagaccggcctcggctcggtcagaccgccatcggctcggtctgaccgactacggctccgccggctctgtatcggccatcccgcgcagcatcatctcggcctctagggggccggtctgaccgctcatgtgctgccggtcagaccggccctatgcgacggtcagaccgccgtcttgcggccggtcagaccggccatggcacgccggtcagaccgccactatgtggccggtctgatcgtccctggtcaggtcgaacccagtgaatttgcaagtgaatgtgtgtgtgatgaaaaagagaacacaaatgaaaatacaatgacctaatgtggcaattcaatcatctctatgctaggtcattacccctcttaatagtacggcgaaactagaaaataaactagcaattttgatcgccctacacctcgatcaattctaaactaaagcactagttttaccgtcttctttctctttgctttgcgtcgtcaattttaatccatcgataatcatcgatgcgcacatatgacgtggacctaacttaaaatgtatagctcaaagacaacggttagtccataattagcgcttgtcattaattaccaaaattaacaccgggggcctagatgcttcaatctccccctttttggtaattgatgacaaacaccacaaatatatataatcaaacatagagcacatggacatatattgcattgacaagcaaaagctccccctaaacatatggataacaaacacaaatatcaaatatggagccaatgcacatttcaatttcacatttcaacatagcacaacacatatgcaaattataatgtgaacttcacatatgaatcaaccgaatgcataagatggtcacaagtatatcaatgtcacaccaaccatccatcatagcacaagttcacatcaagaccacataaagggctcacaaataaatgtaggctattacaagaccacgaagggtccaaatgacatagagagtttaacaaaacaacaaataacacacaagatagagtaatagcccatactcatacaaaatatagcccaatcctccttaacctattaaatatgaggtgactaacctcactactactagtcccaacccaacaaaacataaaacacacttttctcccccttttggcatcaagcaccaaaaaggtcttcactcgtggggaggagaaggaggacgcgccgaagtggaaggatgagaagcatcacgacgacgatgatacacaaatgcttgggagctctccaacatttggactcgagaatccaatgtacccactcgagtgtgcaatctccccacagaagcattcaagtctccaacgtccgtgcgcaagccacgaacatcctcatgcaaagtttcatgcccggtagacaagcgttgaatgctttcacttagggtattaatagccccaagtaccgggttgaagtattcgttggattgcattccaaaataggcatactgcggatgaaagaagacatttggatcatacccatgaggaggaggaggtgctgaacttgagctagctccaggatgagaggagggcgccgtcctaggagcacggggagctccaggctgaaggcggggcttgtactgcttgtgcttcttcaaatttggcccagcagccccaagcttgtcttgaatcaatctcatgatgtaaggggcataatagataccctgagtgaaggtccccttagagatggcaatctcttgcatcatgagagtcacagtgtcgaactgacggccctgaatgatggcatcgataacgtgccaagccacccccctaatgtcattattgttacccaggcgagggaggatggtagctctcacaatcctgttaaccacactcgggatggttctcaagccggcaaccttcccatgtgtgtaccgcgctccatcttcataaaactgagagaggtagtccatggagagcggattatgggtgtgctcctcatgcaagtcatctccaaagtccaagcgaacattgaggagccgccggaattgcctcctagagatagaacactggagggtgtcggacatccacttcatctcacaatagtccccggccacccacactgtagcataaaactgccggatcaaatcttcattataatcttgcttaagagtcacaatccggtcaatgccaacagtcctgaagagatcctgcaagccttcaaactctggagtctcattaatgtctctccaagagatccacttatgttctgcaaaagctttccctgcatagacttgctcatacacacttttctggaaagcggtgtgaaaacggggattcggggtgtcccgaggcctcaaaaactgatgatggtgcctcaagatggtatactgtgatggattccgcatgttcacaacacactggatggagggatcaatgttcatctcatcacttccttcatcctcatcctctccacttccactgtcatcatctccactttcatcctcgctagccccctcaacattggcctcaacctcttcatcactttgagcgtaatcctctccgctcgattcctcaggctcactcacgggatccggagtgggcgcacgacgaccatgacgagtgcggggaggcatcactgaaaaaacaggagcaaaggatatataagcaataattttagaaaccacatagtgaagtgggaggaaggggagtgctgcctgtcaggggcggtcagaccgagagccacggccagtcagaccgcatgcccaaagtcggttagaccgacgtctcaaggccggtcagatcgccagcactaggccggtcagaccgcctctgacagtagtacaaccgaatccttccacaatccactcaaatgattctaaaaattgctaggacagtgttgcacaagattggaacatgaacatcaaggtgtaggactatttcatcaagattgaagcaatgggggaaactatccttaaccctagagattgaaatagaccgatttgagagcaatgcacaagagggagagagatttaccggttgaaggagttgaatcacaccaagaaactaccctctattggtgcaaatcgaagaacacctcttccttcacctagggttccatgccatggatcacaaactcaataaaaactcaaatcaatccatagaatagagagaggaagaggaggaaattcacttacggtataaccggagtgattttgacgattgaaccggatggagttggtggagggaggtggatagggtttgggagaggagagaggagaagaaatttcgagttggagaagtgaagagatgagatgggatgaagaggggtcgggtagaaggaggaggaggaagaaaggacaaagtcctgggcccaccatcccaggccggtcagaccggctatatgcggccggtcagaccgccggggtgctgccggtcagaccgggcccaagaagccggtcagaccgcgcatatagcgccggtcagaccgcctggcccccagccgactgtgcacagcccttgcacagttcggctacccccacacaataaaattcaacaaaaaaaatttgattttttggagcaattttgaaatgtgtgagttgaaatattgccaaccattcataatatttgaaatttatgaagatttgcaacaaaactcacttgagtgctaggaggtgaccttttatggtctataggggttttttttgggcgaatttgattttcaaacaacttttgaaatatttggtttttgaatatgatttgaataccaaaaacatttcaaatcctcctctctaccaattttattttgaaacttttctcaaattccttctcaaactcattttggggtttaatctcattttggccaaaaacaagaatatagtttcttcaaaagagagccaaaatgacattttcattcaaaaattatttttcttgcaatatgaggcttggaaaacatataaggacccttttgaaacattttccaagagatagttttccaattacattgattttgcaaaagttttgacttatgttgacttgggcattttgaaaatactactaacatcactagttgatttgctcacatataaaaggaagtagaacacatgcaagagtgcaaaactcccccttaatgtgacatgctccattttcgcaatgaagaatcaaatggcaataaatccaaagcataagagcaaataggagcaaatatacaatatgcaaaagaagcaactatggtgcaccatctcaagccacattagagaagtctatgacatttaactcattcctcaacttgcaaaagcgggtttcatcaagaggcttggtaaagatgtcggctagttgatcctcggttcttatgtggctaatgactatgtcacacttggcaacatggtctcttaggaagtgatggcgtatgtcaatatgcttggttctagaatgttggactgggttatttgctatctttatggcactatcattgtcacataggagtggggttttggtgaaggatatgccataatccaacaaggtttgtttcatccaaagcaattgggcacaacaattacctgccgaaacatattccgcctcggcggtagagagggctacggagttttgtttcttggatgaccatgacacaagggatctaccaagcatttggcaactaccggatgtgctatttctatccactttgcaaccggcataatccgaattggaatagccaacaaacttaatttttgcaccttttgggtaccacaagccaatagtagaggaatgctttaaatatcttagaatacttttcacggccactaagtgacactccttaggagcggcttgaaaccgtgcacacatgcaaacactaaacatgatatccggcctagatgcggtaagataaagcaagctaccaatcatagaacgataaagctttaaatctaccggtttacctccctcatcaaggtcgagatgcccgttggttgccataggtgtcttgatgggcttcgcatcctccaagccaaatctcttgagtagatccttgatatacttggtttggctcacgaacgtcccatccttgagttgcttgatttgaagtgcaaggaagaagctcaactctccaatcatggacatctcaaattccctagacatcatatcaccaaattccttgcaaaatacctcactagtagaaccgaatatgatgtcatcaacataaatttgacacacaaagaaatcatcaccaatgatttttgtgaaaagagtggtgtcaacttttccaattttgaaatcctttgaaaataaaaaatctctcaatctttcatactgacggagctcgtggctcctcaccgggagaccgcgcaggcccccctttgccggttcggccgggggcttagggtgagatctcaagctctctctctctctctgtatatggaaagatcacccgcccgcaagacacacgagacacggcgatgtatacaggttcgggccgccgcgaagcgtaataccctactcctgtgtttttgtggatttgtgtatggacaagttacaaaggattaactccctttcccctcagccttccaaaagggaaaaaatcctcctctaaatgggcaaggtcctccttttatatcttaaggggataccacatgcacctttctctttccaaactggactgttctttttctctttaatgggcggagatcggtacggtttccatccgggagcccttctgatgggacagcccacacctacccccacctcccccgaagacagagatgacgcgggaccgtggctgtctgtcgatgacgcgaccagtgccagaccggtcattcttgtccaccacgcgtcagcttaacaacgtgcatgtttgcccttcttcgtgtaacaccttgcctgtaatggttaggatgaagcctggtataaatctgaccagggctaacgtgccatctctaagagataacacgctagctccggcttgagacgagtgcctagaggctttcgtcttgacgggatggggcaaggcgtacatcagaccgccagtcgccacctaacccgtgatctgaccggtctgtgactggtcacagaccggataaaggaacgcgctgtactgcgctgcatgcagcgtgacacgcttgaccagactgcaataaatgctgttaggtgagcacagctgtgctcacttatcccatatatgtggcgcagacttccttaaggggtcggggtgcctcggccctcggggccggggcaagcgcaacccgacccccccctcgggggaaatcaggaggagggcggacacctcaccctcgggcccgacgtccccgaaggtgccaggccacgtcggcgattgcgtctgcctcaagcctctggtcatgatactcccggtcccatatcaccgacagtagcccccggcgttatgccagagcaatttcccttcccaagggaagcggtcaggtgtgacgccacccctaaagcctggtgacaggtgggaccggtctccgtagttgggcaaaatacccaacggtctcaatccatgcacattggtattggtaactttggttgtccataatgggcggtctattcaagactgccacaccacttgagcagcgcgcgaatctgggtgagcagattggtctcgcccggagatacggtagcgccgcttcggtcggcgagcgtaattaacgtgcgcacgatacaatccatttcgattgccacaaccgcatatccacttcatgcgccgtaagcgggcgaatgggattagtggaagcgtgggcacgggaaacgagggagcgagatagcgagatacgagggagcgaggtagtgggcgcgagaaacgaggagccaggcccagcgatggcaagggtataaaagcatcgagaaaaggatttgcttccttcctttcgccattgttcctcttgccttcgccgcctgagctctaactctttctctgctacgccctactttcgccacacgcgctcgttcttaatcatctcttcctccaccgccatggcacggggctctgctctgctcgacggcagtgtactaccgccttcccgcatcgtgagcgagaggcacgccggactgccgcgccgcttcatgccggagtccgccaccggtcgggagatagtgatgctgggcgaggggcgcccggcaccagactacccgaggcggtccatcttcttcctccccttcgcaatggctgggctggtcccgccattttcttctttcttcatggatgtcctggagtcctacgatctccagatggcgcacctcacccctaatgcggtgatgacattggccatcttcgcgcacctgtgcgagatgttcattggggtgcgcccctctcttcagctgttccggtggttcttcaccgtgcagtcggtgtcaccgccgtcggcggttggcggctgctacttccagccgcgggggccggtgttgaaccgctacatcccctgcgtcctccgcaagaagtgggacgactggaagagcgactggttctacacccccctcgccaacgaagcgcgcctccgacttccaagccagcccccggcgcaggtctccagctggcgggcgccggtagatctgggggaggactacgacgccgtcctcgaccgcctggcgggcctgcgatcccaggggctcaccggggccatggtgtacggcgattacctccgtcgccggattgcgccgctccaacggcgcgcccggagcgcctgggagtacactgggcctgaagactacatgcggacccaccagggagccagatgggattgggctcccgaggacttcaagatcgtggtccaaagggtgctgaatcttagctccgtggaggcgtctcgcattcctcaggagatcctccccctctgcagcgatcccgaccgcgcctccattctaaccattatgatgggggtcggggcctcagaggagagagcccctaagggccacgacggcgcgggcgagcgccgccggggggaacaatctgccccaggagggggtcgtgcttctgggccccgcgtcgggggctcggggagcagccgccctgccgacgcccaggggaagaggaagttgggaggaacacctcccccatctcctccccgagggggcggggcggcgcgtgccagcagtcggcgcccggagggggccgcgccgacgtcgcagcccgagggggagcgcaagaagaaacggctccgcaagacgggggagacggaaccatgccggggaaacctgatttcccctccaaggtggtcattcaaccgaccccctcgcaggttcgtctcactctcattgcaaccatctttctcccaaaaggaagttttttcttactcattttgttcgtcttctggttttttcttctgcttcagcgatgtcccgtcgcattcctcccgccaccccaagtccggccagtccgaggccgaagatcctgcggccgcggaggagcggaggcgagaatctgaccggcgtgaagccgtagaccgccttcgggaagctgaagaggccgcccgggaggccgcccggattcgccaagcggaggaagctgctcgggaggaggccgcccgggctgaggaagccgctaaggaggaggccgcccgggctcgccaggctgaggcaacagctgctgctggcgcgtcaactgggcccactccttcgggcaaccctcaggcgacagcctccggggaggctcgcgacgaggccgcgggcacatcgcctgggcccacctccccgggcgacgcccaggatcaaacgggtccgggggacatccccgagcccagcacgtcctccggggggccgagccgcatcgccttctctccaaggcggctcttctcctcatcttccgtcgccccgctgagcgccgagcccattctgcaggccttggccgccgcaaacaccgcggtgctggatgggtttagcgcccaagtggaggccctgcgcgcggaacgagcggagctcgaggccgcatgggcacgcgttgaggaggggcggcgctcggtggacgccatggtggaggtgggccgtaaagctcaccgccgtcacgtctcggagcttgaagcccggaaggcggcgctgacggagatcgctcgtgaggtggaggaggagcgagcggccgccctcatcgctaccaccacgatgattgcggcgcaagacgccctccgccttcaaaacgccagccgggaggcggagctgaaagaaaagctcgacgccgcccagggagtccttgactccgccgctgcccgagagcggcgggtaacagagactgaggcggcgtcccggcggcgcgaggagtcccttgaggcccgtgctatggcgctggaagaacacgccggcgccgtggagaaaggcttgacgggccgcgaggccgccgctactctccgggaggcgacgctggcggcgcacgaggccgcctgcgccgaggaggagtgcgcgctccgcctccgcgaggacgcactcgctgagcgggagcgagctctcgaggaggctgaggccacgaccaaacggctggcggacagcctgtcccttcgcgaggcggcgcaggaggagcaggcgcgccgcaatcttgaatgcgtccgcgccgagagagccgcattggagcagcgggctgctgacctcgaggcgcgggaaaaggagctggacgcgagggcgcatatcggtggggcggccgcgggcgaaagcgacttagccgcccgcctcgcagctgccgaacacaccgtcgccgatatgcagcgagcgctggactcctccaccggggaggccgaggcccttcgcttggcgggcgagattgggctcgacatgctttgggatgcggtctcccgcctgaagcgcgccggtcggcaagcgggcctctggaaaggccagacgacggtgccccccaccaatctggaaggcctcgctccgcacctcaacaggatggcctgggttctcgaacaactccccgaggagcttgagaagaccatcaagtcatcctcgagggacctcgcgcggggagcggtcgaactcgtgctggcgagttaccaggcccgggaccccaacttctctccatggatagcgctggaggagttcccccccccgggaccgaggacgatgcgcgcgcgcgggtccgggatgccgccaaccacatcgtccaaagcttcgaggggtcggcccctcggctcgcgttcgcccccagctccgacgaggagggcgacgccagcggtgaggatgacggtggcgacgaggccggcgacccgggcacattggaatgagcccccaggcccccgccaatctccaattttttctttttctttcttctttttgtatagatcaacttaatctgcaatcaaaaatgatgaaaaatttcttatgttaactttattttgctatgcatatgagttgaggatgatttgtgccgtggtccttttgcatcttagcttgatttaagggctcgtgctcaagtcccgatcctcaaatggctcgggtcggggctagtgcctggggagatccacatgtcgagactggccaggccgggaacatggtgaccgagggttatgggtgacccgattgtgggtttttgccgattcccccccggagttcaccacgccccggggcacggctcggttctgggccccgcttggcgattttagctgaccgaaccgagcccccgagggtaaggttgagcacgagtgaccttatttcaagttaagattcttcagaaggaaaaacggcacagacacaacctttaggaaactgaaactgcttttattgaaatgctgaaataagaaaagtaaggctgtgcatgtgtggtagcccccggctaaccctgcacacccgaggggggtgcggggttagcccgagcccaaaacctgacacccgacccccctcctcaggggtagaagcgacgaaggtgttcgatgttccacgggtttggcagctcagtgccgtcgcccgtggccagccgtacggagcccggccgggggacaccgatcactcgatacggaccctcccacattggtgagagcttgctcagtccagcacgcgtttggacgcggcgtaggacgaggtcgtcgacgcagagtgatcgggcccggacgtggcgctgatggtagcgccgcaggctctgctggtagcgcgtggctcggagggccgcgcgccgccttcgctcttccaagtagtcgaggtcatctctacgaagctgatcttgatcagcctcgcagtacatggtggtccgaggagacctcagggtgagctcggatgggagaaccgcttctgcgccgtagacgaggaagaaaggcgtttccccggtcgctcggcttggtgtggttcggtttgcccagagcaccgctggtaactcctcgatccatgaatcgccgtgcttcttgagaatattgaaggtcttggttttaaggcctttgaggatttctgcattggcgcgctccacttggccattgcttctggggtgggcaggtgaggcgaagcagagcttgatgcccatgtcttcgcagtagtcgccgaagagttcactagtgaattgggtgccattatccgtaataattcggttaggcactccaaaacgggccgtgatgcccttaatgaatttaagagcagagtgcttatcgatcttgacaaccggataagcctcgggccacttagtgaacttgtcgatcgcaacatacagatactcaaacccgctcggggcccgtttgaacggtcccaggatatcaagcccccagacagcaaatggccatgacagtggtatgatctgcagggcctgggccggctgatggatttgcttggcgtggaactgacacgctctgcatcgccggaccagatcgactgcatcattgagagctgtcggccaataaaatccttgacgaaaggccttgccaaccagggtgcgcgaggcggaatgggctccgcactcgccctcatggatgtcagcaagaagctcaacgccttgttcctgaggaatgcacttcaggaggattccgttagccgcgcgccgatagagggtcccttctaccagcacgtagcgtttggaaatgcgttgtacgcgttcactcccttcgcggtcctcaggtagagtcttatctgtgaggtatgtttggatctcagagatccaagcaatcaatctaagggagcttggagcgctcccttcgggtcccgaggcctggactccgacgggcctcgggggccggtcaggctcatccgtctcccctaaggggtcgggtcgcgccgacggctgggtaagcctttcttcaaaggcgcccggtggggtctgggctcgcgaggacgcgagccgcgagagttcgtcggctatcatgttatcccgtctgggcacatgccgaagctctatcccgtcaaaatgacgctccatacgctgcacttggcgtacataggcgtccatttgcgggtcagagcaccggtactccttacagacctggttaacgaccagctgggaatcgcctaacaccaggagacggcggatccccagtccggctgccaccctgagtccggcaaggagtccctcgtactctgccatattattggtcgctcgaaagtcgaggcggaccaggtatctgaggacgtctccgtttggagaggtcaacgtgacccccgcaccagcgccctggagagacagagaaccgtcgaactgcatcacccagtaggtggtgcgaggcagctgagaggggtccgtgctggcctcgggtattgagacggtctctggagccggggtccactctgccacaaaatcggcgagggcctggctcttgatagcgtggcgtggttcaaaatgcagatcgaacccagaaagctcgattgcccattttaccactcgtcctgtaccctctcgattatgcaagatttgcccgagggggtaagacgtaaccacagtgacccgatgcgcctggaaataatggcgcagtttcctcgaggccatcagaatagcgtaaagcatcttctgggcctgagggtatcgggtcttggcgtcccggagggcctcactaacaaagtagacaggccgctgcacctttcggcggggccgaccctctttgctaggggccgcatccccggggcgttcttcgtccaagtggcctctcggggcgcactcgttttctgtgccgatgacctcggggtcggaggatgacaggagcggccttcccacagtggcctcggggccgtcctgggggtcgggggctcctggcatcgtcggacaagcgggcaaaggtcctactccggtcgtcaggggcctcaggcctccgttcggctcgggggcctcttctccctgctctttcccgggtcgagtcagcacagggttagccttggggtcaaagggcgttaagtgcggccttcccgcagtggccttggggccctcatgagagtcgggggcacctagcaccgtctgacaagcgggcagagggccgactccggtcgtcaggggccgtaggccaccgtccgactcggaggcctctccaccccgctcgctcccgggccaagttagcacagaatgggggtgcacgaaatgaggattattttcatcgcgctccacaaccaacgctgcactaactacttggggggtcgccgctaagtaaagtagcaggggctcatttggctccggggcgactagaaccgggggagagctgagatatgcctttaactgagtgagggcatgttcagcttcctccgtccaagtaaacggccccgagcgcttgaggagcttaaacaagggtagcgccttctctcccagccttgatatgaaacgacttagggcggccatgcaaccggtgacgcattacacatccctaagtttgctgggggggcgcatccgctcaatagctcgaatcttctcggggttggcctcaatgcctcgggcagagaccaagaacccgagaagcttgcccgcaggtacaccaaacacacacttatcggggttcagctttatgcgggcggagcggaggttctcaaaagtttccgctagatctgaaagtaaagtttcttggttgcgcgtttttacaaccaagtcatcgacataagcctcaacattacgtcctatttggctacccaaagaaattcgagtagtacgttgaaaagtaggacctgcattctttaacccgaagggcattgatatataacaataggttcctacgggggtaatgaacgcagttttttcctcatcctccctagccatgcgaatttgatggtaaccagagtatgcatctagaaaacacaaaaggtcgcaccccgcagtggagtcgacgatctgatctatgcgaggcaaggggtaaggatccttaggacatgccttgttaaggtcggtgtagtcgatgcacatccgaagcttgccgttcgccttgggaacgaccaccgggttcgccagccactccggatggatgacttcacggatgaatccggcctccagaagtctcgccatctcctcgcggatgaaggcttgacgctccggggcctgccgccgcactttctgccggaccggccttgcgcccggccgcacggcgagacggtgctcaatcacctccctggggaccccgggcatgtccgctggtctccatgcgaagacgtcagcgtttgcccgcagaaaggaaacgagcgcgtcttcctatttgccatccagaagaccaccgatccgtgtggtcttggatgggccgtcgcccaaggcaacctccttgaccgggacctcgtcgcatgtggcaatccgctgcctcggggcggtgggggcggaggcgccaagcctctcgtcaccaccctcgggcttggtcgcagcagcgaggtggtccgcgcgctgctccatgcaggcgagcgcgactttaaggtcgccacggacagagatggggccactggggcccggcatcttcatctggaggtaggcgtagtggaccgccgccataaacttcaccaacgcgggcctccctaggaccgcgttgtagggcagactgaggtccgccacatcgaagttcacccgctccgtgcggaagttggctgatccaccaaaggtgaccggtaggtcgatgtgacctaacggccatgtgtgccccggcgtcacaccaatgatcggttgagacagctggagcaccatccccggggccttgatagcatcaaaggccgcgggggaaaggatgttgagagccgctcctccatctatgaggacacgccccaacttcacattgcagatggtgggggaaactaccatcgcaacctgccctccccgggcaatgcacggtgggtggtcggtctggtcgaaggtgagagcaacctccgaccaccgcgcccgacgcatcgcctcatgagtaggggccatggccagaagctctcgcttcatagccttgaagctccggcgagagacgtgagcacacgctcctccatcgacggtggcaatggtggccccaggttcttggaaacctaggtcatcatcaccatcatcgatgtcaaaagcgggggccttctgtctggcctcacttcgccgtttaccggagggaactgccgcagacttgccctcacggcgttcctgcctcctgtcctcctcccacttcctcgttcgctcagccaagtttttgactgcgcgacagtccgcgagatcgtagagggaggtgttgtggacagagcaccacttgctggctgggcgctcccggatgggagtaccagcctctttctttttgtcgctcgcaggcctcccctttcgggtggcccgcggagcgccctcgacggcgaggacgtgaccctcgtcgccggaatgggctgaccttttcttcctcctcctgtcacgccgccctgtctgagcggcggatccgggagcggccgaagctgccacaccggaaccggaggggttccaggtccaggcctcctccttacgagccactcggtccgcgagctgaaaaagctctgcggtagtctggggctctttggaggcaatcttttcgagcatgcggttgtgccgcacaccccccctgaacgcgtagatcaccgcgtgtgcagggatgcaaggtatagtattgcggacttggcagaaacgctgaatgtacgagcgaagcgactcatcatcgcctcgctgtactgcatgcaagtccgcttcttcgcctgggcgcggatatgtgccttgaaagttcatggtgaactgttggcacagatcctcccaggagtggaccgacgcgggtggcaggttcattagccaaccccgcgcctgtcccttcagggccatgggaaagaaattcgccatgaccctgtcgtctcccccagcggcctcgatcccggtcgtatagacctggagaaactcggtggggttgacgctcccatcatacttctcggtgatggtgggccggaaccttgggggccaacggacattccgaagactcgccacaaaggctctacagccaacaccaccaaccgggggcacggagggctgatcctcacgtccatgtcgaggtgacaccctggacgaagaggcaccctccgttgcgcggggagcacgccgatcactacgtcggcgctcgatgtcgaggcgggcatccggctcttcatgctgatcctcccgagtcggaggtgccgacgagggagtggtagccgaatggcgtgcagcagccgccgctcgccgcgccctccgtcttgacgacgcggaaccggtagtggcggcgccggaggtcctggtggtggcggaccgtccgccagcacccaggcgttgctgtgccgtcatgaccaagttggccacgtcgtccagccatcgctgggctggagactccgggtcagggacgacaggcgggtgacgtaggagcgcgccaacagcctgaagcgcgccttgaggcgtgctgccgtcgccgtagacgaggaggcgacgctccccatctcgccgttctcctgcaccacccgcgactggcgatgctgcggatttttcgactctctcgagcgcctccccccgcttgggactttggcgtggaggaggtgggggagtgcgagctcgacggcgtgggtttggctccccgtcgtcgccgctcacactcggagagagatcgtgtgcctttgcttgctcggccattaggctgaacaagaaaaacttggcgcacacggaagagtctgagagctcagaaaacacacactgagccccctacctggcgcgccagatgacggagctcgtggctcctcaccgggagaccgcgcaggcccccctttgccggttcagccgggggcttagggtgagatctcaagctctctctctctctctgtatatggaaagatcacccgcccgcaagacacacgagacacggcgatgtatacaggttc

SEQ ID NO: 24232 - DNA, 3271 bp, Oryza sativa
ttgagagtttgtaaacatggttaggatttttaggatcttcaaaatcgggaggttgttcaacaaagacaagttcggcaatttcaccatttaaaaaagtacttttcacatccatttgaaatagttttatgtcaaagcatgatgcaaatgcaagaaggatgagaacagcctcaagtcttgccacgggggcaaaagtttcaccaaagtccaaaccttcaacttgtgtgaaaccttgtgccaccaaccttgccttgtttctcaccaccaacccgttctcatcttgtttgttcctaaagacccactttgtccctatgacattgtggtctctaggtctttcaaccaaagtccacaccttgtttcttgcaaagttgttgagctcttcgtgcatagccttcatccattccggatcacaaagtgcttcatctacatgttttggctcaagacaagaaacaaacgagtaatgttcacaaatcgaaacgacacgagatcgagtttgaacacccttactaatgtcacccaacacttgatcaattgggtgatccttggaaagagcggtgtgtatccttggtggcataggtggatcttgtgccttctcctcctccacttcaacttgagcttgacttggcgtagcggaagtagatggctcatcttgagtggaggtggatggcttgtcttccacttcaataggcttgacatctccaatagacatgttcttcatagctctcatcaagccttcatcacctacatcatccaaattctcgtgcccctcttgggagccattagtttcatcaaattgaacaacggcggtttcttccacaatacctttgttcttgttgtagacccggtatgtctcgctatttgaggcataacctagaagaaacccttcatcacactgactattaaatttggttagtctaacacccttttggtaaatataacacttgcaaccaaaaactcgaaaataggcaacattaggcttcctcccaacgattagctcataggaagtctttttcaagagaggatgcaaataaagtatattggttgcatggcaagcggtgtttatggcttccgcccaaaaggaatcagaaacaccatattcatcaagcatagtccttgccatctcaatcaatgtacgatttttcctctccactacaccattttgttgagatgagtaggtagcggaaagttcgtgtttaataccaagatcatcacaatagtcctcgatattggtattcttaaactcggaaccattgtcacttctaattttcacaagagtgcaactaaattcatttttggccctttttgcaaactttttgaaaagctcggcaacaatagacttatcatgcaaaaagaacacccaagtatatcaacaatcacaagacaatgactattaccaccaatgctcttataggttgttgggccaaacaaatccatatgcaagagctccaatggtctagatgtggacatgatactcttagtaggatgagaacatgcaactagcttgccggcttgacaagcactacaaagcttatctttctcaaacttcacatctttcaagtccacaactagatcacgttttgaaagtttgttcaattgattcatgccaacatgggatagccttctatgccaaagccaacccaaagaagtttttgcaactaaacaagttttcaaatttgcttcactagaattgaaatcaaccaaataaagatttccatatctaaaacctttgaacacacaagacttgtcaagaaggctagaaacaataacttcttgcgggaagaaagcacatgacaagccaagatcacaaatttgagcaaccgaaagcaaattgaaatttagagatttaacaagagagacattatcaattgaaaaatcattggagatagcaattttacctaacccaattacctttcctttgctattgtctccaaatgtcactttctcttgttcattccctcctacttcaaatgtggtgaacatagccctatcaccggtcatgtgttgagtgcatccactatcaagcacccaatggctcccaccggtgtggtagttcacctacaaaagaagatcaagctcttttaggtacccaaacttgttcgggtccttggaggttagagaccaaagctttgggcacccaaatgacattctttttaccaccgagtataagggaacccacatatctagcaacaatgctaccatcatgagccttcctaagcatataatgagaattaaacatgcatatgttaggaggcttaccaccggggcaatcatttaccaaatgtccaatctcatgacacttggagcaatacttaccattgctcttgacaaaacgagtggcacggtgagaaggtttcttacccttctttggaatgaatccaagtccctccttattaaggatgcaccgttgctcactcaaaatcttgtcaagagtgttcttacccttgaagcacctctccagctcttgttgagcttagccacttgctccttaagctcattgttctcaacaacaagtgaggcatcacaaatagaaacacaggagctagagctagagctagacatatccacaagatcatcacaagaggtagaaatgctagatgatgcaacatgagcaatatagcaagtagcactatcatcaagcaaatcacaagatatgccaacatcaatgagagctccatgttgagtagtggaaaggaggttgtcatgagcttccttaagcttctcatgagaaatggtgagtctcgcatgataagtctttagctcctcatacaagacctccaaagaagcatgatccttctttagggccttgaacttgacaatctccttctcactataagcatgaagctcctcaaacatactcacaagctcatcataggaaacatcatcacaatcatcatcactctcactatcactaagagatgttaccttagaggagccctttgccatgagacaaagtggagcgaagagtgatggagcctccttgatggcaacaacggtcatcttcttggagcttgcatcatcaccatcttcttcctcggacccggatgaggcggagctctcctcatttgagtcccattccccgatgaaggcctcaatcttcttgccttccttcttaagcttcttcatgagcttgtagcctccactctttttcttggatgacttgtctccatcatcatccttggaagggcacttggaagcaaagtgtcccttctcaccacactcaaagcacctcaagttggagagagtcttgttgggtcttctatttcttctcctatta

SEQ ID NO: 24233 - DNA, 2158 bp, Oryza sativa
aacctacatccacaatactccaaatatggaacctcatagctttgaggtgagtagacattttaattttccaagtggaatagtttgtgccattaaacatgggagccttccctacatggttcacctcgttcgacatcttctctctaggcggtgaagcccaatcaagagagaccaagctctgataccacttgtaggaacgagatgtcaactagagggggggtgaataggcgatttaaaactaaatgacacctaatcaaaactaacctaagttgctaggcttggtgaggatcaactctaactaagcaactaagttatgttttgcaaacctagggtgatagtggctcaattatatctctaggaaagtaaatcactactatgtcaatgtttagcaatcctagggtgatatgatctcaagtttgtctctagaaaagtaaattgcacaaatgtaaatgcgacaatcaaatgagagaaggagacaagagatttttcaccgaggttcggaaactcgccggtttcctactccccgttgaggcgagcccaactccaacgctcaaccatgaagccaccgcacgcccccttcgtcaaggggtgggcaaggcgggagccggcccacggagaggactacccaagcctcgatcactagggtagttcttccttcactctgaaggtggtgaactccaaaccactcacaaacaggtaccgggcctcctccacaatcttctcggagagatcaccgggcaacttctccacaaaccgtctaggaggcggcaacctccaagagtaacaagcaatgacccggcgtggagatgatcaagtgccacactagctctacaatggaagcaaatgcacttgactcttggctaatcaaccctctaacacactagatggatgaacacaaagctcaagtgagtgtgagagaggtgcaaggggtgtatgcaattgaattgggtgccaagagagcccccttgctgctggtgggggagtatttatactcacccaccaaaactagccgttgggggcgaaatcccccaactttgtgctctgccggtctgaccggaggtatgtggccagtcagaccgtgctactctgcaacggctagaaaactagccgttgaaatgctgtcagagggccccatcggcctggccggtcagaccggcgtagagtgggcggtcagaccggcctcggctcggtttgaccgactacggctccgttggctctgtatcggccatcccgagcagcatcatctcagcctctagggggccggtctgaccgctcatgtgccgccggtcagactggccctatgcgacgatcagaccgccatcttgcggcctgtcagaccggccatggcacgccagtcagaccgccactatgtggccggtctgaccgtccctggtcaggccgaacccagtgaatttgcaagtgaatgtgtgtgtgatgaaaaagagagcacaaatgaaaatgcaatgacctaatgtggcaattcaatcatctctttgctaggtcattacccctcttaatagtacggcgaaactagaaaataaactagcaattttgatcgccctacacctcgatcaattctaaattaaagcactagttttaccgtcttctttctctttgctttgcgccgtcaattttaatccatcgataatcatccattcgcacatatgacatggacctaacttaaaatgtatagctcaaagacaacggttagtccacaattagcgcttgtcattaattaccaaaattaacaacgggggtctagatgcttcaggcgccctccccccgcgagcggcggcgtcagtggcgcggtgccctccccccgcaagcggcggcggcgcggcgccctccaccccgcaagcggcggcgcgctcccaccccccctcactctctccacttctccccctttctctctgtgtggcggcggcgggagggccagcgacgccctgccctccgctagatcggggggaggggaggtgcggcggcgggtcggacggcgtggaggcggccggctggacctcgcgtccgccagatccggcggcgctgcggccaggacggcgtggaggcggcgggctgggcctcgcctcctctagatctggcggcatggaggcggctgtggcccggcggggcgggaggggcggcggcccggacggtgtggaggcgg

SEQ ID NO: 24234 - DNA, 1313 bp, Oryza sativa
ccaaatctcaatagctgctggttgctagtactaataagctctaataactatgggtttgagccatggatctggatcgaggagctgatgaacaaaagagaaggtaaaaaaaagaaaaaaaaactaacctgacaaatatatatgtgtttataagcagtacaaactcatgtgtcactcgagtgtatagacatgccccagatccatggctcacacggctttacagtaacagatgatgcagcaccaccgggaaggtatgtatggttttttatatgtcaccccgtttgtttcacttcttcctcggcttggcgcggcgcgacgtcgccgacgacgacgagccggagccggagaagatggagcagaggatgcagccggacaccctcggcgacggcgggtcgacgtccggggcgatgtccttggtcctgaacacctgctggctgcggttgtcgtcctccttctgaccgtccttcttcttcttcttcttcttcttcctctgctgcttcgtcgtcttctcgctgtcgtcgccgtcgtcggcagcgacacggcgcatcatgccgatgctcccgacgctcttggaatgccggagctccggctggggctcctccgtgccgccaccgccatcgccatcgccggccttggccgcctctgcgtcctcggtcaagaaccgctcgtcccagaccaggcctgacgaaccggaccttctgaatgttgtcgctgatctttgcaagccagccatcatctgcaccaccaaaaccaccactcctctctgcaaaaaaagaggaagcaacttatctgcaattgtggagaacaagaggtgaggatgaactgaacggtgtgttctcttcttctcctggggttgggttgattgcctctgcaggcttccaatgtgtgtatatatgtgaactgaaaagagacagccattaatgtacagacagaagagcagtcaacagccggtgccattggaaaggtaccaggggctgtcttccattaactaactaggttaagcagggattagtttatcaacaacaggtagaagaacagtacggtaaaactcaacagattaaactatgcacctttctggtctaaaccccatgcctctggttttacttttccatcacaagcatgtggaagaggagaatccaatccaagtgtgctgaagaagttcgaccattaccaccataaaaagaggacaatttgctgagagcaacaagaccctgcatgcataaattcttttggcaatttgtgcacattactgtgtgaaaaagattgtccatgatatgtcaacacaaaaggatccatagaaaaaatatctaaattgt

SEQ ID NO: 24235 - DNA, 3580 bp, Oryza sativa
attatgtaggcatataattttacatatttcacaaaagttttgaataagacggtcggtcaaacatgtactaaaaagtcaacggtgtcaaacatttcgaaacggagggagtattttggaacggagggagtatcatctaaaacaaaggtacaatgcatcgatcatgattttaactcagtggtgacaggtgaattttaggtgcagaataaatatctaatgtatatgtaaatcaccaacatctgtttactccctctaatttttagtatatctctaatgattgaatcacacatgcccccacaggtctttctcattccttccaacctcactatctctgtgttgcagccttgcaggtccccagatgctacctccctcccctgtttccacatagtttccttctgatgaactccgaaatttctccatctgccccagtaatccacagtacatggcaacaatttcatattacataatagaaatcatcatagagttgcaaagttttgaaagactgataaatatagattggtgttcctaaagaagtgacaatatatctaccctgtagatatacctaatcttctgtgtcactcacacatgagcctctcatgatgacatgaccaacgcaaagagctgagctgaccacaagcccaaactactcacattgaaaatagcaacacgatttcgattaaagtaaggcaaagcatgggtttgatctaatagagtactaaaagtcacctatcgtggaccacaaacattcaactcaaaaatgtgaacgttaaaacatttaacacaatcgtgtcagctactctgtcgctgccttcccaaacttactggcatacaacttcatcttaaatccctacacttagggtgagtttgaggagaagtggattgagaagattcggaagatacgcaaaataagatgagccattagcgcatgattaactgagtattaactattttaaattttaaaaatagattaatatgattttttaaagcaactttcctatagaaaatttttgcaaaaaatgcaccggttagtagtttgggaagtgtgcgcgcggaatacaatgggctttctcacccaatcccccaggaaccaacgcacccttaatacttctggcataaaagaaaaacatatacgggattactgggcacatatcccaaaaaaccagactagagaaaagattatgtgaaacgccttgcttccaataagaaaaccaatctaagcaagaacaagacagaatctattgtgacatttatcattcagaaaatcaagatctggtcaacagaacccaagccgactttcactgaagctaatagtcaaaatggtggtccagagtgcaacaaataaaattatcaaagtggcaattaagagttgtacctgtcacattggttgatatgggagtactaatataaaacatactccatattgggcttgcagaaattcttctacttcaaaaattcaaatttagaatttgcaaatagttcaaagaggaaaccatcatacatgctaatttgaagtaattatcaactagctatggtctcagatagggatctcttgaatgcaactcgatggtcaggtaccccatcctgttcccttctatcctcaaaccacttaacaatggtcttccgtggaaggcttgtcacttgaactatgctgctgatcattgtattctggatccaatgcaagaacaaacataaaatttaagcaatgaagtgaaatgtactccactgaatgaaaaggatgatcatagtggaaaattcacttactgtagggcgtttggttcgggagtagactctttctaatgtctccagttgcaccttttttaatcttttctgtgaagaccattctgcgcacatgacatgaacaggaagttccgtctgtggcttggtttcagtgacatcagcgttatcaactactggagagggctctatttccttgatttcaggtttagaagggtcttcatcaggcaaagaatcagacatgaatagaagttttggaggtggatttcggagcaattcaatgaccaaagtcctatccaggcctagttcccctgcaagattgctttatctgcaatggaaacaattcatataagacaacagaaaaaaaaaccttcgataatttaaagtttggatatatacctattactactataaaggaacgcttcctacaaacagaaactaacagatttcagaaatggaaattaattagaatccaagtggatatttatctactcacactagttttacggcgacctattttgagagcacgagccagcctcttaagttgccagtttttcagctctggccgtttgatttcatccgttttttcatcattcccataagcctcagagcctaatgacgaaccctctccagattcatcagcatcagcaatatccccgattgcctctgccaactcctgctcaaatcttgccatatcttcttctgaaattccatcgtcatcatcctcaacagacaaatcatcattcttgagatcttcttccaactgcttaaaaagtgcttccagcgcgtcgtcatcgtcttcaccaccaccgccaatatcatcctctactacaacctcctcattctggattttattctggaatacataacattttatcaacaacccttccagccacagcttacgtgagggaacatttaggggacagacacataaatctcaaacacatccgagataaagatatgcatgcaacaaacaaaaaaaaaaatcgataatattctccaactacagaataagataaggtcagtacgataaggaaaacactataaacgattctgcaactcctctcgatgagtaggtgtaaaacgcaacaaattcagcaattcaccaacccgaatttccagtcgctcgcagggcgccatctcatctacactactctatctacatctacagtaaaaaaaaaagaagaagaagaggggtttagaggaggaagcagtgactgcgaggtgaccttgtacttggagggcctccggcgaagggcgcaggcgacgccccgcggcgagcggcggaggagcggccgtgccaggaacactcgcgcccctggcgcggcggcggccgcggccacggcgagcggcgcccccaccatcgccgccatttccgcgagctctctcttcggatattttcgctcccacctctgccctcctctccgtgggatttttggtttcgcagagtccagaatccaaatgggccgtctctcttcgtctgggcccattttgtcctcagttctagcccataaataaaataaaataagttcactttcggtttctctatttttacgtcgagttttcacttttgcatggtgttcttttgtccgaagatgaagattaagattaagttttttatgtaaaatgagatggtattaacatatgattgattgagttttaattattacaaacttgaaaaatatattaatatgatattttagagcaactttcatatagaaagtttttgcacgaaacgcaccgcgtgccacgaaaatcttaatcttaatccaactcttgttggagaaaagaacatgactgcaataccggattatccaatgtccgagggacgcacccgtgcttcgccact

SEQ ID NO: 24236 - DNA, 19969 bp, Oryza sativa
tggggcccatctagcagtaggagtgggtagttagccgaaccggtcagagacgcgtcaagaagacgacgccaacgcggcggcggcggcggcggcgaagaggaaggcgaggagctcgtcgtcgccggcacgcgcgcagcgcagcgcagggtcgccgacttgcgtgttgcggtcgcctcgcctcgccgccccgcgctgttgatcggtcggcgaggacaggaggcgccgaggcgggggtgatgcggcggtcgtcgagcggggcgcgcgtgtcgtcggagggcggcagcggcggcggcggagagatcgaaggagtggggctgccgacgtgcgacccgcagtcggcggcggggcggagggaggcggcgcgggcgcgggcgctgcagcgcgccgtgcactgcatcccgctcgtgctgatcctctgcgccctcctcctctggctctccgcctcttgagcctcttcggtgagcaccaactaatctccatatctctctctctatgtcgatggcgagatgctaattagctcagtaggatagcgatcgtcgcggcgtgagcatgatctgatcgaatcttgcccccatttcttggaaaaagtgcgcttcttgtctgtatgatctatttacgaatcacatcccagcatcaagttgaaaatttttgagcaacgatccgaaatggtttcaggaaaatgcttaataatcccaacaatatcaagactggtatcgtctcactgcaatctgtaactctctactcctcttgtttcttcttgcttgcttgtaaatttcgttgctgaatttgcttttttttgggatgtttccgcaatcctcgtcagtacaagcagactaatatattcccttgggtgcatcaattttgttcctttctcctttgagatcgtttgatttcccgtcaggattagcccttttccttcttgctcagtccgatcttagcgaaaataactgatttgcagatctgcactagaattaattcaagaggaaagacgaatggtctggtggtgaggaggttgtttaacagtttaagctcccgaccactcgagttattggatattggggatgattggcatgctactatggcagtccatcccctctaatgtgagtgctagaactcctgtttcaaaaagaaattcatgaaatatagttgcttcagcacttcttttgcaaaatgtttctttacctttggtgaaatggaagtacggcaaaaacaagaagacataaactgatagtcttaactagttgccaatcataaaaaatcctgttagttacatgcaagcttttgttgcttatgaggaagagatgttggaggatctgggttagagaaagattgatccttgtttatggtaatcaacctccaaccttccttcctgtctctttgagtttgctttatccttagtgtgcgtgcgtccgatttgtactcgcaaaagagaaacaaccataaattagtataagctatatttatattttgtaaagaaataatgggacagattggttcaaccagtagggtaaacttttattgatgaaataattgacattgtttgagagaaattgacagctgattacatgtgatgtgataggaatataatatacacaatggtcgaacttgaaaagaactttagcatgcaatggggatcatctccagcatccgatgctaaagatgcttccctgaggctcctaaagtctttcactcctcataaatggattttctccactttgcagtttcaacgcttgtttttgcatcctggagttctgtcacatacatatatatcttttttttattcgatcagttatcgctgtagaaaatatgctctgttgtgacatcgcagtgcaacatgggatgttatgcacttgtcctcagagcagtccctttgtatgccaccactactaaaccacatcaatttctttgctatggttactctacctcgtgaccgatgaaccaattttttatagcaatcatcagttgattaagaagtgtgacaccagatcgaaatgtgctttcaactgcaatacacataaactgattttgcaatgacttggcaatctaggccttcttatatatttgattgctcattgtagatagggtccttccccttaaggcctcactgttggggcataagctccctctttctacccatatatgcaaggcacctctctaccctgtgttttagcttgcacccgtcattgtgattttgcataaatatggttatgtttgctttcgcacccaaatgctttctgacgtcaatgatttttctgatgtatgcagattgataaccaatgggtgtttcaagtggatctgacgccacaatgtagagtttatagagaaaacaaaatacaagtgaactagatcaggcatgatcaagtaaaacacagagacattaagttacaaaaagattaccacagcaagaagctcatctactacagttatatttttttggtttcccctgaaaagggtagctgttttcggtatagatattctttgaactttagattggagatgagatgatttggcgaccattacagtttgtatacaaaggaagtgtgtactcttttcctacactaagcatgtataatacttacatctgatgctattcttccaaattctatacacatgaatatgtgatttcgctggcagctaatttgctgaggttttagcagctgtgcttgtttgttgtctaaatcgatgtgaagtttttctgtagcctaagccttttctggtctagggtctgttgtaaaactttctctccttcttaatacaaaacttggccggtttcttttgctggcccggcgaaaaagagaacatgtgatttctttgcttgcctccagtttgtgttgtgcatatacctctgttgtaagttatccttttattctgtgcttcgattgcatcccccggtgtataaagggtcaaatgatagttcatacaagtaaatatatatgattacatttataatatttagatccatgattacattgataattttacatgattacattacaatccatgattacattgatagtatttagatgaataatttttttcttgttttaaagtaaatataaaattttaatccactgtaatttaacttacaaactctagatccagcactagctgtgccagacaagaagttaaagccaaactccattccatggcaattcgtttgtcgtaatcgtagccatttcgacaaaaaaatgtctaaccataatttgttttggtcgattttgacacccagaaaccaaattcttgtggatgtcaatggcagaccgaactgtcactgtttcactatcgcaacaaccatattattaataatattatcatacgttatcacaaaaggtatccatctattacaccagaaaagtatgatctatccagtgagataggcttttggatggttactatataatctgcaactctgcacacacggccacaaacacaaaagctcaattcagaaaaagaaaattgaaaccatgcaaattctggcgaaagaaatttcatgtgtcctaataaacgcaacaaaaatccgagatgtctcttttaaaatttggccaggccaatgggagccacccgttgcatccgaccaaacaaggcttgaaagccaagtgctgaggaatgttgtaccctttgtgtccaactcatactatctcgaattaatctagtttttgttggttgattaatctgtaaaaaaaacttatctttgtgcagtttttattgtttttctttgttggtcatccactcgtcctttcctgcaccgcaaggaatatgaaagccaagtgatgaagcaaagcaaaactgacggtttgctcctaaacttgactgccaagccagaagcaacccaacgaatgaattctaggagtacaatttatgcgctaaaccttggctactatttaagctagaaattttttttaaaaaaactctcagcaaaggaagcattggagttacaatcgtagagtagttgatgcataactatacttacaatctgtaaaaattatagtgaatataattatacacatataattatacactcgtacagcaaaagtgcgactatggtgcgtatctgtattttctaaaaatcaaaaagttatatacttgcactcaatttgatataaaaaatgctagcatgaatgagttgccaacgcaccaaaacttttattcaacacccctatatttattataataattcatttgcaaaactataatatttaccgaaatagacattaaagatatagtacctgatcagtaacatgcctatttcatttattgtaggtagtgacgtagttttcggtgacaagctcacacatacgtaaaagctaagtttacaactcatcattctattttagattttcaacaaaccattaaaaaaatatgctatggatgatttatgaccattcctcaggtatcaaagaaatgttatatacatttatattttgaatgcctatttaacaaatacctaattaaaagatgaataacataactataaattccttaatatcataccaataatgtcaatattacatttctcgacgatcagtcacatatcaacaaatattctctcagtactttaaaagtataaaaacaaacaaaatgaccacaaaaccccatcggtcaccgacccttctccgaacaggaaaagaaatcggcttgcaacagcaaaaaaaaaccgacagccagccagtcaccgactctcaccggtggcagcatcgccaccaagaaccctatcctccgctggccatccgatctcgatcggacggccagcagctgccgcgctccagcgccgttccgatccgacggccgagatcccacgcgatcccatcccaccctcacatataaccgcggccgcatcacggattaatagcgagtttaatcacaagaagaagaagagagagaaaaaaagagagagaagaaatcacaccgcattagcagcagcaaaagatttcctcgtttcgcttcacgaatttttgttgccctcgcccaatccacagcgcgaggagagggagttctcgcggcgatttctcgtcgcccctctcggccgctgccgggatcgcagctcgcaaggttcgtgaccccttccgattttgtgttcattttcttttctttttttctcttttttggtgttgttcctgtgcgggaattggggaggaaaaggggaggggagaaggggtggagccgcggtgaaattttggggggtggtgattgatatgctctactgtttgctttggtcccgattgaccagttcaaatgttcttgctttggtcggtgctcgggtttgatttgacgcttggtttagatcgtcttggtgcgcgtggtctggtatcgtcgtggcgctgttcttgcgcctcttgtgttgtgattgctgttgtttttctttttggggggaatcgcttggttggagttcgtagtttgttagagttgctgttttgggggtggtgtatttctcttatttttgtttggtttgttcgatttccgggcgggatagttgttctgattttgctgcaatctgccgcaaaatcgctgttgctgaggtgatggatggtccgtgcggttatttcgatcggcctatgtgatccattgcgagttttgttcttgtaatagatcgatagacccgtatgctccggatgtaatgcttccgatttccacaacctaaattgcgttaagtagtgatctatatagggcaatagtcaaaacaatttattgattcacgaatccttgttcatagcatatttcagatttcgcattgcaatctgttgtgattttagcaatgttataaactaggatacgtttttttctgtgtaatctgcattagaccttgtagaagttgaaaaaaaaattgtattgtgattcatcccgtaatccactttgctagattattgattattactgttctttttttttgtttgtgccagttttggaaaggaaacaggttgatgaagttggtcaaagggagcaaggtggaggtgttgcaggaagcggaggtgcccctaggttcttggaggggtgctgagattgtattaggcaatgggcagagcttctatgtgagatatgatccttctccagttgactcttgcgccgctgtcgagagggtgcagagaaggttgataaggccttgcccccctcgagacgattcagtatgctgggctgtgggcgacatccttgaggcctttgatagctactcatggaagattgctgagatggtgagagtgcttggcaaggatttctatctcgtcaggctcctcggatcttcgctggagctgagaacacatgcgtcggaacttcggttgaggaagcattggaaagatggcaaatggactgttcttcagaaggtaatggtccattccttcaaattcatgatatggaattattcatgattagttttttttactgaaaagtagaataagctactttatttccttaagttgaataaatcagctggcagattgccactgtcttatcttcagcaaatctgttattgaaaattcgattttaatgtatcgataaaacatcctaatgacttgtctccaattgatttcaggattctacaaagtgcttcggtggttcattcagaggtcaaccaaaatctggaaatcttggaagcaattttggcaagcaaaggcagccatattgtgcaatggacaacaatcttctactgaagaaccaaaaagctttggagggtgataagtctagaggcatgaagagaaaatcatctgctattacacacccaacccagtgcagtgaagtgactagaggcatgaagagattacagacaccccatagagatggaaggcacgcagcgctggttgctggagtttctcctcgtttggctgaaaaggtagatgctgttgattccccatgcttaatgctgggtgaaaaatacatgcatgcttccttaaataagagaaaaaatggtgttcatacaactaacttggctggggtaaatgtggatactgaaaataaattccgtcctttaacaagtgcttatcctagtgacaccgagagtatctcatcctctgttggtagttgtagtccaagcagtagtccctgtagttcacgacacttttactcagcctaccaaactggtgatatctgtagtagaactgatggtgctgaagctgccgtatctgaaagagaaacatctcaacatgataagattataccaaaggaagatacccatttgctggagttgcatgcttatcgtgcaacaatgttggcattgtatgtttgtgggtcaattagctgggagcaggaggctttgttgactaatctaaggcttacactgaacatatcaactgatgaacatctagctgagttgaggagtatggtttcctcggctattacttctagatagcagttgtagttacttgcttggtgacttttatgacatctttgttgtcttgaaatcattgtaagttgggaaatcccattaagtatgaggtatttgagtagttgatgttctgtattacctgttaaaagagttacctagtcagatcatttttgtaccatagaccttccaagaaacatgaaattttgctacattttctcaaacaattactgttcttcacttattcacactgaagtttgtagctttacattgcttatatgttgcttgtgatcatctgattgaattttacagtactatgatcaaactctgctttcatttcagtggtacaatatgaaagtgaggtctacgttagtgaagtccagttgtatatatttgagcctttatgctgccaatgattttacttacccgggctacttgatccattgtttttttattattcaacattgttagatgtcatgaacatttgtgcaggacctatcatggtgagaaccccattattaagaaaaaaactgttgagcagcgagtaatattcgtatgttatgttcagatgccattttcttgtctagatagttaactgaccttacaaattgcaaatgcatctttgtactcgggaaattaccactcaaggattgttcttggcaaagtctgcaatgagaaaagttggaaaatggaaatctgatacttatcatgaattttccagggccgaagtcggaggcttgtaaagcatccttctgtaggtccatgtcgatggaggagtctgccacatggtttgctgtatgttaaatgtggcaacattccatcgaacttctgttggtaccttgtttgtttttgttattccttttgctttagtattatcttttctgctgccttttcttgtgattggccactaaatttctcgagaacattatgaagtgcataatttccataagtttacaccacattcatagaaaataaacaaaagtacatggtaggcacatctggatcaattaccactaaaaaaaggaagatgaacttattttcatattgacatattttgatatatttttttctctttagaatgtgaggcaactgagaggagtacctgcagattttgcatgacatggtaaatagtgtttacaattggtaagtttaaatttgtaggtcagtaatgataatacaattataaacatcgtagttctaaccatgtgatttttaacacctatttgcaatatgcacattaccctttgttaccaaaaacagaaattacagagggatcttcaatctgaatatgacctgcaaagactttgtaagaggccttatttcaaggtatatatggtgactactgaattaatgtatgcaccatggcattgttgatcactgaggcatctagctggcttgttgaattccatcacaagtcactccttagtgcatgacttattatagttgactcacatggttgcttagtgttgtttgaatgagttttaccatctaatatttctacatatggatgcacaaatattgtattagacatatggatgcttcccacagtgctctatcgttgtttcatgatatcctaggaagctcaatttctatgttcagaagagtgtgatgctgaattgtttttgcttaggagagagtgtgcagtcagctcaactttcctatgcagataagttgtttgcagtatgaaaagcagggaaaatttccaaaagattactggtggtgtcactttgtcaacaacaactacttgtgttactggtggtcaataccctcaagaactcacgtgagtttgctaagttgaggacctgcaactgacttccaatttaaacagaagttaaggtaggcaggcgcaccttgcaattcgcagcagcaagtcaggtgaggatgcaccatattgtttgcctcacctgtactcgtatctgcaaaatataatttacctcttttaatgttcatctggaaaattactctttaattcagatgcttcacaaggactcaggaggttctcacgcaaaacgtgtgtcatggtgtttgtgtgtcaatcattatttgtttttaattgcaagcatttcaagtggcttgtttggcagcaaagtgttacaatttattagagtacaattaattatgtcctgaattaatgatcaaagtacgagacacgcactgaaaaaggctagagagttcttggccgtcttctgttctgtgattgtggcatcttgcatgcagctggtatactttgatggctcctagctgcaattctttaagttgtagtacagtgtaatatgccattacttgttccggatgtactgaaagatgtaaagttgctagatctgcattgctacgaataatttgttcaggttgcacgcatttgacaagttcccttttcagaagaagcattatatggtgcacctggtgttttcagatgagcaagtgagaaacctccgttgaagccaactgcaagcaaagaatatatggaacatgtcctttgtctcattagtttgtattaaaccgatggtgatgcattccttttaattccataaaaatatatgatgtgtttgttattgaactgtgtaataatacagacaaatgtctgttcaaataaagagtcactcttttattctctcacttgtggataatactgcatatcaaagttttaggcaggtctgatagcccacccggattgggccatcaggcctaatggtagcgcaactgggctgttcattgctttagtttttaccttttaggaaaaagtacattgaaaggcctcttgtcaccgcattacaaaatcgtccttacgacgcatgtgggcccccacataagcctcatcatttttttagttactatttagtgaaactgacgtgtgggtctaacttttttttttattttttttcggatcaaatcgctacttaagcgccacatcggatggagactagtcaattgagccacataggcgccacgttagttaaaaccagggataataccaccaaggaacctaattcgcactggttctgtaagttgatggatgcgttatattcggttttgcggtttaaggacgattttgtaattcggtgacaagataagggacctccggtgtactttttgctactttttactgctgaaattatcctgtcgatatcgattggattgaaaattcagaattaggccctgaatacatcatattccagcattctaattgttctcaaatgaatgtttttttctatgttttttatgtggcatcttccaattctttggcgacgtgtatccttctagatacttccaaaaacatactacctacatccctcaatgtttgcgaaggttcatctcgttctgacatagtggtgaaatctgaaactctgtcatcaggtttgaagttttgaactcaccgagtgatttcagaggctttttcttagaggaagtttgtaaagcatggtcttcgttggttagatcgcctccaaaatttcccagtcataatctttagactattaatagaaaaaaaatatttgtgtttctacagaatattttcgcctcgtgaagcacatgagaaagagggccaataatgttccatttctgaagaatggcaagtttcttcaaacaaaaaaaaaaaacttctttccggttaagtgatgatgatctagttgacgcattggttcagagaaaataccgtgtgttgtttgatgtgctctgcattgggtatcaacatcatgaaacggaatcatccacagaagcagagcagagaatcagagagtacaaacggatcatcaggcgacgcagacactttcaggtttccactcaaggcaagcaacatgtactacaatgttctccatttccgcataaaaaagtccaaaaacgatttcaaggacagcagaggccggccatccatcctgtcctggcaagattctgcaagaaagaatcaatgaagccaagccaagccactgcttttatcagcttatggggctcgtggattctccacgccaaggtgttcgagcaaatgccccaacgaacgaggctctggggccatgcccatgccaggcgggcgcgcgacagcagctcgaccggcgaccggctggccttcccccccggggaccagcggcgacggcgacggcgagacgacgacccaccctgcaatcgatgcctccccctgtacgccgctgccgcgaccagctcaacgaacactggcagtcagccactgctgctgctgctgctgctgtcgctgtagtgaatgtttatgctgcatttgcagtgcatgggcatgagagatggagccatggctgacgacgacgatgatcctgagcactggaacaaaagcgtaccagacgctgcctctgcctgcattgatgctgcgagatcgatgatgcagtgatccagtatgctctgccaccaccactgcatgattgtgtgtgggctgatcagctgatgcttggttgcattacatgctagttaagttgcatacttttgccgggccggccaagaaaggccaaccaaatttacctaagattgaaaaatatatacaaatatacaaagttataacttcaacgagaagctgtcgaactaatggaagttgtcaccggagcaacttcccaaaagcaaaagattacactaaaagactactctcctatatttatgaaaatcccagcttctttccaaatcgccacttcctttttgattgaaccaaataggaaaccggctgagcgccgctggttctgaaacacacgcgcattcaaatgatcgtcatcattcaaatgatcgtatcaaagagcaatactttccgtttatccaaagcaaattaaaacgtgagaaatgctcaagggtcttccagttagtttcataaggtgatgggctagccgacctgagttagaagtctcatcatttctatttatttgatattacagtagatcattccctaatattcacgtttttagcaaattaaaacgtgatatggcatttgacaagtaaacgcagccaaatggcaagcaaagctaagctacttcctactacgtatctactactaggctgagatgccaacaacgagcagcaactggaccaaactcgtgctgagatgatctgctgcgtgtagctttcgtcgccacactcacaatgacaggttatactcgcccatttttgagcagttgcttctgtttcctagtccttatctctcgtcatgtcggtcatttgatgatggctgcgttggatatagcccaagaacatgtctagtgtaggctgtgacacttggcatctctcacctatagctagccattagattaatgatgattagtaattgccttaatttcagtgttagttttgggcttttggcacctttggtacactattatatctctcactactgaagttctactttgagatttgtactccctccatactcataaaaaaagtcgtttatgacaatatttaagtcaaaccttaaaaatataaatcattaataactctcaagttgttgagtttgaaaatgtaaaaattatatgtatagatttgtcttgaaaaatactttcataaaagtatacatatatcacttttcaataaatatttttatataaacaagaagtcaaagttgtgttttggagaccgtgttgctgttctaaacgactttctttacgagtatggagggagtaagttgttagtagtaagtagtaagtttacgatgaagatggctagctactgacaatgcaggttagttgcagtactgctcatctgtaacagagtagttccattgaaaattaatcagaagtttttgagtttctccatgctccgatcttgtgtagtaactcagtaactcactgtacatagtgcatgacttggattagctcagaatataatacatgccctctcattaatttcttgtcaagacacagcatgtgttctttagggacagattagcaagaatctatagcaactgaaggcactagctagcctaccaagctagggtagtaataaacaacttagttagcatacagatgtgcatttaatcaattaagcaaggttagtactagctttctaattgtgcatgtgccctattaactgcatcttgtatcacaagtcctagttgcatgtgctgcattagttaagacttgaaagtaaaactttatccatgaggaatcaaataatggtactcagggcttattcagtttgttgcctaatcaacctattaaaatttggcacatttggtttccttaccaagtttgagtagtgttttttaagagagaacttttggaactaccaaattttagtatggtagtaagagtatgtttcatttgttaccctactaaaatttggtagagttgaaaatggcaacaaactaaacatgcccttacatgtagtttatacaagagttactgtgtcacactctccttcaatgctcaagaaagtgcatggtacaacactccatgaggtctcggattcatccgtatcatccacaattgtaggcatgtgcatatgatggtgtatatgcatacatgtctaccttacaatacaattaaaaagaatataaaagctacgatcgatcttagttttgtcggttaatccatgccagctagcttgatctaagcacattttagtattttggcgccaatatttactagttctagtctcattatattttggagatgcattcatgtcatgtgctgatcatgcagcagagtgtcagttaagtagtgctaaccaaattgtccttggtcttcatgtgctaattaagcttagcttaacctctccagccatcatctatttcatcattaactatagcttccctagtggataattgaggtgacacctgtctattacatccctaatgattgcatcattggtttgtttcactgatgattgcgttggaattcagcagtcagaagcaagcgatgatgcgtaagacaaccaactccttaattgcacatgatgctgtgccacatttttctcataagagtcatactcatgatgctgcaggatgatgatgatcagcaggcacaagggcatggagaacgatgcttgagaagcactagtttagtacaagatttttgtcttgtcttcagttatagctcaatccagcttcaaagatgtgtgagtgcaacatcatactgtgatacaattcaaggggttctgcatgctgttttttttttgttgttgttttttcattcagtctagttttcagagttgtgcagtactactgctgtttattcatgagagttaggtctaccactgttcctgctttatgttcttgtcgtgttcaatgcaaacctaaaaagaaattaggagcggaattgtgaccagcgaacaagaatttcaatcatgcaacgttagcatcaatcatattaactccactctgctgccttaggctgatctctcaaacaaacaaacaaacaaacaagatgtgtccctagcataacattgcttgttggctggtgatgatgcagatattgcttgagacatcaggatcagatggtgagcactgaacaaagaggataagtgctgctggtgcctgcctgcaaggagccaaagggacctcttgcttcctacctgccaatcacttcttccctagctctctctcaatactttggatctgaagcatcaaaacaatctagctcattgtctgaacagcagcacatcaaaactgcacctgctactacactactactccatttgttactacttcacacctgtctctacaaaggtaaacatgccatgttttggccataaatttgctgttccttaaagcaaaggtgagaagtagtaggctaccaatcctaggaaaatgagatgaacactttcagactactgttcagatcaaaccaaggttcatggacctaaaacccattgatctactacatgatgcttattaattaattaatactcgaggaattgagaacaaaataatgcactgcagaaattgagccacatgggctcctctcccccctctattttatgcataggaacaactgtttgcagagacttgcagcaattactgcacacatgtaggaaacaacaaagaatatatcccgttttctactgtaccacatgcctctccagggggaccagaattaaaatcacacatgacaaagaacacaattgcccatctcatgcatcccatcttcatcctcatctcatgacacaccttggctagctgctgcactggaacgaaacggcttctgaagttctcttgctgtgctgcctgcatttgcagcaagtcacattccattgcagaggatgcttttgcatgggctttgtcagatgatcaagaagaggttttcaaggctgcaatgctcctgcccatcaattgttgatgctctgatggaccagtgattttttttcccctcaactctgaagactggaccagtaaggatgtctgcacttgtttacatatggatgtaactgagtggcttctatacttcaccggctgggtgtagataatgacggccactgctatcttgggaccgttcatcttttagcaacctacgtatcgacggaaaagtagccatcctgttgctagatgcagctatcttcctaggttaaggtcccttaatagtaattaaataatgcacatacaccctgtgttttcaattattaacagtgtgtaattccctgtattccatttatagtgtgcttttagaagtacatgccaagcatctataaatcatatacttcctccgtttcacaatgtaagactttctagcattgcccatattcatataaatgttaatgaatccagacatatatatgcgtttagattcattaacatctatatgaaaatatgggtaatgctagaaagtcttatattatgaaacggagagagtactgcacatccaatttacaaatacttgtcatttttaacacgaacgatatcaaacttttaaattttttaactataaataaattttgaaatatttaatttagccaaatgtagtactataatgaaattatacatttgttgatattttctaaatatatatagcaatagaaatagtggtcaaagttattttttacattgtctaaaacgataagtatttataaaattaacaacaagtttttctttaaccatgtatatatatatatatatatatatatatattcactataactaagaattggtcaggagcttcaatttgatatccatagaaaccgagagagataatcttgcttcactttaagatttaaaccctcatggatagagaattaaatttgaaaatatattggtcattcatttttctctcagaaatatctgagatgcaatttagttggtagaaacataccaccgatatcgttgaactgttgcacgaaaatgatgagggcgtgacaatgtgggtggtctcgcgtggcgacagagcgagggtagaatactagatgcctgggaccacgttactattgtttatttctcctccttcatattgacatttttttttgtttctaccaataaatgatgagctacaaaagaattttttttatcacaagtgattactctttttttttccattttaaagagtggcattcgatgtccaatgtcttaatcgaagtatggatgtcagaataaatagaataatgataaatggaaaaaagagaaaaatcctttaattgtataaggggcggatgtagccaagtggattgtgaatccaccatgtgcgggttcacttcccatcgttcgctcatcccaatattgcaaatcctaaaatgcagttttccatattcctagttacgtatttaaaccagcgagaccgatcagcatgccaattcaaatggactaattagttaattgctaatcactaattaatcaatttccaaaacgctgtcgcttttggtctcgcacctcgccacgcgagatcgaccacgtcgtcacgctctcgtcatttttacataacggttcagcgatatctgactatatttctatcaactaaatcgcatctagatatttctgagaaaaaaaaatgaatgagcagtttcaaatttaattccatggatgtgtaatctccccatacggggaagcaacctgtctaaaagataggtaatctccccctttccacctttccagaagcggtgagtggtagttcttgtttggtgtagaccacgtcctttgacaagtgcagcttaaactaaagccagagatgttaccctcacgcactcaccatcaaagagaacacacttgcaagatctttgcgcctaaaaacatggacacacatacacacatatcataatcaaccttgcaatattacggcgcctaaacatcaacggtttgtcacaccaaaacgcatgagatattccatcgcgcgtgcactagattatttctgcgtggtgcagcaccataaaaactgatcaattctttttccctttctctgatcgtgtccagtttcatctttctgaaacgtactttgaccgcaccagctgctgggacagtgactcacgagtggcacgactcgagagtagctgacagagccaagcaatattgatttcgataccgttgacgtcgttgcatatgcaaatagtacgtcttcttgacatgtcttttgacgtcctgtttcattggttttgctgtcgcgtgttagtaaacagaaacctccaaacgtgtgtaaaaatttctcgcccccgataacacggtaaagcttccatccatgtaaaaaatcaaccaaggaaagagtaaatttttgttctctctgcatggcaggaataattgttactactggtaactgtatattgtgcaatggtgggtccataattttttttttaaagcctggacaacggtcactataaccattgtcgggaagtacctatacatctttcgaaaaatttttatgacacagatttttaatctttgaattaaaatccgatagatataataaaaagcaaaaagcaattaagaaacaccataatggacactaaattaccatatcctcaagaaaaagaccaaatccaatacaaaatttaaaatttacatgcgaagattcaaaaattatagtgtaacttacaaaagttacagtgtaagtttcataaattacactgtaacttacaagaaaatgcactgtaaatttgagtgagaaaatcgagtgagagataagaaaaaatctttcgagtgagatatagcaaaatcgctattgtcgatattgatagatactggtgacacgatatgtctggccttttaatccgcacaggtaattaagcccagacggctaccgtctctatttttaaataaaccaaaacgatttatttgaaaatataaattaatttttaggtaaaattttatatgtgttcatatcgacttaaatgccaatactaaaagaaaactatattgaaaatatcttaaaattaactttaaaattaagattgaaaatttaaattttaacttttgctttgatttattagtgcaaccaataggctcttattgtccaccctgttgaagagagcagaaggtactactacaaaattccatggcaccatgtaacagaacattttttagatcaaacaccatccaaaaacattgggaagtgcatatgtgaaattgttaaagaacatgctaatgcttttcttttgataaagttcctaaaaactgtgatatgcaccacctttcttcccctttggtgatcgataataattaataagctgctaaataaggttaagatgtggtttaggtaagcagccatgctggacttttagggtttggaggagaggaccttgcggctggcggttgagaacttgagatcgatggtagtgatcagctcgtggttagcagttgaggtggtagtgcgagaaaaaaaatagtaggagagacaactacggggaaggagaagaaaggtgaggaaacatatcatatgcttcgttaatgttgaagtaggcaattgccgggtgcaaaggaaacaacatgtacattaacatgtagaagtgtagtgtcgatccaaaaatatataggattgaatgtacgtatctttggacacaacgttggtatttcattaatatagaattaggtgattatagccattggaactatgataataccaaattattttcccaaaaaagtatgatatatccattctcatctgtcggtgtacatctagctgaggtttttcattgcccactacgtatatgtacacatgccgacacgtcaccgtgctgatggaacccaactgtttgacgaaaaaattgaacacaccggcctgggagatctgcttagctccagtgcaggtccaaatatgatgagatgcgggcgtgccagtcaatttgatcctgcaactgacgagatatgcaaatattagatcaaaatagccaatcggctgacaagccgatggagtagttccagccgatacccgatgccgatactagccgatagcgatagggtttaagcaatcggctatatgtcaaatgtagataatgatataaaggcaatcggctgatgatgatgtaatatagtaatataatccagtagaaaccaatcggctaacaatatgatatagtagaacaagtattgatccgaaggttaaagcacccatcagctggaggtccgatgtcatgaaatccacaagattagattaaacaatgaaacatttgttgtcatcggctaaatccaacttatatgtatatgcaatccttatgagccgatgcaacgtccagataactcaccggctgaaaccccgatgaaacccttattggcaatcaataagcaggttagagattatggttctaagcatgact

SEQ ID NO: 24237 - DNA, 8098 bp, Oryza sativa
gcccgatttggcggtgtcgtccgtcgcgctacgctagcttgcgtgcggcgcgcgcgcggccacccaccacacgtcgcgtcgaccggtcgatctacgcctgcgcgcgcgtcgtctcgtctcccgtcgcgtcgcgtcgcgtccgcgctgagctgagctgggggggccgcgcgctgctgtctcgttacgccatcattcatatgcgtcgtcgtctggcgcgcgcctgatctgaccggaaaggctgccgttttgcctgacgtgccggccggccggtccgcgcggtccgtgacttcctccgatcccttgatcacagcccgtggattttgcccgtcacggcagggggaacgtacgtgtcatcatcggcctcctcgtcgatcgatcatccaaaccacaactccacgacggcctacgtaacatcgatcctctcgtttcgttacctgcgctctccttttccgaccgagatataactttccacgaaaagaaaacgagctttctctacatggagttcaactaccctactactactactactactagactagtatgattacatgctgaattgctagtgcttctagtagcaacataattaatccaagctaaggaaccatttgaatagaagaatagaaaaacactggtttattacaaagtattgtaaaatacagaaaaacacagaaataatcatttgattaatttaacctttttttcgcgaacgcgtaaaagattgcacgtcaatatatttgaagaaaaagagtttaagttacatgagccaatcagccagaccagcctattctaggggaagggagaaaaagcaaatgaaaaaaaaaactgaagcttagggagactacggcggctaaaaacagactccaagcagggggaaggggccaagccacgctagactcccaacaaatccccaaaagcggcgacgccagctaaagaccacagatggcccttagagtggatggactccagaaccactgagaccgaagagagagcggagtcgaaaaccctagagttccgctccttccacagatgcaaagagaccagacgcaccagggagtcgaagttgtcgcggaggtgctcaggtaagcaggccctggaggacggccaccagtcctagaaccagctgccacggtggggagagagggcagcccagctaggaggcgacaacacccgaaaccagacctgccgagcgaacacgcagtcgaggaggatgtggttcgccgtctcaagatcctgagcgcaaaaggggcaggccgagtgactatcgatgccacgcttctggaggagatcagccgtccagcagagctgctggaaagcaaaccaaagaaatgacctgaatttggcaggaccctttgcattccagagaagatcagcatatgcaaaggaatgctggccatagaagaatgcatggtatgccgaatgcgctgagtagcgctggtcagccgtccaacgttaaatgagatgatccttgacacccggcgagagctgtacatgaagcaccgcatcccaaataaggagaaattgggagatgaccgggatagtgagggcaccgcggatatcagagacccaagagttgttgctaggccagaagcaactgtgcgcgaacctcggagacactggggaacgacgaagaggagatctagagccaaggacgccaccgagcggccgtcgatccgttggtcagaccagaagagcatagactcaccatttcccagcaaaaagaaggtggatgccatgaacatgtcggagacggtttgctcgactggggccttcaggccatcccaataggggtgccctgagcactggagccagagccagcgaacatgcaggtcaaaccctgccaatctgaggttagggatccccaacccaccacaagttttggggcgacaacgttcgtctaggacacccgacactgcccaccatgagccgagtccgtacctgtccacaggaaggcgcgacacttcttgtaaaaggccttaataacccagactggaaggccgatcgccatagatacatggaccggaatggaggagagaactgtctggaccagcacagaatggccagccagagtgtaagtcgtcccttccaaggcaggagtcgatgggagactttatccacaagcggttgcaagctggccgccttcggcaacttgcgaacggacaacggaatgctgaagtaggtgcaagggaaatcagaaaccgcgtagggaaagcaggactgaaccaactccaggtcctcagccgagcaacggatcggggtgatcgaacatttggcaaagttggtgcgtagcctggacgcggcaccaaaaacataaagaataccctggatgaactcgagatcctgatgaatcggggagaagaagaggaccagatcatcagcatagagggaggcgcggtgttgcaaggcccgatcattaagcggaaggaaaccaccggagtcggaggcgtggcggagcatcgcattgagtacatccataaccagaatgaagagcatgggagagagaggatccccttatctcggaaagtcaaaaatctaacgagagtccctaaagcacaaacatttccctaaatgtttgggctttctagctattgatgaaatcaaaacctcattggtcaataagatatgctgcagctgctgctgctactagtaccagtaccatgtgaagaggagctactccagcaggcttcggttacagattctactcgatcgatgaatgaatagattgtcaacacaacaaccacaccgaccagacgctagaaaggagaggagcacaaggctggaataccgtgtacaaccaattaatcaaatctcgatctctcccttcctctctctctctatgttttcttttttgtatgttttttccaaatggaattctcctttgctgtgaagtgccgggtgtcccgaatcaaaataatcacacccctgtacacaacacacacatacaggtacatgcattgatcgatacatacaccagaatccacgcgaaggagaagagaacaaatggaagcaaccgagcagtggatgtgtggggctactgctactaccctactactgtctctcttcttctcttctgagagtttctgacccatcaaatccctaaaagttgtgctctgatcgtaccactagtctgttagcgagggcattttcggaatccggccctgcccctgccacgggcagagccttttgttagttgtctcttggccttttcctgtgtcactatgcacacaacggacaggggctttcctgtcttttcctagctagcaatactagtactcctacctagtaatagtagctaattggacggctgagattggcgcggccggaagatcaacggcgcgccgtactgcgggtggagcagcatcagcacggtgggggcgtgcacgtaggtgggcgagagcgcgaggtcgaagcgctggaggaggacggccatggtgagcttggcctcgaggatggcgaggctctggccgatgcacatgcgggagcccagcccgaacgggatgaaggcgagcgggtgcttcgccgcgcgcgccgcgccgctggcgaacctcgccgggttgaactgggccgcgtcgggcccccacaaccgggcgtcgtggtggatcgccatgatcgggacgagcagctccgtgtcgcgcgggatatggatgcctccggcgtcgccgtcgccaccgccgccgagggtgacgtcgaacttggcgcggcggatggtggccaccgccggcgggtacaggcgcagcgtctcgttgaggatcatcccgagctggaagaagatgacagcgagaaccaacaaggtgagacttttgtcggcgtggaattacgggaatacccccactgggccatggatatggtttggtgtgcgtaccgtcttgagcttggggaggtggtccttggtggggagctcgccggcggcatcgccgcagacggcgaggacctcgcggcgggcgcggtcctgccagtccgggtgcatggcgagcagcacggtggcccaggtgagcaggttggtggtcgtctgcttgccggcgaagaagaaggtcttgcactcctccaccatgtcctccaccggcatcgtcctgtccacgccggcattgatcatgagccccagcaagtcgttgaagccgctgtcctgcttgtctttgagctcggtggtggtctcgtcttcctcgccgccgtcgccgccactgcgccggccgatgagccggaccaggccgcgcctgatctccctgtccaggccccacgacatcctgttcttcttggtcggcaggaacctgttcgatcgaattccggcgccaaccgtgagcccaatttcggcgagaatggcgaatcgtttgggagttttttgggttgttcgtggcgtgtaccgtacctgtatcccgggacgagcaccttgcggaaggcctcggaggcgaacgccatgaggcgggcctgcaagcggaacacgacgcggccggagtcgtagctgcggccgaacgtggcgcgcgtgatggcctcctccgccaccgcctggaaccactccgccacgtccacctccacctcgccgccgccggcgcacgccatggcgcgccacctctccgccagcgccgccaccgacctgccgacgtgcggcaccagccgctgcaagagagagacagagacagagcacgtgtcagccatcgtcgtcgtcgtcatcgcgggtgcgccccgatcgatcggaggatgaagaaacagaggagagactcacgttgaggttgtcggggtagaagccgggggtgaggacgcggcggtggtgagcccacttgtcgccgtggaggctgacgagcccgtcgccctccagctgccggaccacggggtgcgcctcgtagcggtcgaacgcctcggcgcgcgtgaggaagatctcccgcaccatctccggctccgccaccgtgagccgcggtgtcggcccgaaccaaatcaagaacgtcggccctgcaaccgcgacgaccgccattaatccatctgatcagacacgagcaagcacacaaaatccatccgtcctcaacataccgtagatcttcctccagtagtggtagaacgcgagcaccctggggagcgcgttgtgcggcgcggcgggcggcatgggcttcgcggtggcctccgccatgagcgccaccatctccctcacgcacccgacgaggaaccggtacggcgggccgcgcaccccctgccccgcgaagtgcgcctccagccgcctcggccgccaccacaccgcgtccgccaccctcgccgccacgtgcagcagcagcagcaccgccgccgccacggccaccgcctccatcatctcctcccctgtttcttgaaacagagcacacaaacgcagagagatcaggtcgccgccggtggttgcgccggtgagtggtggcggcggttgggttgggggtttggattcgaaatgggaaggcgaggatggcgggaggaggcgggggttatatagcgaagcggggcggcggaggtggggcccaccggcccagcacgatgatctgttggtggtggctgcttggtaaattcagatgggatggagagagaaaggggggaggcgtcaacgaggtaggtgaagtgtgagaaaaccgccttcagttcagctgaccgagcttgggggtgctgacgtggcattttcattctcttttttgtagaacaacattttcattcgttgcagttgggaaaaatgagaggaggggagtgaaggcaaggcttttgcttgcgtgtgctgcttactcttgagtgatcgaaagtttgtgatgtactctctcagccccaaataaacccaaataaacgcaggcataagtttttttttcaactttgatcatctgttttatttaatttttttataataatattttttattgctattagattataaaatataaataacattttatatgtgattatattttttagtgttttcaaaagaaaaatttaaataagacgaacgattaaagttggataaaaaactcatggctgcacttattttgggacggagggagtacttattatatgtgtctactatgtacttatgtcagctttatagtatttagtgcaaaaaaaattatattctaaaatttaaactggtttatctggtttttaatgtttaacattgtttattgactattcattatattgaaaaaattacgtgattattatttatttttgttgtgatttattttaataagatctatacttttgcatattacataattttttaataagataaatagatattttttaatgccaacagtcaacatcttcaaatattaaaaaccggatgaggttttttttttattatgtgaaagaatacatacatcgctattcgcacacacccgcggatacatcttctatcatctgctaaataaatgaaggtcagcacctctcgtctctcaatttctattgaaaaagcagctgcttccttagtaagtaaaaaataaaactactgcaccagagctatacaaagagagactaatcagctacaattaggaatggtgttaatacggttttcactgtaaccatgagaaacacgttccactgtttagtgcttgaatatatatatattggaaattgttttggatgttaatgtggtagggtagttcagaccagaccacaaaacttagtatgacccagcttgtccctgcctgtttacgcaggtcagaacacggtttgagcaggccgcttaatttgggatgtcttcctcctacctacatgtcctgatatgatgtggtttcttcaagatgcccaatgattgattcttcacctgctaataataattattaactctttgaagttgtgtgttgattgaaaacacccgatcgaataaatcttttgcttatttaaattatggatagcgctgtaccgagtccagtgattaggcatcacacttccattattagaaaaaaatctcaggtgctaattaaattctaaacattgtcccagtttggtcaacatctatggtaaattgattcatatgagctcatataactgagcgtatgcgcagatttggtagagtcgtatgtgtatgatttcactcgacaggttctaaaaatattaaagacaacaaattggttgtgttcattcctaattagcgcaaagacacaaagtttatacttgtattaaattatctgaaaaaaaacaaggtttcaaaattcaaatgataagtaggaactgtctgatactactagtatgcattttcttttcgcttgtgcatttaatcaactaattgttgtgctagtactttgcaaagtgacctgcatgcaaggacaaggagctctcaacaaagagtgacccaatataaatgtgacgtgcagcactcatttaatttttgtgcgagtacgtccagctttatttttatcgatcaaaattaaatctacgtcaaaaaatagctttcaaacttttttgtaggaaagaagctaggcattattattttctgcagaagacaaacagatcttcaccatcaaaaaggtcagagatgtcgacaagcaatccttacatacgagcccacatttttccacttcaccataccgtccaagtcacgctaagatcgagcattggagattttggtttcttacgcccccaaaaaccggacgagcaaacgtaagcatcaacaaacctcttaaaattaattacttctcgatgaaaacttatcgcccactactcacttttgctgtgaattaaatgtgcatctgttcatgtgtccaaagcaacatgtttttgagggagttcgttgaatcgatcgatcgattatatgtgggcaggttttaagaaaggattaaatgtgaaggccagtacagagaatgattcgattttcagtttggacaggtaatggccgttgcaggtagaagctgactagccatcgacgaggcaggcagagccacatgcagctcgagctggcgaggcaaccgtcgcatgcatgttcgttctaatagcttccatccgcttcgtatacaaattttgacaatttgaccctttgtaaaaactatttttataaataaatcgtcgccaaaacttattttaaaactgacccttttgttcagcgtcaaatcgtgtggcgctgaacttgcgttggcacgctgacttaacctcccatccgtggtggcacggc

SEQ ID NO: 24238 - DNA, 2706 bp, Oryza sativa
ctgcatcaacaaattactaaattagatgcaaaatcatctctaattaaagggacttactatgtttcagttgattggttatatatgagttggtttagagactagagatgtctataacaagggtaattttaatatctctgagaaggtactaagaggtaccatatttctatggtaaatttaatacttctaggtattaagtaaggtactaaaattttgatatctcaactgtaaaattccccctatataacaattaaaaaagaaaaaaaaatatccaaatactcctctaaactttagatagaaatacttctacaccctaaactttaaaatcagatctttgcaaaaccattcatattactccctaaggtggttttgtatagttatttttatctaatttttatataaattggatgagtttgatcacatggcatacatattggacacacatgtgtgtgtatgtgtatgtatgtaggtacaatggtacatacgtatgtagacagctctattaaatggagaggcaagtaacattagaatttagaaattaccagtcaagcgaaagtgatttaccgttttgtagttaagcccagcgggaatggtacaccttgagaggtcagccggagtgaggccgtcgttgttggcaagatccaagcaaaccctgcgattccgcagcaggtagcagaacacgttgaggacaccgctcgcgaccgccaggtgcagcgcggtgttgccgtcgtcgtcctgcgcgttgaggatgggcgtcgccagctgagagccgtcccgcctccgcctgtcgtcggtggcgaatcccacgatctcctccctcccccggtcgacggcgacgtggaggaaggtcctcccgcgggcgtcgcggaggccggcgcactccgggcacctgtggaggaggagggccacgagcttgaggtttcccatggacgcggcgacgtgtatggggtactcgccgttgctgtccggccggcaggctaaggacgggtcggctttcaggagaacttgagtcgatgtccggcggcggcggcggccattgcgcgagcacggccatcgcaaggcgagccgccggaggagtgagctcttctcgagctcgatctctggtccctccgctgaggctgcgaaatggagcgctgtgctgccggatgcgtcggcttcgccggagagaccatcgttccattgcagcatcttttctgtcatttctttataatttacaaagcaaagcttaagataaaccaatatacaacacggtagctatcaaactattgctcagcactgttttttttttaaaaaaaggcataattttaaactgtgatgttttaagaataatttttaagtgtgatcttagcaatcgtaaaggagtgtttattcatcagttgattgaattttcataaactgccattaggaatgaaaacgtacggctcggatactgtgaaagctacctctactatatttgctttcatctttttatttaaaaaccgaaacgaatactctaaaatccagatatgaaaacgaaaccaatcggaatgcatatggtcaccaatatttatcggatcaccataaaagcttcatatgatgggcctccgaaatcaacggagaaatattacttcttgcatatcaaagaatggatcaatttttttaaaaagtactcgattttgctatagatttgtcatgtgattttttttctctcagatttgtcgtttttaggccgttccatatgtgccaagatccgtgcgtatatgttgggctgggaacccgcatagggttcagttgggtcgcgtgtaacagcgtcggatggttagagtcactattttatttttattttttgctctgaaaaatcgacatgcatgatgctctctctcctctctcatttgaaattaaaataaaaataaaatacaaaattacagtactatataactaaaattacatttgtaaattcagttgatatgacatgtaagtgcactacaattttgataacaatgttgtgtaagtgaatatctatttgttattttctttaaaatataagattacagttctatataattaaaattacatttgtaaattcagttgatatatatgtaagtgcattgtaattttgataacaatgttgtgtaagtaaatatctatttgttattttctttaaaatataaaattacaatactatataactacaattacatttgtaaattcagttaatatgacatgttagtgcattgtaattttgataaaattgttgtgtaagtaaatactccctccgtcccaaaatataaggaattttcagtttttgcttgaaacgtttgaccactcgtcttattcaaatttcttttgcaaatataaaaaacgaaaagctgtgcttaaagtattatagataataaagtaagtcacaaataaaataattaataaattcaaaattttttgaataagacgggtggtcaaacgttgccatcaaaaactcaaaatcccttatattatgggatggagggagtatgtattttttttttatttttctttgtagtccgttggatgtaaatctaagggtagaaaaatctggatgatttttttagaaatcacccgacaaatggataggcaatcccaatagtactatctccattccaaattgatttacattagagatggcaatttccccgacggggacccgcccctacaaggacggggtcggggctatatttggccccacaggtgcatcgg

SEQ ID NO: 24239 - DNA, 4453 bp, Oryza sativa
cttggtcggtacgttgcagatcagatccatttcaagttgggagtgaagtgcttcaacgttgctgacctaggtgtatttcagtcaaaaagagatgcaaagatgataaaatgaatttaaaatgaaagaaataatgaaaatggcaaagtggtgaagtgtactcaattgagaatagtattctagcgaaacccatttgaatgatgatatttttgcgaaaccagttttataccatggtacatatgcaattttctccttttccttatctcgtcttatctaccccagccatacatagtcacggagccacccatccagatcgagtcaatgacctttcaaaagaaaataaaaagaaagatagagtcaattagtagcgactgcatcggcgctaccgcagtcgttgcaagcgatagtgactccgcacggctgctgcgcctcgtcagctccctgcaaggctgcgcctcgtcagcccaggccggctgctgcaccttcgtctcggccgcgggtcaccggccgctgcactttcgctgcatctccggctgctgcaactccgccgcgtgtcgccggctgttgtgccttcgtcgcatgtcgtcggctgcttcgcctttgtcttcgtcgcgcgtagccggcttctgcacctccgccaaatctccgcgacactggcctcctcgataagccaccgcatcttggctgctacagttctggtttgtcctctttctctacagcttgcggggccccggtcggggtcggtggcggggaagcttttcacacgaagatggtaccggggccagggacgggggataaagtcgggggttaggggcaggaccgttcctgtccaacccagtcccaccccgccccattgccatccctaatctacatatagttttttttttgttattcctaaatgatctatatatttgtgtttattcattaagtctatttgttatttgtgcattggaataaatagacattgatgtatgcatctatgcacgcaagtatttataatccacatgcaatatcttgatttgctattggctagaaaatagcgagaatggtgcatgcatcgagtttgttgctagagtaaatatagtatgagagagatattagctttttttggtcttggtatacctatgaaatatgtagatcaatttgatagagggagtagcaacttgctatagttttttcgcaattcacttccttaattattcacatgtatattctttattggaaaaaagaggttaaaaataaataaactatattttcccttctttcttatgcacagcctccccattttatcttcctagtgttggtgtaccactctctagacatggctcagggaaaagctggtcaatagtttagaaactcctcaattttgtattagtattcttactacgagtaaacaaagctgatgcatctttttggtgttaatcactaatgtcggtatcctaaagttacttactccctccgtcttataattataatatagcaatctagtactggatgtgacacttcataatataacgaatttaaagtacagtaaacatgtctggattcgttatactatgaagtgtctcgtccggtattatgttacaatattatgggacagggggagtacttccatggcgatattaaataagcacgcagcttgttaagttaagcatacctatttttgtgattaaattaagcatataatcagtttgctagctgagagattgctttgtttttttttttctaaattgaatgcttacatccagttagatacattaattagattataactaattaaattattgttcttagtgacattttaaaagattatgaactatttctttctataatctataaattaactataaaaataggagagaaacaaactttgcatccaattattggttgtttgttgaatcagtaatgattattaaagttatagtcatagtttcaactacaactcaccctgatttgtgctttacatagaaagaaagggaatccagagtaattttgtcatttttcaaaaaaaaagctaacactactcttgagtgacgtggatggcatagatgaacgaaaattctgtttgatggcatatacatgaactgctaatttacgatggcatataagaaaacctgtgaactttaggtggcatatgaggaattttctaaaaaaaaaagtgtaggagtacgtacctgcaccgcgtaggacagcagcgtgcagggcagtttggccggccggtcctgcatacgagagctcgtccccttgctgatgcagagcctctgcgatgtggtcgtggcccagtgagaccgccaggtacaacggcgacatcccgtcgccgccgggaagacgggcaagccggggatgcaccgaaatcagatggtcgacgagctgcttgtcgccgagcctgaccgcgtcgtgcagggccgtctcccgccggccgttctgcctctccatcacttcggccaccctgcccgcgctgccggcgagctcctcctccctggccatgtcgaggaggcacctgaccatcgccgcgttgcccgccctggcggcgcagtgcagcgtcgtgtcgcccctcgcgttggggcggtccaggaggcgcgcggcgtggctgtagatggtgcgcgcgcagcgcagggacccttcgccgtcgccggaggccgcccccacgtgtagcgcggagtctccctgtggtgtcgtcgccgcgtccaggaggagcggcgattgttgcccggaaccgacgtcgatggcaacttgcttgtttggcgttccggcggcggcggcggcggcgcccaaaagtaaagccttaagccccgggcagttgccgcggcctggggctttgaacagcttgggatccatcatatcatcactaccgggcctgatgaatcaaacttgggatttaaacccgtttgggattttgcaactacttacaattaacatttcagatggttagtcagatgctgccatcgacgtgctgaagcggttagcactagttgactaattaaacatggttatgcacagcactatgcactcatgcgtgtgcaaaaaaccatggacgtacgaacccgcgcgcgatcaccacctgtcttgcattgcatcccgtgtgccgagtgcgaccggaaactctttatgcggcactacctctaattttaaatgtacaatgttgctaccgctttaacgtacctagtatggtttactattcattattcaaaaaagattatataaatataagtgctacaatgataagcagtctctaaatatcttgtacaattaaaatatgtcacgtcaacatcaacatagatggtactttcatgatcgtttaatatgatagataatataatgtacgtctaggagtcaaagtggcatatacaaatagattaaaggataaacacgaattacccattagacaatagcagtcaaccggattatcccctaaccggaaggccagacatcattcgcccctaactatataaatcggacaaataacccctcaccccctcctcccgacggttaatccgcgatgattttggttctaaatactattagaacaatcgttggggtccactgttagatctctcccctccacctctctgcaccaccagcgcaaccaccaccaccacacgccgcggctgtcgatgatgccgccccgtctcccaccatcccctcctcctcatcctcacccaccaccggagattaccccactggagaagccgacaccgcggatgacgagggccgcccctacatctcttcacgagacgaccttccatgccgagctgagctcctcctcagcctccggcgccagcgcatacatgaggagagtcgtagtctccgcggtgccaacgagggaggcgaaggtcgctcgggcggccagcgacggaggcggaggtgcgtggcacattgcttgggcagctggcggcagaagaggtcgctcgggcggccagcggtggaagcggaggtcgcgcgggtgccgatggggggaggcggaggttgcttgggcattgacgacggagataggggcgcgtcgccatccctggcttcggcacccccagttggctccgcccttgcctgccgccatcctcggctcccccttcgttgcctagacccaactgcattcgctcaccgtcattctctgatggaggtgaggggagggagaagagagagaggggaccggggaaagggatagagtagagagatagagacgaatgagaaactgataggtggggccctccaatttttttaaagaaattctgattggactatcacacatatgccacgtaggactaaaaccaccgcggattgagctagggttatttgtcaggtttgcatagttggggggtgaaggatgtctggttttcgagttaaatagagtaattcatactgtcgcgatgttcaggcgggtaattcgtactttttccaaaatgaaaagggtaagttttactccctccatcctaaaatagccgcttagcgctagtgattt

SEQ ID NO: 24240 - DNA, 2539 bp, Oryza sativa
cttgaagctccggcgagaaacgtgagcacacgctcccccatcgacggtggcaatggtggccccaggctcttggaaacctaggtcatcatcgccgtcatcgatgtcctcgtcgggggccttctgcttggcctcacttcgccgattaccggaaggaaccgccggggatttgccctctcggcgctcctgcctcctctcctcctcccacttcctcgtccgctcagccaaacttttgactgcacggcagtccgcaaggtcgtgaagggaagtgttgtggacggtgcaccacttgccggttgggcgctccctgttgggagcgccggcctcgttctttttgcctcccgcaggcctcccctttcgggtggcccgcgaagcgccctcgacggcgaggacatgaccctcgtcgtcggtatgggctgacctcttcttcctcctcctgtcacgccgccctatctgagcggcggatccgggggcggccgaagctgccacaccggaaccggaggggttccaggtccatgcctcctccttacgagccactcggtccgcgagctgaaaaagctccgcggtagtttggggctccttggaggcgatcttttcaagcatgcggttgtgccgcacaccccccctgaacgcgtaaatcaccgcgtgcgcagggatgcatggtatggtgttgcggacttgacagaccgctgaatgtacagcgaagtgactcatcatcccttcgctgtactgcgtgcaagtccgcttcctcacctgggcgcggatatgtgccttgaaagttcatggtgaactgttggcacaaatcctcccaagagtggacaaacgcgggtggcaagttcattagccaaccccgcgcttgtcctttcagggccatgggaaagaaattcgccatgaccctgtcgtcaccccgggcggcctcgatcccggtcgtgtagacctggagaaactcggcggggttgacgctcccgtcatatttttcggcgatggtgggccggaaccttgggggccaacggacattccgaaggctcgccacaaaggctctacagccgacaccaccaactgggggcacggagggctgatccccgcgtccgtggtgaggtgacactccggacgaggaggcgccctccgttgcgtggggagcacgtcggccattacgccggcgctcgatactgatgcgagcatccggttccccacgcagatctttccgggtcggaggcgttgacgaaagagtggcggccgaatggcgaacagcggctgccgctcgccgcgccctccgtcttgacgatgcggagccggtggtagcagcaccagaggccttggtggcggaggaccgcccaccagcatctaggcgctgccgtgcagtcatgaccaatttggccacatcgtccagccaacgttgggctggagactccgggtcatgggcgacgggcgggtgacgtaggagcgcgcccgcagcttggagcgcgccctggggcgtgctgccgtcgccgtagacgaggaggcgacgctccccatctcgccgcccttctccacctcctgtgggtgtcgaagtcacggatccttcggccctctcgagcgccttctcccgcctaggactttggcgtggagggggcggtggagtacgagctcgacggcgtgggtttggctccccgtcgtcaccgctcatactcggggagaggtcgtgcgcctttgctggctcggccattgggctgaacaggaaaagcttggcgcacacgaaagagtgcgagagctcagaaaatccctcgcagagccccctacctggcgcgccagatgacggagcgtggggctcctcaccgggagaccgcgcaggcccccctttgccggttcggccgggggccctgggtgaggttctaagctcttggtctgtggaaagttcgcgagagtgaaatcacacaagacacgggcgatgtatacaggttcgggccgctgagaagcgtaataccctactcctgtgttttgggagatctgtgtatgaaggagctacaaagtatcagccagcctctcccttgttttgggtttctaatctggaaaagtccaatcccccctctcagtgggcaaggtcctccttttatatcttaaggggataccacatgcaccatttctctctttttttgtggggacttacccccccttttcataaatggacggagatttgtatagttgccgtccgagtcaccttctgatgagacggcccacaactacctccactttcgccgggagcaggtgcgacgtggaatcgtggctgtctgctgacgacatgaccagtatcagactagtcacgtcggtcattcttgtccaccacgtgtcagcttagcaatctacatgctcgcccttcttcacacaacatcttgcctataatggtttaggatgaagcctggcatatatctgaccaggactaacgtgccatctctgggaggtaacacgctagctccagctggggacgagcgcctagaagccctcgtcctgacgggatggggcgaggcgtgcatcagatcgcctgtcgccacctaacccacgatct

SEQ ID NO: 24241 - DNA, 1429 bp, Oryza sativa
ggcaagagtacaaaggcactgaggaaggatctgtttccttcctttcgccattattccccttgtcttcgccgcttgcgccctaactccttctttcctgtgccctaccttcgccacacgcgctcgctcttaatcttctcttcctccggcgccatggcacggggttccgctctgctcgatggtagcgtgctgccgccttcccggatcgtgagcgagaggcaggctgggctgtcgcgccgcttcatgccggaatctgccaccggccgggagatagtcacgctgggcgagggacgcccggcgccacactacccggggcggtccgtcttctttctcccctttgcaatggcagggctggttccaccattttcttctttcttcatggatgttctggagttctacgatctccagatggcgcacctcacccccaacgcggtgatgaccttggccatcttcgcgcatctgtgcgagatgttcattggggtgcgcccatctcttcggctgttccggtggttcttcactgtgcagtcggtgtcgccgccatcggtagtcggtggctgctacttccagccacgggggccggtgctgaaccgctacatcccctgcgccctccgcaagaagtgggacgactggaagagcgactggttctacactcccctcgccgacgaagcgcgcctccgacttccgagccagcccccggcgcaggcctccagctggcgggtgccggtagatctgggggatggctatgacgccgtcctcgaccgcctggcgggcctgcgatcccaggggctcacaggggccatggtgtacggcgactacctccgtcgtcggattgcaccgctccagcgacgcgctcggggcgcctgggagtacaccgggtccgaagacttcacgaggacccaccagggagtgagatgggactgggctcctgaggacttcaagatattggttcaatgggtgctgaatctcaactccgtagaggcggccctcattccccaaggaatcctccccctctgcagcgatccagaccgcgcctccatcctgaccattatgatggcggtcggggcctcagaggagcgagctccaaagggccacgacggcgcaggcgggagccgcaggggggaacaatctaccccgagagggggtcgtgcttcttggtcccgcgacaggggcccggggagcagccgccctgccgacgcccgggggaagaggaagcagggaggaacacctcccccatctcctccccgagggggcggggcggcgcgtgccagtaacaggcgcccggagggggccgcgccaacatcgcagcccgagggggagcgcaagaagaagcggccccgtaagatgggggagacagaaccatctcggggaaacctcatttcccctccaaagtggtcgtttaaccgaccccctcgcaggttcgtctctcacccat

SEQ ID NO: 24242 - DNA, 721 bp, Oryza sativa
tatgaaaggaaaagaacatatgggatgtcatctaaagaaatcgatttatggactaaagcaagcatcaaggcagtggtatctaaagtttgaccaaatcataagacaatttggttttaaagaaaataaaaaggatgactgtatatacactaagtttaaggagagtaagttcatcttcctaatattatatgtcgatgacatactcttagccagtaatgataaaaatatgctactggaaacaaagaaatttctggcctctaagtttgaaatgaaagatctcggtgaagccaattatgtgttgggtatagagatttaccgaggcagatcaaatggtgttttggggctatctcagaaagcatatatagaaaaggtactgaaaaagtataatatgcataattgttcagcctcgcctgctcctataatgaagggtgataagtatggaaaattccaatgtcctaagaatgagtatgaagctgcgcagatgaagtcaatatcatatgcttcagctgtcggaagcataatgtatgcacaagtgtgcactcgccctgatttagcttttgttaccgggatgcttggcagatatcaatctaatccaggtctagaacactggcaattagctaagaagaccttgcgttatcttcaaggcactaaagacctcatgctcacatatagaaagtctgaaaaccttgaagttgttggttattcggactccgatcttgcaggg

SEQ ID NO: 24243 - DNA, 551 bp, Oryza sativa
ccagagcttgaggtattctcggattgcctgaactccaagtgccccgctgatgtctctgatccatgctttattgagcagggcttccgcgggcgtcctgcgtttgcggattcgaacaggaacatgttcgaagatggaaggcgcaatggctggtatacctccctcctgcatccagcaatcctcccagaagaggatacttcttccatcccccagttggcacatgtttgaaagatagcctacttattgctcagtgatcctgagtactagctagcatgcaccttacttgtaaaatgaatagcacatacagaattgtgctcaaagacaatgacttgataattaccttattctgtgttctgtgatagccttgatttatctttatcattcatattatgtagcctcaaacacttggacccctataggctgtacaatgcgtttgaaaattcctttgcatttcattcagtgcatcaataccaggtgggatcgcataatagaagcctgtaaggcaggcgattagctatggcatgttcttccttatttagtactacaatcctaaa

SEQ ID NO: 24244 - DNA, 1808 bp, Oryza sativa
gctgttcttggggttcttgttactaagagtggagctgctgattttcaagaacaaccagcttgcgttcctttctcctgtggacatcttgaaggtatcaggtaccctttccgtttacaaggtgatccacttggctgtggtgatgaagcttatgagctagtctgtagagatggcagagctatattcacatcaacacaggaaaatattttgtgaaagacatctcctataacgagtctagattttgggttgtgatgctaatttagacaacagcagttgccctcttccactgtggaataatcttccctacttcaatgacatgggcactaagctgtacacttctgcagttcggtgggctacatttctaaattgctcacgggcgataaacaatggcatgtacatgcctgttgcttgcttgagtgggaatacttcttttgtttatgtcttgactacatcgagctcttactatgttcaaaacatcgagccttcttgtggatacttggctgtgattcctgtggatgatcgtacaaagaatgtaccagactatgcaagctatgcagatgttgtgaaattcatgaggaatggttttcctgtttcgtttcctcgagttgaatccccaagtcattctccagtcatcaaagcctgtgcgagagatacattccagtgagttttagctctgtatctttctcttgcttgtttgatcatcttataaaaaatatatatatcctcttttgcaattctgcagaaactttaaggagcaaatgtatagtaggaacattcaaaactggacttctgccattattgggaccgagctacaatttttaggatgtgtaattaattattactctagtgccacgcaagtttgggttactctcgttctggtatttgccgtagagattgttaagtgcattataggtactccagatatgccttaatctaaactattataattacacccaatttatccatagattcttattcacttcatgttgcagtactatgcaggttcatcttggcgccgttgactgttttgaccttcctcggttacaaataccccggaacaaggatatctatcgacgcagtagagaagtttctccgaatgcagcaagctcatggtccaaagaggtatgcgtacacagaaatcactgcaatcacaggccatttcagggagaagctaggccaggggggctatggttctgtgtacaaaggtttccttcctggcgatggtcatgttgctatcaagatgctgagcaactccatgtgcaatggagaagaattcatcagcgaggtttccaccattagcaggatacaccatgtgaatgtggtgcgccttgttggattttgctcggaggaacttaggagggctcttgtatatgagtacatgccctgtggatctctagacaagtacattttctcacccgagaagagtctatcttgggacaagctcaatgagattgctctaggaattgctagagggatcgactacttgcatcatggttgtgatatgcagatcatgcactttgacatcaagccacacaacatccttctggatagcaacttcactccaaaagtcgccgactttgggctggccaagctatacccaagggacgacagcttggtgccggtgagtgctgcacggggaacgatagggtacatcgctcctgagatgatatctcgaagctttggcaccatttcatgcaaggctgatgtttacagctttgggatgttattgctggacattgctggtggtaggaggaacagggagcagcatacatccaactcagcccatctttattcccaagctttggtgtatg

SEQ ID NO: 24245 - DNA, 10342 bp, Oryza sativa
  unsure (1)..(10342): unsure at all n locations
tttggtgtggatgatcacatctctgagatggatgattgctgcaattcttcatcaaagtcaagtgcaatctcagaggatgactgaagcaaactaggatagcgacttgacattcctgcccacgtatatattcagttcgtgccctgctttttgcctcatctttttgcgggttatttgtttcgctttttttcatctatccctgtatatatcttgctataattttctcctgctctattaatatatacaaggcaaagcttttgccttcctttaaaaaaaatatatattcagttcgtgcttatacaacaggggatgtttcttgactcttgtagaggtaagaggttaatatgaagattagtaggactaagaagaattcctcgttgatattttcaggttgctagatttttcatcagtacacgaccctgattgtactgcataaaaaggaagtaataatataggagttttgattgatggactttgacctgaccagaaatttggtctagtttgaggacatctttgttacaacacatgtgcttccatggaatttgagttctggagactggtggcatgttttgtgtagatttagatgcttttttttagcaggtggatgctactttttagggtgaccagtgaaaacctcaggacgtttaactccttgccacttttaagatgtggcaaatagttaattattccaaaaacgtctgccataattttctacagccacgtaatcccattctgggccacaagcgagtgagaaccccttccggtccaaccaaagcccgtaaagcacaattcatcaggcccataattaaacctgcactatctggggaatgctgggccgttgtgcagttttcatgggcctcaacaatctcccttttcaattcttttcggcccaaagtaatgtgcaggcaccacacgcagcccaccaaaagctcgccatggtactgtggcaggtaaaaactgggcctaagggtttgggccttcatcaggaccgtgcaaacggaattttttttatttatacttttttttattaaaatatttacaaaaataattttttgtttcgaaaatttacaaatctaattgcctgccgcccttaagaagggcgatttttaaaaatcgccctctcaaagggcggcaagggacctaaatacaaaatttttatttgtgttcaaacccttcccaccggttttaattacttaaaaactaataatgcttattcgatactccaaatgattttaaatggaaaagtgataaactacaaagttatagatctcatcaagatctacaacttttatataaagtttatctccatccaatatcgtttgaaatatagatctgagattttttaaaatgtgttttatattttgtaacgaatatttggatatctaaaacatcttaaatgaaaaagttactaactacaaagttgtagatctccttgagctctacaattttgatataaagttttatttcatctgactttatataatataattttaaattgtaaaattatagagctaacaagttatgctggaaaatttacatttaggtcccttgccgccctgtggaagggcgatttttaaaaatcgcccttcttgagggcggcaggcgattagatttgtaaattttcgaaacaaaaaattatttttgtaaatattttaataaaaaaaagtataaataaaaaaaattcgtgcaaacgttggccgagcggcacagtgagcgagtcgctgtcaaactgaaccgccggccatcttctcgcgtgccggcctccgtcgctcgccggagtataaccacagcatctacaaccataatcctccacatgaatagaaaagcagtatctaaggcacgtttttaattctgcctgcccttattgtagccttgaataccattctttggttcgtagcaatctcgctcatcaaacttaagtgcgagcaatactgctcactgacatgtgggccccacagaccctcggggcccacatgtcagtgagcagcagaggatctggattgcttgacgatactagaaaacatccatgttgctccaagaccttgagaaatgatcgacatcacaaaatttggacgtcccaatcacaacgtcgcggcgaaggagacattttggctcccattgtgggcgacatgtcaagcgtccgtgcctcgactacgaaattaattaagaaattcttgatgaccaaaattactggcacatgaaaacgagagtaaattaagaagcaaaacagtcactactcgtaacatggtataggtggttgaccgtaggccgtcgagcttgttcaacatgtagaccatggatacggtcatggcctcttcttatccatcgttcaactcaagcagcaggtagctttggcactatatatacgacgtgaggctttggttttaattattattaagtgaaaacagcatgcggtcagtggttttggcaccatatatagaacatagtgaccactatacatcgggaaaacaaaacaaagttttggtgaatggagagcagcatactactagaacatattgaccattatatatactatgctcaaatttgtactaattggtttgacatagtttttcaattataggtggtgagctttgtaatttaaaggttataattccatgtgtctaaacatggtatgctttcattatttcaacttgaagtgtagcatctactccttctgtcccattttaagtacaaccatggttttccacgcccaactttgatcgtctgtcttatttaaaaatttttgaaaaaaaaaataaaaatataagccacgagtaaagtactattcatattttatcatctcgtaacaacaaaaatactaattataaaaaaaaaattaaataagacggacgataaaaattgagcgtggnnnnnatgattgcacttaaaatgggacggatggaaatagtaaatactaaacaaaaatactaagtagaagactgagaccgagacagtgcatttagagatgctgatgagctgagaaacctgatcagttggacgaggtaaacaagtggtggatatgaggtgaggctgaaatcatgctatgactttagtggctagagtcagccggatcaacctgttaattctgtcaaaaaaaaagaagaagagagagacgtgttaattacagctaaaaaactttctaatccaaaggcaaccgaaccatgaatccatgacacaaatggcggcagtgtctacttgttgcactcaccatctcctacctctactcctcctcgctgccatagtcgccaccaccaccaccaaccacgccgccgccgccgccacgttgaacatcaccaacctatgccccttcaccgtgtggccggccgccgtgccggtgggcggcggcaggcggctcgacccgggcacgtcgtgggcgctcgacgtgcccgccggcgccgccccgggccgcgtgtgggcgcgcacgggctgcaccttcgacgccaccggcgccaacgggacgtgcctgacgggcgactgcggcggcgcgctgtcgtgcacgggctacggcgagccgccgcagacgctcgccgagttctcgctcggccaggccgacggccaggacctcttcgacatctccctcgtcgacggcttcaacgtgcccatggacttcctcccggcgccgccgccggatcagtcaccgccgtgcagcaaggggccacggtgtccggccaacgtcacggcacagtgccccggcgagctcagagctcatggaggctgcaacagcgcgtgcagagtgttcaagcaggacaaatactgctgcactggcaacgggacgaacacctgcgaacccaccacctactcgctgccatttgtgaggatgtgcccggacgcctatagctactccaggaacgatgcatccagcccagggttcacttgcccgtcaggtacaaattaccagatcatcttctgccccccaattgatctcacatcttcatctcctgcatcaattgctgttgctgcaaataacagacaaggaaaaaaggttattgccgggatcatcatagcttctgtaatcggctccacttcagtactcaccatggttatggcttacaccagcatcaagcgaagaacacgacggcgccgggagatacgtgaagaggagcaggagcttgaggagataacccttcaaggaatgccaaggaggttcacatttcagcagctacaggaagcaaccgatcagttcagagataagctcggtgaaggaggatttgggtcggttttcttgggacagattggagacgaaagagttgcggtgaaacgcctggatcgaaatggtcaggggatgagagaattcttggcagaggttcagacgatcggcagcatccaccatatcaatctggtgaggctgattggattctgtgcagagaaatcacagaggctcttggtttatgagcatatgcccaaaggttccttggacaggtggatctatcaccagcaaggtgctgctatttttcctagtgttcctcctctagattggcaaacacgatacaaaattattacccaagtagccaaaggtctctcataccttcatgaggagtgcacaaagagaattgctcacttggatgtaaaaccacaaaatatcctcctggatgacaaattcaatgctaaactctctgattttggactatgcaagctcattgatcgagataagagccaagtgattacaagaatgagaggcacacctggatatttagctcctgaatggctgacatcgcagatcacagaaaaggcagatgtctatagctttggcatagtagtcatggaaatcatcagcggaagaaagaatgttgacacttcccggtctgaacagagcatccatctaattaccttattgcaagaaaaggtgaagagtgatcaagttggtagatttgattgacaaagataataatgacatgcaagtacacgagcaagaagtaatagagatgatgaaatttgcaatgtggtgtttgcagatcgattgcaaaaggaggcctcaaatgtctgaggttgtaaaagcattggaaggcaccataagtatcgaaactaacatagttcatgattttgtcgcagtaaatccagtaagctttggttttactgcagttgtgggctcagctccacctcttgcctcagatctatccggacccaggtgactgacgcaattttgatggtatactagaacatgtgcgcttttgggtcagaaaaaggcatagcatatacgctgttgcattctcagaaaactataatgtgatagcatcataccttcaaatcatttacattttttaatattgcaattttcgttcaagaagaacatctcaatattgtttgattgtttctgttgaacttgccctattagcaaatctgatcctggttcatacatgtgaaaccaatagctcttcttacatatcaaaatggtcatagctctcatggcactttcaaccataattcagtagtactttctcatggcacaaatacaacttttatcgtatgcaaatgaatagcgtaccacaagatcacatttttctcgttccagctttatactctgttattccctaaaaaaaatcactttcaaattacaacaatgcgatgaaacatctgtttacaacaatatgtagcctcagttttacaacctacctaccaccttatctgagaaaaaacaacaaccaacttagtaccttgactttttggcatcaaagcacatgcataagcttcagccatcctcctctgagatttcagttagctcagaggagaaacggtaagaatccaccaacaggggcaggggttcatcatcgcagaagaatggcctggaaggcagctgcagaccatcaacatcaccttcaagcatttctatgacctcactcatcgttggacgatcaggaggcttcacctgaatgcaatgtagaccaacaacacacaacttcctttccagctcatgcatattcaaggtattggtgatctcacccatctcttgttgaatgagttgattatacaccaatgatggataatacacctgggttgagcttgacatgttctgcttagagttctttcgccctccagccatctctaacaaaagcattccaaagctgtaaacatcagatttgctagatatgacaccgaagcttcgagatatcatctcaggagcaatataacctactgttcctcgtgcagcgctaactggcacataattgttgtcccgtgggcatagtttggcgaggccaaaatcggcaacttttgggacgaaattgctatcaagaaggatgttgtgtggcttgatatcaaaatgtagaatctgcatatcacacccttgatgcaagtagtttattcctctagcaatgcccagtgcaatctcattgagcttgtcccaggagaagctcttttcaggtgcgaagatgaacttgtcgagagatccatggggcatgtactcgtacactagtgccctcctcatttcctctgcacaaaaccccaccagacgcacaacattgacatgatggatactaccgatggtggagacctcactgatgaactcttctccgttgcaattgtagttgtctagcatcttgatggcaacgtaaacatcacccgggagtatgacacccttgaatacagaaccgtaaccaccctgacctagcttgtctctgaaatggcttgtcattgcaatgatatctgtgtaggtgtacctcgtcgggccaagcatcaactgcattcgcagaaacttctcaactgcatcgattgtgatccttgttttccagtatctttgtgcaagaaaagtcaatagtgccagtggcgccaacacaaacctgcatatgactgcataaaaacatgtttagatacatgggaatgatgtgcttagagtgatgcagcggcatcaatcacatgtagcataacaacaagtttataaaaagcatgtgtattgtagagtaccatatatccactttactgtccacatgacaaattgtaggacaaatcctgaataaaatattcttttcccatgaagcatctccaccatatagagtggtgtctcaaaataatctgatgtttggctcgttttgccaattatgcatgcccaaaagatcaagtccataaaaacaatgtccgcaatccgatttttgacatgtgcagtagtggagaatggttcttcacgaaaaccactgcaaggccaatgacatggtagaaaaaaagtcttaacaacggtaccaagtatttacttaaaaaacgattatttatgggcaaaattaaactaagataccgaaactcaccgaattgaccggtttaggcactgcttgattagctcaaatgcagtcggatgatctaagacaaaaggaaagcgaacagagaatcccttcctcatcaactcagcaaaatattggtattttttaccactggcaggagtccaactaactggaatcatggccaagtatccgcaagaaggctcaagattttccataagagcgtaatatggtgcgacattcagcacatagacaaatgaagagctcgtgttctggcaatccacatgtatgtacttgttattgttcttcactgcctgcgaacaattgacaaaggtcgcccaccatattccctgaagagtcaattccctggtgtagcttggccctggaatcccccaaatgaaaggacgatgattggagcgaggaaaaaggcagttgctgtttgcattcctgcaggttggcgtccacgacccagaaggacgaatcgttgtagttgatgctagtgacatagtatgttcctgtattgatctggatggtggccttgccactgctacactctagctcatatgatgaaacaccgcacctgtgagggtcgcctctccgccagaaaggatgacttatgtttgagagatggccgcaggagaaaggctggcaccactgctgtccctggacaactcctgcgagaactgcaagtatagcaaagatgagtaaggcttgcattgtaatggtagtagagggggaagctggcagagttgctcagtccacaggctggttatagtagactagcagcttgctgcacctacatatataagaatagtttttttttggctgatacagtttggtcctatgcataagattcatagtaagggaccgaagtcagttcgtcaaagaaaaccttaaattgttatgttgacatggactgcatatcagcataagattcatataaagggacagggtaacaacacagaaggatgttgcacttacgtagcaacacctagttagactaagcctagtcaaatttggacttttacgtggtggcctgctatatatatcaccctggacccccttcattaacgatgagatactttaaccagcccccttgtaaataagcttttttttttggaacgaagcttataaataagctagggttgattattagatacacacacttgcagtatattgattgattaattgcatatgtttccaccttaattccctgtccatctctggccgtttcagtgcacaaagatgagtaaagtcattgcaacaacactcctcctctccgtcatcagccatggcgcctacccggccatgggttcagcttgggaggaggaagacttcgccagaaattgtccaccgtcctggtgcagtgacagtggaccagagatccggttccctcaccagcttgaatccagcaactcatcttcatcatcatcatgcagtgcttcatgcgcgaggctagcatgctctggtccagacaccatcctgcatcacccatttctggggccatgcaaggtaactgccatagattacaagaaagctgttttccagatcatcccgctcgtagactcattgtcttcatacccgcttcagaagctcatcatcgacaatctaccggaaccagattatcattccagtcgctgttcattatacaatgcccagcctgggaaaatagtatgctgttcaaaagtgctcacaccaagtatgtctccgaccaatgactatgatgggaatattgctgatcatgctgtcgtgggcccaatctcctgcctcagtgacccaagccacttctcatatttggggatgcttatgaaacattattcactccattggactgcaaggctgtctctaaaggcattgttccgatatccggtgcagtcaccgctgatggtccaacgttcaagcaactggcagaaagaatcctcaactttgctgagacaactgtaagttggtccgagggaggcattcctgacaattgtgtgcagtgtgaacagcaaggacaacgctgcgcattcagctcacaaaggaatcaaacattctgcatgggccacaaacctcatggtaccatcctaatcagataccaaaacattatatgacagcataagtgcataactcatgttttatttcctcatcatactttccttttaagttcgtgcacttaatttactaatgataatatgatatactactcctttagttcacagacacttccatgagatagctataaataggtattttgcaactcgcactacaaaccatttggctaggtagcttcaccttacaaagagtcatccctagaacttcagaacaagaagtgcattgatgaagcacctttgctgttgttataagtgcatgattacacccaccaataattaaatcttagtgcccacatcctagttagtatatgataaaacgggaactgcagttagatgtttggttgctttgatgaataatcagttcacactgcgagtgatttgtgaaaaaaaatcatgagccataacccttgatccactttattcaccttaaccaacctcaatctggcataacactcaatccccagagatgctttggagaaacagcttctaatgcattgatgaaaggaacaactgtctgttacatatatgttcacataatcacattaacattacatttattcccctaaaacgaaaacttctatcatatctattgctatattgaatcttactatgttttcataagtatatttctgtttcatctgttaaactattaacaatcttactatattgtttggtatttgcaggttcacgtgtcaaagtcattgcaggtactgcagtaattcaaagttcaaacctccgtttttttatcaaaagagaagaaaagaaacagagttatctgccacacgtatttttttcttgttggctgctctaactctacattcttctgtcaaaaagacactacattctcttatacccatcacaatcatttgctcaataggggatagctttctgtcctgatgcaatgtgctaattttctattctgtatctattcagcaacatcatcggtagctgcatttgttgttatttcattggtggtggccactgcaatctatctctccctgaagctaagttataatgaagaggtgcacttgaaggttgaaatgtttctaa

SEQ ID NO: 24246 - DNA, 2774 bp, Oryza sativa
atggcttagtaattttttgggacttatactttatccacatgatgcatagtaatgtaacgcctagatattgcataatatgtactttgatcattccactgtattagccatctgaggtgagttcaccatgtaacacagttaagcagaaaagcatcgcattgaactcaacctgcaacatagtggttcagtcgtggtgattaccttgttcagtcgttgctgtggtgtatctcctactgtactgtactcctagctgcactagtcagtcagatactcccattggccttttcatgggtcagtattctgatggatattttgcaagacaatgctgcaaggaaattgtaaatctagtgttatcaaatggatgcattaaattgggtttgagcacgctttatgtttaaaacaaatgaatagcaaagcaaagggatcaccattaccattgtctatttgtcaatgacaaatgccagtaagaagtttccttttgttgcatattcctcctatccatgcgccattgaaagagccagggcctgaatatgtgagggaaacgtgagaagacaacgctgtagggcagaaaatcaaccatgccatgatactaaagcatgtcgcaaaataaatacctccatcatcaaatgtcagggagggggaagcaatctgccgtggaaaccatcgccgggcgtcgtggtggcgtttctagagatccgcggcggagcgcggggtcggggcagggcgagctcaaccgctggatgcgctcagagccagggcagccacgcgcagtggcgctgggagcctggaagtcgggttgattttggcgccggcaccggcggcgccgccgccgtctgctggagcgccgccgcagcccgcaggtcgatggggaggggggaactgtggggactgggttcaagcccaacacactatcccgttcgggcccaagctcattcaatgttattccgtcctggcccatcacagaggcaaccttgctgaatccggcccacagctagacgtaggccgggcttaagttgacgcagatgagcagtagataaaatgcatacaaagatcgaaagtgagatgaactcaaggcattacgcaaatgggcgcgctgagttcctgtttcaaacccttcaaacataatcagcatgttttctggaagtggccccgacaaaaagaaattgctgagagcgacacatctatcagatatattggagagcaaattgttgcaagatatccaaatcaccacagaattactacaaaaaagttttaacacatcatgccggatagtccacaggtcgccgccggtcagggatcaacaacatcaactaggagatcgtcaccgacctgcactgcaccaggattgcaccatcgtcacctgcaacttttgggcagacaggtatgaaaatcatccataggtagtagaacaagtacggtatctcgtcaaactctcgtatataatttgttgtgacataattggatgatagaaatatacacgaccttaagagagagattccaacaccacacggtaacagttaaggtgaaagaaagagacattttgggcgccacactgttgacggcaggcatggttggcaagtcaaaaagggcgtcatagaacgctgaaaaagatgaggaaagcacgcaaccacgtagtaatcacaggatctatgatatgcttgcaggcaaatcaaaacaattgctaggtcgttgaccgaagaccgttgaacaattcaacacgcagaccatgtgaacttacacaacatactgatcgatctgctgtctccttcttccgctctacaaacggagtcaggcaatcgaatcacaacacaaatggcagcggggagtaccatcagtactagtcgccgcactcaccaccttgtgactctgctgctcctcgttgccgccagcaccaactacgccgccggagccacgctgaacatcaccaaccgatgctccttcaccgtgtggccggccgccgtgccggtgggtggcggcatgcggctcgacccaggcgagtcgtgggcgctcgacgtgcccgccaacagcggcgcagggcgtgtgtgggcgcgcacaggctgctcattcgatgccaatggcaacggatcgtgccagacgggagactgcggcggcgtgctcaagtgcaagaacagcggcaagccacctcagacgctcgctgagttcacggtggaccagaccagcgtacaggatttcttcgacatctccctcaccgacggcttcaacgtgcccatggacttcctccccgtgccggctccggagcagaggcacggagcaccaccgtgcagcaaggggccacgctgcccggccaacatcacgtcgcagtgccccagcgagctcaaggcgcctggaggctgcaacagcgcctgcaatgtgttcaagcaagacaaatactgctgcactggcaccactggcaccaaaacctgcgaacccaccaccttctcactgccattcgtcaggatgtgccctgacgcatatagctacagtttggatgacagctccagcactacattcacttgcccgtcagggacaaactaccagatcatcttctgccctccaactgatctcacgtcttcatctccggttcctcctcctgcacctattgctattgggccttcaggcttggattcctcatccaaaagaggaggaaggcttgttgccactatcgtggtctctgtgatcggctctacttcagtactcaccattatcatcgcttccatcattatcatcaaacgaagaatacgaagacaccaggagatgcaagaagaggaacaagagtt

SEQ ID NO: 24247 - DNA, 3875 bp, Oryza sativa
cttggatcaaagtggtcagggaatgagagaatttatggcagaggttcagacaatcggcagcattcaccatatcaatctagtgaggctgattggcttctgtgcagagaaatcacaaaggcttttggtttatgagcatatgcccaaaggatccttggacaggtggctctatcaccagcaaggttctcctgctcctgctctagattggtggacacgatacaagattattactcaagtagccaagggtctctcttatcttcatgaggagtgcatgatgagaattgctcacttagatgtaaaaccacaaaatatcctcctagacgacaacttcaatgctaaactttctgattttggtctatgcaagcttattgatcgagataagagtcaagtgattaccagaatgagaggcacacctggatatttagctccagaatggctgacatcgcagatcacagaaaaggcagatgtctatagctttggcatagtagtcatggaaatgatcagtgggagaaagaaccttgacacttccaggtctgaacagagtatccatctaattaccttactgcaagaaaaggtgaagggtgatcagttggcagatttgattgacaagcacagcaatgatatgcaagtacaccggcaagaaataattgagatgatgaaactcgcaatgtggtgtttgcagattgattgcaaaagaaggcctcaaatgtctgaggttgtcaaagttttggaaggcaccacaagtattgagactgacatagaccatgacttcgtcgcaacaaatccagtaagctttggtgttgctggaattgtggactccgacccccctgtagcatctaatttatcaggccccaggtgaatgaggtgattgtagtggcatgatatcttgcaatgatttaaattgttggatactgcagaacatattcgatcgacaatagatgagaactccaaagttcattttgttatgctttcctttttagcacgaaactgatcctggttgttatagatgaaccccataccatgctttaatttggtcgtagctcttctagagaaggacaacacgcattggaaacaaattgggaatttgggagactgattcatgcaaattgcatatttctatgcagattttcctactatgacttattagtaaccaggtggcttttagttcctctacaaaggtgattttcagatgcattaaattttcagtattttcctctggcatatagataatagtgatgtaaatatggttcctaagttgagaggtaacaaaattacagccttcaagaaaacccctgaaccaaacggaccctaaaactccacaaaatcaggtcaatgccgcgatggattgaatagtgatggtagcgtgaaaaacaaaatcaagcaggtaatattcagattcaagcagaactagtatgcagttgtggtaatatagagaggcacagtattatttagatgaagaaatcttactctacactagcggtcagaatacacttcgctttgaacaagccaactccacggcagcagatctcgaatagtgatagctcccggaggtgaccctcatcggagcaatccgatttgagatgtggcgtacctgcactcacgcagtggcgcatgggaacagtttcaccgccactctataagatcttcttcggcgggtcgattcagaccatttttccgccgccgccgccacctgcggccggatcaacggcggaggttgccatggtggacgacggagtggagagcgaagaagaggaagaggacgctcccgtacgcgtctcggcccacacgtaatccggcgcggctgcgtccataccggcccagaattagacctctcagttgggctttactgattcggcccacaagcttaggcacactgcatttgaggtgggctattactgtgggccttcattaagcgacgctactccactatcacaacgtacttataactgtcaaaaacacggcgatgagttagacgacgaaacctccaaaaaaaaatagtcagacgacgaaactgttcatcatgtcatagtacgagaaaagctgcctgctttggatgcgaaaaacgataccatttctacaaatttctgcacgcatgcataaaaacatcaaaaggcgacatcgcaagtcatcaacatactgaccacgctgtttgtctggctgatcgattagtcaaaacctaaccagcgcttgttctcatagtaagaatttttatttttttgttttttttttttttgcggggaagaatttttgtttgtttgacactggaactaactgatagtcagatttgcaccattgacaaattggattacagctcccagcgataatcggctgtcctaatcgtcacattttcagcaaaaacagctccatatcttgtaccatcgcccaattttcatacacagtaaatatgaaacggtgacatccccatcacaaatttaggacaaatcaaagatttttcagtcaaaagatgacccagttagtcaaggaaggcagctgcctcctgcccccatgcacacttacaacctccagacaaactccagaatgcagactctcaggttgcagtgatccgaatgccacgacaaagcagagagcaaaaaatttaagtactagcactttcagccataattcagtactactttctcatggtagaaaataattttttgtgataggaaacttaaatcgtataccacaagatcacgttttcttgctcatgctttatactctgttattccctagaacaagataacctccaaatttcaacaatgccaagagcacatatccctcagcgtttgtcaacttactgaccacctttcctatttggcatcaaagcacatgcacaagcttcactcatcctcctctgagatttcagttagttcagaggagaaacggcaagaatccactagcagtggcaggggttcatcatcgcagaagaatggccttgaaggcagctgcagaccaccaacatcaccttcaagcatttctatgacctcactcatcgttggacgatcatgagacttcatttgaatgcaatgtagaccaacaacacacaacttcttttccagctcatgcatattgaaggcattggcaatctcacccatcttttgttgaaccagctgattatacacccaagatggataatatgactggcttgagctcgacatgttctgcttagaattccttcgccctccagccatctccaacagaagcattccaaagctataaacatcagatttgctagatatgataccaaagctccgagatatcatctcaggagcaatataacctactgttcctcgtgcagcgctaactggcataaaactgttatcccgtgggtacagtttggcaaggccaaaatcggcaacttttgggacaaaattgctatcaagaaggatgttgtgcggcttgatatcaaaatgtagaatctgcatatcacacccctgatgtaagtagtttattcctctagcaatgcccaatgcgatctcattgagcttgtcccaagagagactcttgtcaggagagaagatgaacctgtcaagagatccatggggcatgtactcatacacaagtgcactcctcatttcctctgcacaataccccactagacgtactacattgacatgatggatactgccaatggtggatacctcgctgatgaattcttctccattacaattgtagttggatagcattttgatggcaacatggacatcaccaggcagtatcactcccttgaacacggagccatagccaccctggcccaacttgtctctaaaatggcttgtcattgcaatgatgtctgtgtaggcgtaccttgttggaccaagcatcagctgcatttgtaaaaacttctcaactgcgtcgatttttattctagttttcca

SEQ ID NO: 24248 - DNA, 1747 bp, Oryza sativa
ctaggaattttcttgaaatattagaaccatttgagaatatatatttatcaaacgattcattgggcatgaattcatatattaaagcccgtcgtgttccttcagagcaaaatcctaggagacggacgatgtttgcatggtgaattctcccaatggtcgcaacttcattgatgaactcttctccctctcctaaggagttctctagcatcttgactgccacaggaactccatttggtagctcacctttgtagacacttccaaatccaccatggcctaatttattcttgaaccgtcttgttattttcttaacatcggagaaagtgtacctcatgggcttggatgtgccatatgtcttgagaaacatttcaactttcaaatgtatctctttgttgtaccttgactttaaggagatgtagaatgcagtggccacaactaatgaaagaattacaaatgtggctacagatgatgtagctgattgaaaaataagaaagttagttagctgcatttggagatgacataattctgtaatttattttccagatgtgcctttattgtcaagataatcatggcatttcttatttggattagaaaatatatacactctctttgttgaaagttcataaattgggtggcatttaattgaaatttcatgcagaatggacaaaagattgagttatttccttacctgcaacaagagtgacccgcggtcctgcatgtagaaagaaagagaattagtattcccttgatttgtatataaaaaggatgtttttttaaaataaaagtaaaactgattccagatttttatatggcttgctgtatagaattttaaaacttgcatgggtatctatactcctttaaaaagattccaatggtggtggcagtgaattttccacccacctactcctattacaagttttacatattaccctttgaactttttaatattacataacaactaaatctaaatggatagccacatataaaattaatgtggatagcccacattttcctataggggaaatgtggataacatatttcatggaaaatatgatttatttatgttataaaatattgttatatttttccttttatccgcagcaaagcacgggcatttagctagtagtcataaaagggaataggatgggagggaggattcttatcttaaccaaccataaaaagagaaatgctttagtttaaattatttagaaggatggaatatctaatataatgatctcacagatcactgcagtctgcaaagcatgttctggattctactctgttagcacccaaaaaaaaaaggagatttggagggagagacgtccctccaaaaaatttttaagaagaaattgtgagcatactggggattgaacacgggacctcggggttgaaaccacataccccttatcactgcattatcaagtgagatctctactctgttggcaccatataatctctctgctcatagagtcatagtctatatgatactggtacattattgtttcctactgtagtaatattaactttcaacttgtcttataagttattggagttgtcacataaattcaggtccatcaaatggattgtacatatgtttttcttttcttttttttgtttttgctgaaatacagagaacagtgttatatcatactagcataatgtccgtgcattgcaacgggttttttctaattgtctagtatattattattgtgctaattttgctgccatttcgcaaagatgaaaaattccataa

SEQ ID NO: 24249 - DNA, 3541 bp, Oryza sativa
caccactaccatcttttatattagtatagataaacatttatgaatgttaatacttctatgtaacgttgtacagtttgtgaattttcattagtgcaccgtaatctgtgtacaacaaagcactattttgaacagttactttggtttgaagcgaaagaaaaagggaaaattattatttaattattttagacactgtcatctctttgcaggggcttctgttagaacattacggatgtgaacctagagttaaaatgttcatccaagctagcaatcaagtgattcacagtacaccttcacttttgttaaactgtttgattgcaaggtgaaaatattgcatcgagcttgaaatcactgtattagaatatagaagattggataactaacgtactgagaattggaaaaaaaatattgaatgctatttgaaaatgaaacaagtcaccataatgatatggggtttgtgcttcaaaaagagagagaaaaaataccatgacgccgacagaatgcttgaccactttgtgaactgaaaccacagggtcggccttcatattcacatcgttggcaaatactagtaatgttactagagtaccacatgaatactgtctcaccatcgttgatgactctatttgctgtttccttgaagtttgaggtgtcccagtttattctcccttttttatcataactatagggcattgggatgcctttagaaataactgtgcagtccaagggaagaacagacatgtatgtatagggatctgccaaataccagaactggttattatggccgaggcaagatattgggccaactatgtcgtattgatttgcaggtatgggatctcttgaacaaactacaagggtagctccctgcgattgaggaccttgaggtttgtacacagaagttgattggtttttcgacatgagcttctgaagtgggcagtgaggtgaggaatctacaggtgggatgacgttcatggtagcataactgtaacttatctcggttactttgcagggaccaagaactgggtgattgaggatggtgtcctgtccagagcatgacaagtgcatgccgggtgcgccgcatgatggaggttgtgtcgagagccggaaagggaacctgatctctggtccatgcttgctgcacctgtgtgatgagcaagtcttgaagaaatcttcatcatcccatgctgtggcggaagaggattcgtagttgagaagagagagtatgagtactgtgaagagaagttttggcaagtccatggagtgtaatggcgaggaaggcagatgaagagaaggccgtggctatagaaaaaggatcacctattgctatgatctccagtgaggatttatcctgtgtttgtcacgattgctgcgtctgtgagcaggaattccaactgccactgaaacttctgccgtgttgtattgcttagaaaggtatgtgagtatgtgaccttcggagaccgttcgtagattctacaacgtgtatatatttctgctagacgtgtaactacatgtaaaccagtagacgtgtactgcatatccaataaaccagtagacgtgtaactacatgaaactcatttatcttttgttgtcattggaactctcttttgttgtaactggaatcaactcgtgaagctaacttggtagagtaccatatgtatgatgtatccatacaaattgctctgttatacgatagtcgataaggcttgcctggggtagctgagtgactggtgatggtctggatgtaacctgtctacgttaataagtgcctccaagtcaacagcatcacagtcgtgtaggcccacggtgaatattttgtcgggatgactgaaggaggtcatccaatataattaagatggagagaaaaaagtttacaagaaagttgttcatcgacggttaactatcgaggagcccacagtgaatatattgctttagtattactcctacctcactctgtccaaataagttcatctctagcctctctcatgtcgtcttaaaataagttcatctctagccactctcattcatctccttctgcctccagcatggcgatcattattcctggttcgttccatcgctcaaccgccctgcgagtcatctctgtattgtttgtgcttgcagttgtcgtcccagatgcaggtgggcggcatcagcatcatcggcatgactgccttccgttcacctgcggccgtcttagcaacgtgtcgtctcctttccgccggcgaggtgacccatctggatgcggttttacatcctacgagctgacttgcaccgatgacaaggctacgattcagatctacgagggaacgtactctgtgacgggcatcaactacagtgattctaccttctgggttgtcgatgccaacatctcggattcacctaacacacttcctcagaggattgttccaccttatccaactacaaccctgaatactggttgccacaccatccatatcgagctggagcctgcttcaagtaggtggtcagcctttgtgaattgttcgcaggaaataaacaacaatgagaagtacaggcctgtcgcttgcctgaataataccagccgttccttcgtttacgtgctaattggcagcatatactcttgttatattgataatcttgagccttagtgtgggcacctggccattactcctttgcacggcaacgacacaagagtgctagaagagaatccaagctgcgaggatgtcgtcaaaataatgagaggtggattcgctgttcggtttccttacacgattgatgctgcgtactctttcaaggagtgcagggcagagacatttcggtgagcttgcgatatatcctgtggtttcattgattttcttgcattgatcccactagtgacctcgatcgtcttaaattcgttttgcatggtctttgtagacatttccgagaagaaccagcgtctagtgcaggcatcaagtacactatggcagacactgcgacgttcgacattcgttacatggcatgcgtaatccgtgtagctagattacctgcagctgtcaaattgttcgttctactaacaataatcgccatgtggcttctcaagtggattgctggtaaagaaatcgtgtatatatgtacttaaacagatgatccttattgctacattctagttttagattgcctagctttttatcctcaagtttcctgcactgtgagaattgtcttattggtatttccttggagtttggaagatgctcttctctgcacgctgtgctaaactttacatctttttgtgtatattagttgactccaacgcctagttggcaattcatattaaaatgtcatctttttgtttgtcattgccataataatttcgttactcagctttactttttttttagatgaatgaatttcgaaactcagcttcacatggtttaaagtcattattctcttctttaaactgttacagctagcggcattcacaaatgagatttgctccggtccaacaaaaagtaactcgaggtaccggtacttcacggtaccaaaacgttttagatcgttggatctagctgggcatgacgggcattgttag

SEQ ID NO: 24250 - DNA, 1428 bp, Oryza sativa
gaggtctccaccattggtagtatccatcatgttaatgttgtgtcgttggtgggcttttgtgccgaggaaacaaggagagcacttgtgtacgagtacatgcccaatggatctctggagaagtacatcttctcgcctgagaagagtttctcttgggaaaagctcaatgagattgcactgggaattgctagaggaataaactatttgcaccgagggtgtgagatgcaaattctacattttgatatcaagccgcacaacatccttcttgacagcaagttcattccaaaagttgctgattttggccttgccaaactgtacccacaggataatagttttgtgcctgttagtgctgcacgaggaacaataggttatattgctcctgagatgatatcttggagctttggtgtcatatctagcaaatctgacgtgtatagctttggaatgcttctgttggagatggttggagggcgaaggaactctaagcaggatatgtcgagctcaagccaagcgtattatccatcatgggtgtataatcagctggctcaacaagagttgggtgaggtggttactagtgcctttaatatgcatgagctggaaaagaagttgtgtattgttgggctgcattgcattcagatgaattcctatgatcggccgacgatgagtgaggtcatagagatgcttgaaggtgatgttgatggtctgcgattgccttctaggccattcttctgcgatgatgaacctatgccacatctggtggatgttggatttgatagaatcgatttggcacaaagtggaactataaattaaaatgggattggatcataccttgatctcctggagttcccattctctctgtctttgttcttctttcttctcttctagtttggaagcacgaagagaatcgtgtcttgattcttccctgtgtttcagtgggttgtttgatcgggtagcgagagaaatctcttagggtttaacacttaggtattgatctctatttatagccactgcacacagggggaaccgacactagggtatggcggttatcccccgatcagggatgttcatgagagatcgatcactatagcgatcgccctaaacaaaatatctctttgccgactttaggtttagccgcaagatcatattttgcgttcacactaacattctcccccttgatcgtgaggctaaacttataagtccatctttcaataaaatagtataccaagacaaaagattatagtgaccaatataaagcatcaaagaatccagtgactatagcataccattatattttaaaataaacttctttaatcttacgagctctttgaacttattacattaggcttatacaaacttatggactcacttttcaacaaaacagtacatcaagacactagattacagtagccaattaagtactactgaaccaagtga

SEQ ID NO: 24251 - DNA, 560 bp, Oryza sativa
aggtatactttctctgaagtaaagaagatagcaagatgcttcaaggaaaaagtaggccaaggtggatttggaactgtatacaaaggaaagctaccaaatggagtgcctgtggcagtcaagatgctagagaaccctacaggggatggagaagagttcattaatgaagttgcaaccattggaacgatccaccatacaaacattgtccgtctcctaggtttctgctctgaaggaacaagacgtgctcttgtttatgaattgatgcctaacgagtcattggagaaatatatattcttgcgtgatcctaatactcaagagctcctgtcaccagacaagatgctagatattgctttaggcattgcccgaggaatggagtacctgcatcaaggatgcaaccagcgcatcctccactttgatatcaagcctcataatatcttgctggactataacttcagtccaaagatttcggactttggtcttgcaaagctgtgcccaagggaccaaagcattattaccttgagcacagcaagaggcacaatgggatacattgcaccggagctata

SEQ ID NO: 24252 - DNA, 820 bp, Oryza sativa
gcaattcgctgcaggtagagaaaaggaatcaaggggggagccagggagtacacaatacatatacgagtataagacatatctaatggatcccaaatcaactcaccttatcgaatccattaggcactcgttgatactcccggccccatatatgcgcggaaatctaatggcgaatccttccctcatgaactttttgacatcttcatagctcgcattcctaggcactgtcgtgctccaatcacccagaagagtcatggccaggtatccacaagaaggctccaggctttcgatgtaaccagggttgtctgaatcacttgataataacacatagataaaagaatagttggagcttgcgcaagtgacaggcctgtatataccattgtccttcacctcccgtgagcatctaacaaagtaagcatgattatatgcaccaggagccaactcgatctcaatcctgtggcctgagactttgcgcttgtactgatcaagaagatgattccactgcggaagagggcaagtgctaccggctatgttggcgtcgacgacccaaaagcgtctgtagtcgtagttgatttcattcacatggtatgttgcattgtcaatgagaattgtagcattggtatcactgcagaccagctcgtaagatttgctgccgcacccaggtggatcagctgcccgacggaatggagccgatacacccttaagatggccgcaagagaaaagaaggacactgtgatgccttccttcaacatgatccagtacaagactcacaaccacaaataagataccactagctaaagcttgagtattctatagtgtcacc

SEQ ID NO: 24253 - DNA, 3318 bp, Oryza sativa
gcatcctaatagcatttggcatggggattgtcaagtgcatagctggtatgccagagtttatagaaccacatatacaggaatatccaatgagagtgttatatagtccgaaccattacatccatccctaaaagagtgtctttttagcaaaccacccttttagggatggatgtagtagctcctttttcctaattaattgtttcagcctctctcggttactacttactccagtacgttgtatgtattatgcagtgctatgcaggttcgtgttggtgccgctagcgatattgaccttccttgcccacaagtattggaaaacaaggttagcaattgatgcagttgagaagttcctacagatgcagcaggttctgggtccgacgaggtacgcgtacacagatctcactgcagttacaagccatttcagagataagctagggcaaggaggctatggatctgtatataaaggtgtgctactctccggggatgtccatgttgccgtgaagatgttgaatggcgcctccacctacgatggggaagagttcatcagtgaggtatctacaattggtaggatccaccatgttaacgttgtgcgtctagtggggttctgctccgaagaattgagaagggcccttgtttacgaatacatgcctcaaggatctctagataagtacatcttttcatccgaaaaaagtttctcgtgggaccaggttaatgagattgctataggcattggtagggggatcaaccacctgcaccaagggtgtcatatgcagattttgcacgttgacattaagccgcacaacatccttcttgatgataactttgttccaaaggtcgcagattttggcctcgctaaattgtacccgaggaacaaaagttttgtatcagacagggcattacgaggaacagtgggttatatagctccagagatggtgtcgcgaagctttggcgtcatatctagcaagtgtgatgtttatagctttggaatgctgctacttgagatggctggaggaagaagaaacgctgatccaaatacaaatccaaatgcaagtcagtcatactacccatcatgggtgtatgggcagctaacaggtgaacaagttggtgagacatcaggtgctgctgacatgcatgagctgcagaagaagctgtgccttgttggattatggtgtattcagatgaaatcacacgatcggccgacaatgagcgagaccatagagatgctcgaaggggatgtcaatgcgctgcaagtgcctcctaggccattcttttgtgatggggattttatgcctaatgtgatggattcataccttcattcctcagagctgactgccatctcggaggacgatggcgcaattgaattcgctagtaactaggttataatcgaagtgttcatttgctattttgctgtgtggtgatcctgggatgtctttgtctgtttttctgagaacggtgcttggggctgtgtaggaaatctgtaggtctatgaggaaacattgcttggtcctatcctgcacgtgttttgtgcctgtaagacttacggtgcctagctcttgtgaagggtgggatggcacctgacacaatctagatagctggtcaaagtaaaaaagaagaagaagaaaagtgaggccaagaactgagattagctctgctttgttttttttttctctttcttgtctgtaaggtttacatttctattaatggaaataggtgcaagaaagctagatagctgttactatatcagaacattgatcttatatagttttttttaagacctatgttaagctttattaataccacacaataattgtatggtctatatcttcctttgcaacaaactctctcaatacctaaatttagcacctaaagtaaaaataggaaaatacagtcaattttggaaagaatctgggcatgctacgcgaggccggtttgactggtgccatagggtcagtcagaccgcaggggggcggtctgaccggaggtatctagccgctcagatcggtagagttcgactccgagtccgattctcgggttttcttgccaaggcctgagattttagtattaattggtttttacacctaaatgaacgtggaaaaaaccctaggaagtaagtccatccctcctgtaaaatgtaggaggccattgtcgattgaaaaaataatcgatcaatcatcaaaatcaatctattatacgaactctctatattctacatcttctaccttcttgttatctgtcccaactactattctcatacaatcccctaatcgctcaatgtctattgtctctacggctttagaggatgttctagctagcctaccgagcctaggataagccagcatgcattcatcttgatgggggtccctcctgggtgttcgtttggtggtatgtaccaaacggggtgttctattgtccctacggcggtacattttctgggtgctgctgcgagttgcacataatgtgctcaatgtatgaagtcacgattcggtgtcaacattctctacacaatttggtttgccttaggaagattaatagcccacctcaacagcaaaggaagcccaccaggacatagctccagattcttcttaggccttattcggtttggaaaagattgaagatgatttgagggaattaagggggaacaatttcacaccatgatagacgtggatttaaatcatatttggggagcttaagattatgaaaacctgctggttggtaaccagtttttacaactacaaattttcaaaatttggatgacaatctgaaccattggaggagctaaattctgtgagaagctcccaaacaggtcccctccaggaaatgctactgggcgagcgatcgccctcgctcgctcagggcgatcggttcccacccccctccctccacctggtttccctttttggcaacgcattacttttctattttagtaaatttatgcacctaaagtttatacacctcaagtttacacatctaaagtttagagaccaaaagtttatatatctgattcaaatttgaatttgaattcaaatatttttttatatatagtatttctatacatttaaagtttatacacctaaagtttatagacctaaagtttatagatctaaagtttatatattcgattcaaatttaaatttgaattcaaatatcatattcaaatttgaatttgaattcaaatatttttcatatatagtatttctatacatctaaagtttatacacctaaagtttatagatctaaagtttattagtcaaaagtttacatacccgattcaatttgaatttgaattatatccgattcaaatttgaatttgaattcaaatat

SEQ ID NO: 24254 - DNA, 2815 bp, Oryza sativa
ttgagaaccaaaatgagttctactttcctgagtggatatatgagagagtaatcaatgggcaggaactggtgcttaacatggagacaacacaaggggagaaagaaacggttagacagctagccattgtagcgttatggtgcattcagtggaacccaacaaaccggccctcgatgacaaaggtagtaaacatgttaacggggaggttgcagaaactacaggtgccgcctaagcccttcatttcgtctgaaaatcatcttgcgacttagatcatggaaacacaattccatggtttagagatatgtttgatcgatccgtagcttgtatgtatggtgtaagattattcaactatattgtgctatcagacatatggtatatgtattcatgcaattctaatatcccgtggatttgatttgcagtgtgatagttaaaagatgataacttgattaccttattctgtcattgctaccagtgcactaatcctcctcgctgagcacacatttttcgtacccatctcatccccacactgccaatctactaactgtccttgttcttacccatcccatccccacaaaggatcctgcagcgcaggcaactgattatctcatctcatgttcactcctggtattgcataatttagaacagaaaaagaaaaaaaaaaagcagcacgacaaagggaaaaggggttaccatttagcaaggcacgagcatccgcaggaggtctcggagagtgtagaatgcgggaggggattagagaatatgattaaacgtggtatcgggcttgttagagattccaccggtcgctagctgccgcctgcggcgccattgaggaataaccgaagcaatttccatctgcggaatgagcggaggcgactcgcaaaatggcagactgccgcagcaagattaaccgaaactcggcgcgcggggcgtgggaatgtgggatggccggaggacggcggccggatgggtggggctgggcggcggcggaaggcgtagggagaactagtgtgctttatcacaggttgggcccgtccgtctaattcccgtggcccatgaagacgagcttcctgggccgcatccttcatgatcttccgagcccaacaggctcctcacaatctcgttagaaataagttcactggagatccctcaacttaacagcgagattttttgaggtcccttaaccggaaaaccagaaatcttcacccctaaactatacaaaaccgtctaatttgggtcccaagacagtatagatggctggttttgatgacgtggcatcctagtcagcaaaaataataaaataaatatgtgggggcccacatgtcagggggagaaaatgatgtgagccccacatctcttttttcttttcctttctcttctcttctcatggcttgtttggcaacttgagggaaggggattgggagtttacacgagggaattgatggtgagattaagatgtgaatttgatttttcatcccagtctcttgtttggtagaggtggtggaaattgataaggagtttagttggagattaaatcattaatgaaaacggatggctgagatttgtttaggcgaagtaaaggaggaattccctcccaattacctacccctacccaggtattgaaaaggagggagttcattcctcaatcccccatctccatcctaccaaatttctcatgtccctcaaccaaacaaaacagttaatagcctcatccctctaaactcccggtccctcctaaaaactgcctcaaaaccaaacagaccgtcagttctcacgcgcatgcgggcagatggcggccgacggcagagcggcggggaagaagcgggagatggggagaggaggtggacggcgcgaccgcccgcgacggcgggagcagtggccggcgcccgcctctccccatccggagccgcggcaggtgagcgggcaagcggcaacctcgctgtcgccagccaagccgcctccacggcgcggcgcacctcctcggtgcgacaccggcggaggatgcggaggagagcggccggggtggatgcgtgcgccgatgggagcgccgggagagggctcgacggcgagcatgaggattagtagggaagggtcgagcgggatggacgacgacgacgtggggctgtcggcggcaagcagccggagcggcggcggcggagagcggagtcggcggatgaatgaacaacacagctagattgatagaattgttgtcgctttttgtaatttcaagcaatcaataacttcgtgcgtgatggcaaatcataagaacgcaaccatgacagccacatcgatgtatatcatccgcaattcaattcatgaaatactacagagcgtggatgatgcccttacgcggatgaggagagggaagttgcggccagcccagcagttgagcacgtagacggcgccggcctaggcgcgcggcggcctccgacaacttccagtcccgctgccaccggttcccctccacgcgcaggcggtggcgcgcggggagcgccggggcgcccatgccctccacctcggcgcgggcctcgcgccggccgcctctctccccttctctggtgccggccgcctcctctccccctctcccgcttcttccccgtgcaccgcagagcccgcagcgccggcggccgcgcccgcacacccgcctgcgcgtgagaagttgagaagagaagagaaaaagaaaagaaaaaagagatgtagggcccacattattttctctcactgacatatgggccccacatatttattttattatttttgctgactaggatgccacgtcagcgaaactagccatctatactgcttgggacctaaattagac

SEQ ID NO: 24255 - DNA, 822 bp, Oryza sativa
tcccaccgaatacctataagtttaagccaaaacccacataatattagatgaagtccaagaatgcattttagataatttctggtatcaatacaataataagagggaagaaaaaggctatatgctatcaatattaaacagtcttgctgaatatttccatctaatgaatgatataatgccaacatcagaaaataatgaagtaatacagcaaaaacccatatatgttgtttttgacggaaagcttcctggagtgtacatatcttttgaagagatagtagcccaaaaaatagatgcaaaattaatgggtggattgtcatggaaaaaatatatagattttgatgaagctttaactcaggccagaaaaatattaggaataaactactacttggaaccagcagcaaaagaatatatacaaaaatgcaaaaaagccaaaaataagaaagctccagagaacccatattgttcaaatattaagaatgaaggatcatcccaaaaacctacgtataaggaatgcttgactaagggagtagatcctttggatggcgaatatatcgattggaaaataattgaaaaatttgaagaagcatcccccaaattaaaaaagaattgaaagaagaaatacttaaagaattaaagaaagaaatgaatgataaatttgaagaaatgaaaaaagcatatgatgaaaaatttgaagtctccttttctgatgtagatactatggatttaggtggtcatgggcagcctgaccaataaagcaatataatataaattgataataaatatccattctttgggcgtgggaagactatatttgcgaatgaccaa

SEQ ID NO: 24256 - DNA, 10166 bp, Oryza sativa
  unsure (1)..(10166): unsure at all n locations
accctccattccaccaattcttagtagtagtgactttagcctaccttgcatagtatattaagcaaggagttgtgtaataacgctgtgtaaggtaagaacagcttgcttgtacctaccttcgggtttcccgaaagggaaaaccatatgtaagcttatctgtttaatatgaagtaattttccttaagtattcctgcacgtttgttctagacaagtgtttatgctaaggaccctataggagaaacctcttcggtttgttctcgtttttagcctgcatcttgcataggcatctggagaatcggtatccgtagagaagtgttcccttcgggtggaactgcctggggagacgataaactcttagctagaacaagtgtgacttggaatatctttttaagttgcttctaaaaagacagataggtgaggcatacggtgagtaccgagtaggactttacatcatctgaaacaagcttctgaggctgtctaaataggattcgccaccctgcaaagatcctaaagttaaaatatctctcaaagtgaacagtgttttttgatcagtaatttaaacagtaaactgaatagtgtttttgaatagtattcagccgaataaacagtaaactgaatagtattcagccgaataaatattgtacatatatgtatatgtatgtatatatatgtatatatatatatatatgtatgtatatatatatatgtgtatatatatatatgtatatatatatatgtatatatatatacatatatatgtatatatatacatacatatgtatatacatacatacatgtatatatatatatatacatacatatatatacatatatacatacatacatatatatatatatatacatacatacatatatatacatacatacatacatatatacatacatacatatatatatatatatatatatatacatacatacatatatatatacatacatacatatatatatatacatacatacatatatatatatacatacatacatatatatatatacatacatatatatatatatatatatatatatggcgacctctgattcatctttcatctcccgctctgngcctgcaaacggagcctgtttnncacgccctgggggttgttctatcgctcacccggcttaggtcattatgtcttgtgcctgcttgcggttcttgtcccagatgcangtgggcggcggcatcatcagattcagcttcagcctgagtgtgctacgttcacctgtggcgcccatctcacgaacccgttctaccccttccgcctgccacgtgacccgcccgagtgcggcgttgcgtcgtacgagctgacttgcaccgatgacaaggctattattcaggtcgacaacggaacgtaccttgtgaggggaatcaactacaccgatgctaccttcagtgtcgtggacgccaacatgttggattcaagtaacagttgccctcttcctcgctggaatcgcactccttaccgaaggtacggggttgtcgaagactcaagccgcaacatcgtccaagagctgatgccatcttattcgaccataaccgctgcttttgtgacttgttcgcgggaagtaacgaacaatgggatgtacagtcctgtcgcttgcctaagcaacagcagctcattcgtttacgtgctaactggctggttcgctaattatatcaagagtctcgagccttcttgtgggtacctggccatgactcctgtggcgagtgcctggctacatccgaatgcaagctatgcggatgtcgtcaaactaatgagaggtggattcgccattcagtttcctgacacaattaatctgtactccagtttcaaagagtgcatggcagagttacttcagtaagttttcaacatcgatcatttgtgaaatcattacagtactatttctcaatttaactaacatatatatggccttctcttataactgctggatgcatgcatcttaaattcatattgtgtgtactctgcagagacatccgtgacggtgaccaacccaagtctagtgaacgcaaccagtataggattgagctagtttcgttaattgaatatggtatcttgcaatgtgcaactcaaggctctagaccaactagagctgtgatggctatccaattgttcattcgcagaacaccaattgccgtttggactttgaagtgtattgctggtaaattaagaaccccccccccccccaccccaatatgcttaaacaaatgatcctcctataaggcgtcacatcaccaaattaaatcactcctagccaccactggattgtacatgtccaatctcagattatataacttctttgtatccttagctttgctgtacttggtgtcaatggccattgttttggagcttgcaaagacacacttatctgaacgttgtgttgttgtgctttaattttacgactcatactgctcgatattgctcttcccgttaaaatgtccttttgtgtgtgtattgttgccgtagcaatattttccatactctgttttacattattttaagctatatttcccttgttaaaatttttacaaaagcggcaattacttggatataacatgttgctcaaatgctaactggtagctaattaggctagtgtcacagtaacaattaatgtgtgactgaggaattatatatttacaaaatatgcatcactacaactaggtagatgctgcatcaaggcaccaaccatttaaagtttaagcacattcttgttataccaatgaactatctgtaaacttcccttttatgcagtatcctgcaggttcattttgccgcccttagtagtattgacctttctggtgcacaagtattggaagaggaggatgataatcgatgcagtcgagaagtttctccggatgcaactgatgattggtccgacgaggtatgcctacactgaacagggcattttcagggagaagatcggccaaggaggctatggctctgtatataaaggtgttctactcccaggtgatgtccatgtggctgtcaaggtgctgggaaactacaattgtaatggagaagagttcatcagtgaagtctccaccattggcaggattcaccatgtcaatgtggttcgtttagtagggttttgtgcagaggaagtgaggagggcactggtgtacgagcacatgcctaatggatccctcgacaagttcatcttttcacatgacatgagattctcctgggacaagctcaacgagattgcattgggcattgccagaggaataaactatttgcatcaggggtgtgagatgcagattctacattttgatatcaagccgcacaacatccttcttgacagcaatttcgtcccaaaagttgccgattttggcctcgtcaaactgtacccatgccacgggataatagttttgtgcctgttagcgctgcaaggggaacaataggttatattgctcctgagatgatatctcggagctttggtgccatatctagcaaatctgacatgtatagctttggaatgcttctgttggagatggttggagggcgaaggaactctaagcaggatatgtcgagctcaagccaagcgtattatccatcatgggtgtataattagctggttcaacaagagttgggtgaggtggtcactgcctttaatatgcatgagttggaaaagaagttgtgcattgttgggctacattgcattcagatgaagtctcatgatcggccaacaatgagtgaggtcattgagatgcttgaaggtggtgttgatagtctgcaattgccttctaggccattcttctgtgatgacgagcctgtgccacatgtggtgggttcttaccatttatcctcttggctaactgaaatctcggaggaggatgagtgataaagcttgtgtctgcttggaagcaaactcagctaactatttgcttgtaaaacgcagaagctagaaatgattgtaaacagtgaaatggttattgtacactatttatctaaaaaaaatatttacagacgatagaagttgtaggatcgaatcacaagaactaagccaaccagaggggggtgaatggttggtatacccaaaaaccgaaaacttttagcggaaataaaaattaccctcgaaatcgatgaagatcggtctgaccgaagttgccttgccggtctgaccgctaggatgccgccggtctgaccgcctgtacgccgccggtctgaccgccgcttgccgccggtctgaccgccggtagatcgccggttagaccgccgaaacccgataaacacaaatcgaagaactcttaaagtagatgacgactttattacttctctctgtatttacaaagtgcaccaacagcactccttacaaaaatttcgactaaactcgaaaccctaactcaaaactcaactcaattggtctctaaagcgatatcggaaagcctcacgccccccctctatttatacatgaggtaggcagcctaaagccacgaaccaaactcatactaggagtcctaaacaccttaggaaacccactagtacaagaaagaaactttacataaccaatcgtaccaaatttggactccttccaaattcgactccgcatcccatacgcacacaataactccatcgtatgccatatggaaactccatcaactctagcctaagtatcccgcatgatctctgaccaccacggacgtcgtcttatccccaagccgactcccggtccatcaccgcaaatactctcccgagatatcgagtcacctacacatggaacaaacaaagaaaccatattccgaaaccaagctatcttcaacttgactcattagcagcaaacaatagtattacatacgtataatatccatctagaagtcataatcatggaataaactcggatatctaaataaacaacccgaaaccgaaaccgacacagtgtcggctggtcagaccgcgggcagcgccggtctgaccgcgcaatacacgccggtctgaccggctaccaaagcccggtctgaccggacccaaatccagcagtacctgtatattcacctgtgaaaaccaatcatctccaaaaccacttcgtgaataaattccaaataacaaaaccaataatctccaatgcccaatagttcatcacagaataataatcaaaaacacctttgattttacagttgtatcttagaaagtgctacagaatcatttctgaagaaaatgctacttaatccatttctaattttctctgtcatttgctggggcatccggatcactgcaagcctggagtgtggactctggaggtcagtgtggatagcggcaggaggcagtggattgcctttgactgaccggataatttctttgccgtgaactagagggagtatttcgtttatcataatgttgtgactgggatgccatggttaattatgacacatatatgtgtggcccattggccaaatgtgttgttggccggcgcatttctgtggtgtgtgtgctgcatgagcactccagagctcattccgatagtgatggtcaagtctccgagacacggacatatgcttttgctgaaaggaaatgcaacgatttcgatttggacagcctagtgcctgtgtttaccgctgggcatggtaatccgatatatcaatgatgcatggtaatctgatatatcaacttaacatctcatgcatcaatgcatttgcttaaaaaaaaaaaacttcacgcggagctcttgttttgtgtcacagttcgctgtgccgaaagttagacgtgaaacattttgtttctgactcactagcccacattttcatacacttaatttttaagcttaacttcaccatgcttacgggttacaaattgttagtcctactttatataacttgccacatctttaacaaattggagtgaggtaaagttaaccaacaaccaaacagcaaatcacctgaacagagtcgtcagattaggcgcaccactgccgcactgcgttctgtctctacagccttttctgttggtcatctccgggcctaagcctaatattttgggccgagtaaggcccacctaaactgcatcgcagcccactacgggagaactcccccgcacttcccatctgccatggcaacctccgccggtgctccggtagcggccggcggcggcaggatcgctctgaatcgattctccgtccttgaccttatggcgtgccgctgcccgctgcccgacggcgatgccccaccggccaccgcaccacatctcaaaccggtgacggtgagggtcgtcatctcatctgcgcagcggtggccatccgtattcgagatccgcctccgcctccatggagttggattattcgaatcgatggataatccgcaaacacacgccgtccgatcaatgatttggtgggccatttgcatgcctaagatcagctgcagcccggcccactactcgtctctttctcggccacttccttcgatgggccgaaatggaattgagatcaaaggtattgttgggccagaacaggaacgtgttgggcttgtccccactccccatcgttctccccaccatggactccggcaatctgctgctgctgctgcggcggcggcggcgccaaaaatggcctgaatcgacccgacttgcagtgcagcatcattcccatggccttgcgccaccgcgtgtcgcttcccgctgagcgcatccaccggtcgagttcacctcgcctcgaccccacgcttcgccgcaggggatctgtgtctactaaggcctccacctcctcgctcttgttggaccacgccgtccggcgatggaagcggcggcggatctctatcccctccctgacattgctggaggtatttattttcattttattttggcgctttactaaattttgtaacttcacgagctgaactcagtactatatcgatccttgtagattttcagcagtagcatggcagtatggcacggttgattgcctgccctacagatttctcttctcgcatttccttctaatatccaggtcctggctctttcaatggcatggattggaatatgcaagcaacaatcgactacttcttactaactagtgagatctaattaacttttcagtggcaaacagacgatggtaactttgcttttctattcagttttttctaaagataaagtgtgctcaaacccatttcaatgcattcactcgataacacaaagtttacaattaccttgcaggattctcttatgaaatttccaccaggtactgacccatgaaaaggacaataagagtatctgactaactagtggagctaggagtacaatacatcaggagatacatcacagcaactgatgaacagaggtaacagccacaactgaaccacaatgttgtatttctacttaactgcaatacatgttgaagagtgatcccctcagatggctaatccagcggaatcatcaaaataaacacaacgcaatttctaggccttactatatgaaaacatgtggattaactcccaaaaatttattcagtcatggtgttgtgctctccatgatttatggcataggatggctttcatacgaaacaaatggcttagggggcacctgtatgttctgcaaccttccagttatcatgtttacgacctttgtcatcgagggccgatttcttgggttccactgaatacaccatagtgccacaagggccagctgtctcaccatttgtttctcttcttctgtcatttccctactaagtacgaactcctgcccagtaattactttctcatagatccattctgggaagtatacctcattttggttcttaatacttgggtcccagctcctccttccactcaccatttctaacacaagcatgccaaaactataaacatctgacttgtatgatatctccccaaagttcctagaatatagctctggtgcaatgtatcccatcgtgcctcttgctttggtcatggtaacaatgctttggtctctcgggcacagctttgcaagaccaaagtccgaaatctttggactgaagttatagtccagcaagatattatgaggcttgatatcaaagtggaggatgcgctggttgcatccttgatgcaggtactccattcctcgggcaatgcctaaagcaatatctagcatcttgtttggtgacaggagctcttgaggagtattatgatcatgcaagaatatatatttctctagtgactcattaggcataaattcataaataagagcacgccttgttccttcggagcagaagcccaggagatggataatgtttgcatggtggattcttccaatggttgcaacttcagtaataaaatcttctccgtctcctgtagggttctctaacatcttgactgccacaggcactccatttagagcttgcctttgtagacagttccaaatccaccttggcctactttttccttgaagcgtcttgttatcttctttacttgagagaaagtataccttgtgggttttgatgtgccatatgtcctgagaaacatttcaaccttcaagtgtacctcttcattatacctttgcttcagggagagatagagcacagtagccaccaccaatgaaacagcaacaaatgcagctactgatgttgctgagtaaatagaataagaacagcatattgcatcaggacagaaaattatcccatagtgagtggcttatcttgatgggtataaaagaacgcagtgtctttttatcagaagaatgtagttagagcagccatcaacaactattttatctgctacagataactttgtttatttcatttttttcttgtgaataaaaagataggtttgcttaatcctgccttcctccagttggcttatttagccatgtaataacgactattgctcgaacactttgcttctccttcttaatatatccagcagaactcctgctgtcacacacacacacacacacacacacacacacacacacacagaggtttggattgcaatagtacctgcaatgactttgacgcgtgaacctgcaaataccaaagcagacaataagatctatttgatggtttacaggtaaaatggaaatttactcttgaaaaaatgtaaacccagcatagacctacgacattgcagaaaaatatggaccctgtgggatatcatagagttttagttttggggttacaattgtactttgattatgcaaatatatatgtgatagataacttctcctagtgtgtgtatatctgattgtgcaaaagctcagcacagtatcatcaactgcagtcttctgtactcaagacagcagaatcatgattatcatcagaacatgtaagattagttgtgttgtatgcttacttaacttttagattttctaattgtaggagtcttttgttacttaagttacttttgctttcgggtccttttcattagcagtacaatggtgttgtttgtagctgcatatctatgttaagatgtaaatttataatcattgtgtctgattgttgctagttgagcaaacattattctccattggccacttcttttttgagatatctatgagaattgtaaagaatgattaaatagttacagtcacatattcaaatggtttgtactactagtttgcaaaataattttgcaactcatctcctagaagtttcaaaaggtagtactgtatgggtggatcaaatgcaagagcttaactattgtaggaaataaagctatatgtttgtgggtggttattgttagaatggtaccgtgatgcatgcagaatgtttgattcctttgtgagctgaacgcgcagcgttgcccttgctgttcacaccgcgtgcaattgtagggaatacttccgagaagcaaatcaagggtgatctcagcagagttgattatcctttctgccatttgcttgaacgttaaaccagccgtgtatggattggggattggaatgttgccttttgagacgaccatgcagtccaatggaagcgcatacaggtagagccgagtagacaccaaatatgagaagtggcttgtagtgtcccttaggcaggggatcaagcggacaactttatcggcaataacagtgttgtagccgtcgatcatagaagctctacttgttgtgaactcttttgaacaacgcactattctcccaggttcagtgaggtataattgattctgatcgttgacatcagctgatagatttgtggaattgaacttgtgaagcagcatggagaagatgaacccccatcgggatgatctt

SEQ ID NO: 24257 - DNA, 623 bp, Oryza sativa
tatgggaaaatgaacagcaaatccattcctcatggatctgacgatgtctgaaaagcttgcattatgtggcaatggcgagtcccaaccacccaagggaatcatggcaaggtagcgacatgaagtctcaaggtttccgatgattggaaaaacagatggaggcattatccaggaaccaaacacataaacaaacgaagagcttgtgctcaggcaatcaacaggaacgtacacactattattccttactgcctgtgaacaattcacaaagctaacccatgtagctccaggtccagggtcaagggccaggtcccagccgccatgtgatccctggataccccccgaaacgaaaggaagctgatccgagcgaggaagagggcagctgctgtttgtatcttttaggctggcatccacaacccagaagacagaagtagtgtagttgatgctggttacatagtatgtccctgtgttgatcctaatggtagccttgctatctctgcagtctaactcatatgacggaacaccgcatctttgtggatcacctcgccggcggaaaggatgagaaatgttctggagatgtccacaggagaaaggatagcacccttggcgcccctcgacatctcctgcaa

SEQ ID NO: 24258 - DNA, 10194 bp, Oryza sativa
tcagtaaacaagaaccatgtctagtgttagcacatggtacactgtataggctgtaccattggatagcaagaagatgaaaaaaagaacttcacaaaaggtaagatcaagtacaaagtgcttcgactttcctgtacaaaacaacaaaaaaatctgatacgtactcgcagtttggagaggttgtatttgatggttcggattagtataacaaccatcaaagatcccaaagaagtttgatgcataaggcgctcatggtaccaagggacgctcggaagcacctagaataatacataaaagcattaacactttttgaataatataaatatatagtaaatcaacttgcttaccaatttgtgtacactagcattgaaggttgaatcttgactgagtataagaagaactatcaatagcatgtatatctgattggaggtctttcttgatgcattgtagagcatttccaagataggcatcagctgttcacaaaatttacaaaataaattagtaagaggctgagttaaatgtggatttgggtatgctcaagtccataaaaaacatttttacatattagtacatttggggatgaattcaaatttcgtgagttgcagcttgatgatgaaattgtggaattttgaacaagacaattataagctgcctggttgtataaggatttcaacagcttagcgaaaaacgttctaatatttagcaagacagcaatttcagcaagtcaatatacgtaataacttttagcaaatgtaagccattcatagttcgaagctatataacacaatggaagttcccaagtgactattattttttccagcaatttcatgttctgttgtgtatttcaatatggaatctagtccccaaattgcaatgtttcaaacattaaataccaataccatctattcatcacattggaaagaaacagaacttaaaattggagcagttttatgaacccaaaacaaatatgtccagatatgtattgaatgccctcgtgctccaataaatatggttcagaaatattgttattaagctaacataccaaagtatccaggtctgttcgaaccagaacatattcctgaaagtcacagttcccatggaccaaagaatagagcagtagaaccgagctctcatcttttaagcatctgcatggatagcgaatagatggacattatgattgatcttcgttaataatgaaatatcctattctaaataatgaccccccacaaatatgtgaaaagttaagagcagaatgttggtttccatcaacagaagtgcattcttatttcttaaacatcaagccctcaaacataattccatctggagagaactgttaaactcttttcataatacacaaatcatcagtacatttttgtttgcaaggagagaaagagagagagaatttcattgttttaattagaatcacacttggcaaacttctatacatctaacaagtaacagtatgatcataccgctcagcatgatgaagtgtgttacttacgtgccaagagcgtcaaatagcgatgcaaaagacaacctgacaactagcccattttgagcatttccttcaacatcagcacgatcatctgcagcatagttcatttatgtttgttagtgatctatacgagtactgcagtttctttgtacgacaggtgcagttaattccttgcaaatgacaggagcatcttacattgactgtctttggcattgcttaaggccttgtaatatggattatcatgaaaagccggtgcatccttgacattggtatttaaatcgcttgtgtagacattactgcttggaaaggattcgctcatcgtaatgcacttccggtagtggatcagaataagcagaacaagtaaactgttgtctgccaattgacttgatgcgccttcagcgtttgagctcacaaggtagttgaaagtataatatggcagtagtacaaagtttgctgcagtaacaaataagtaaagttaaagattttccataattcaaacatcctctagttctatggtccatgtgtcatacaatatttgcctaactttgccacacttgtgtaaggttaggtatgaaaaaaataggcatggaccaattgttagaaggaaaatgatgggagagagtatccacattaccagcaactgaaccaactcgctgcaaaacaccaggtccaccatcatcagagaaagcagggtgtgaactgtttaaaggaatccgtggtcgttttacaaaatttagcagcaacttttgaactaccgaggacactatggaactgtcctgcagaagaatatgtggcaaggatgcgcattccaaatttagacataaaaagggtccgcaaaaagaccagcaaacataatgcacaagcagctatcagttttacctgaagcatagccgcatcaatgaaaggatgcacatcttttggttcaggagatggtccagaacacaattgagttgacataagtactagcatcaagtttagaagttcatggtgcaggtagcatgactccagacttcatataaaggataaaaacagtgagatgcaaatggcaaaatattaatatatcattgcaaaacacatacacaaaaaagaaatatggaagtcatcgattgatctaccttacatctacactaccaatgtagttcagaacacctctcatcagaaaatattccacgctttgttctgagagatcaggaaaccatgacaaatcaatcgatatatcacagtaattaaaaactgatttagggtattcacagtgttttggaatatatcaggcatgcaagaactagtgcgtttagataatcaattaccagaaggaaaattttccagccccttctcatccttgtcaatttcaagacttagctcttgccaattatcagtctttgcattttcaataatgaatttgagaaatatggatgatatatatgcagcattgatagccttcctatacgccgcgtgagaagactctgccatgcactcttgcaagcaccaaaccaaatggatcaaaatctttgcgagatgctttgtgtggtagttgttctgggctgcataaacacatagcacaggctagtaagcacgagacgattacaaatcaaaacatgatactacaagtaacaatttaccacctatgtcttgatattacagtaagctgaacttaaaaaagaattttactaacacgacagttcatattgttgactacagccatgtcagcaaagtcatatatcacaggtgagcaaccacaaatgcagctcgcaatccacataaatcaattatccaaatcctcccgactacaccaacacaggaaaaatgccgtgaaaaccatgtgaatctagccatatcgcctcgaagcaccgcattaaagtcttaaacccacacccgcgcgcgcacagaaaccacgtgattcacattgcccctcggatcaaagcccgcagagagggggcaaaaaaaaaaaccgccactaaccaagagccaaaaaaaaagaaaagaaaaaaaagaaagagaagaagaaaccgacgcgcgatcagagcaaccgcttagggcagcgcggatctcgagccggggcggaggggggcaacaactcaccgaacgcgtgacacgcctgcaggacgcggtcccgcggccactgctgcgtgaggggcagctcgagcagctgcctccagaactcggaggagatcgggtacgccttcccgccgaccagcgccgcgaacatctgctccgccgccccaggcgacgccgcggcccccgccaccgcgcccagcctcggcgtcgacggcgccgcccccatttggatctgaacgtcggctataccgccaccgcgcccctaggtttcgacgcgggccagcggattcagggattggacgcgagagtgaaaaaaaaagaaaaagaaaagaatgcctccccaactggagtcgagacgaaggaagcgaagaagaagaagaaggttttaaatgggacacgggagcgtggagacttcgggcggaaggaggaagaggatggatgagttcgggggagcgggtgcgagcgcgactaaccggttgggggacttggcgctgtgggtttggattgtggggttttcgtgcaatgacgaatctacccccgaggttcttcctgggcgcgggctggggaggaggggtggtgtggtcttttcgctgggggaatgcggtggtgtcgttgttgttgctgggtcgcctgccgtgccgtcggtggaggaggtggtggtttggtggaggagcattcggggaggggggagacggggtggggtgggcgactcgcgattggtggtgtttagatccagagacttaactttagtccgtgtctttagacactaatttagagtattaaatatagactacttacaaaactaattacataaataaaagctaattcacgagacaaattttttaagcctaattaatctataattagagaatgtttactgtagcatcacataggctaatcatggattaattaggctcattagattcgtctcgcaaattagtccaagattatggatgggttttattaatagtctacgtttaatatttataattaattttcaaacatccgatgtgatagggacttaaaagttttagtcccatctaaacagggccaagtcagggggcgaggctgatgatgggtgtcgtttcggccgtgtcgcacttgattgtctctgcttgggagctccccaccggttttttttggccgtgtatcagcatttgggtttgacttcctcggcgttgttaggcgcttttgttttctttcattttaattgagtaagtgtatcgaaatggaaaaaaatgtgatttttgcaggaaacaaaaagtaaaaactgaataaagttggcattggtgaaaaaaaataaaaccattatctctcgagcatttttctatctttgtagcggtgtcagttttatactctttcgttgattttggaaaaataaactaaaattaaatgggtaaaattgaataaagttaatatcggtgaaaatatatagcactataaatatcaaacttttaagagtgtctacctcgaaatctgacttctatgatgttatatagctaatttcacaaagtaatgatgtcatgtagtaaaatttgtctaaaatgaagacattgcgttgttaattactttacaataatacaatataatataaatgcaaacaaaaaatttttattttgcaacgagtttcgcacagttccattacatgaatatcatttggaagggcctatggtacattttaaaaaataaacctataaacaaaatttatttgttgtatgaatagtccacttcaacaactatgaacttttgttcaccatccgtcctatgtgacatctatatcattttcatattcgatctttcatgttgatggtggcatgaaatatgttttgtccttttttggctctatgcagtcatctgttgacaaattggcttttttttaaaggtatatatattctatatccgcccttattttgtaaagttgttaggaaagtactctatttgcatatgtgatttaactgtcgcatatgcaaattcatggaaaaatcacatcagttcatgcacgattttctatattgtttgcaaacaaactttcctagtacatgttttcctaaatgacttatttgtccattttgtgtcttacgagttgtttccaatatatgtagcatggttgaagtatctacggagtatcacctattgacctgtccaaacattgcaatagtgcaaccgtggcatcgttctttaggtggtattggaatctacaagagataaagataaaaatgaagatgaagattaagattaagtgatttacgtaaaacgaggtaataataacgtgtgactaattgggttttaattattacaaacttaaaaaataaattaatctgatattttagaataacttttatatagaaaatttttccatgaaacatatcgtttagcattttaaaaagcgtgccacgactacctaaattttttcccacttgtgtttcataagaaacgaacgggacgttaatctaaagtaaagtgatattgcggcccagtagtttagcctatccaggcccaggaggcagaggctgccggtgaattcaatcgaggccgtcaatctcaaaccgacccacctccgcctccgagccaccgtcctcacgcacgcaccttcacacaccaccgtcgaacggcgcgcgccggagaagattttgccgccaccggcgccttcccctccccggcgaacgacgccgccgccgccaccgccaccgtcgccgccgcgcgtccgggcccctaccatccacccggcggccgtcggccattgtctcaccgtgcgccgcccgaatgcgaggccgccatctcctaagccctctcttatcccctctcgcctacccaaaacccccctcctctcgcctcgctccccgccgcgtcgccagccaccgcaccgtagccccgccgcccgccgcgcgccgcgccccactgtccgagcccgacgtcggcatctccctcttcgcctccgccctcccgggcttccgcggcgccctcaagcagcgctactccgacttcgtcgtccacgaggtcgccctcgacggctccctcgtccgcctcacctccttcgacctccccgacggcgaggtccctcctctcgggctcctgtttctgctctgctttgccattacagctctcctgctctggatttgggagctgtgaagctcgtgacaccggttaatttagcctagcgctgtttgtggatttgcagtgtgtagatgcgaaggaaggcggcatggacgaagcacaggcgctggaatcgttccggctgctctgcggcgacgcggactgtgaggcattgagggggtttctggagagggtttcagagggaggcgacagcgatgtctcaccgatcattctctctgctgatgccgacaagactcatcgctcggtgtgctatcttctctaactgttgttgttttgtaatgaatgagaagctggaagcttgtagtcattggtcctactttttgttaggaagttcatgatttcttcaagaggaacttcgaggccttgcttacagatacagttgagcacagcgatggaatccagaggtgcatcagggtgaggttgaagccggggcgacgcgaacggagggatgttgatgggagggggaggaataggaaaggcacgggaagttcgggctggagagatgacaagccatttgatagtagaggatctataatctggcctgaccatctagggaagttcataaggttatgtcatctgttcagtttcatgcctaactactattgtgcccgatcatctttattctgttcgtgtaagaatgcaaagcactgcaccgttgacttacagtatgtaattcacataccaggtttcatctttacaaggagaacaaggacacccaagaggcactaggaaagataggcaagatgctagggcttcaggtgcatgttgtttgctgtttcattgaagtatttgcagggtgtcctgtttttagtttataaattcattcagctgtttgctaattgattggtgactaaacttcccacagcctcgatcattcgggtttgcaggaacaaaggataaacgcgctgttacaactcaacaggtatccttgtgtagtaatttatgctgtgaagctcatgcatataatgactttctgactttcttttcatgggtttgatgggcaatctgggtgatatttaaaataacaaacttgttatataaagaacatgaggtaatgatttatatggaaagaaattaagagaggttgttggtattggctgttgtcatctcaaggaagaatgggtgctatggtttgaaaataaacagaaagggctatgttttcaacatttcttgcagtcatgatttttctggttctctaacttctgatcaggtcacggttttcaaggtgcaagctagtaggttggttgctcttaacagtaagctcattggcattaaagttggagacttcaggtaagaaagtgcatccctctttcagcatcaatgtaatgtcattgactaaaagcaattgactgcctcagtaatttatttaacctgttctagttatgtgaaggaaggtcttgctcttggtcaactgatggggaaccgatttacaattaccttgaggtgcatgttctccctgttactggtggcattctattataatggtagtatagcagaaatatttttggtgaacttttttgcattctgaaaaatgtatgctgaaaaagggctgtgacacacagacgcaagggtggaatcaaacccagagaatgggaattttgccagttcatagcccatgtagtgatagcgccgcagccttacttagtactaagtactaacccttctattatggctgggtcatggcaaaatcctagctccgcctctgacataatgcaatgtttctactatttgacgattatacaaattataggaatgacctggcatgcttttgttcttctttctttattcttcaactacagaggaaattgataattcatactttttccatttttattatctgccaggagtgttgttacagagtctgaagatgtgattaaggctgctcttgatggattaataacaaatggatttatcaattattatggtctacaagtacaataattcaactcttctctcttttctaaagcaggctcctggatactgcacttgttttgcatttgctgagacacaataaataaataccatgctgataggctatatgaaatcgtggtcatttgctggaacgcaccgaacctgttgcaactattgctctaaaagaaaaaagagggtgtcaaaagcccctgctcttttggaacatacagtgttatctcagcaaatgcaaaccaagtgtggtgtgaaaaggtcaacattgccctgttcactttcctgtggttcaaactattttttgttgtgttatggctagtaaaaaaatcttcgtttgtgtgcttagcgctttggtagtggttcagtgccgaatcaccaagttggtgttgctttgcttagaggagagtggagaaatgctgttcaattgattcttggtccaagggaaggagatatccttgttttctttttctaatatgtttaccagataatatatgtttaaatgtgtgaatttgttcgacttaactttgcggaaaacaatgtgataacataaataaagtgagggagcattttaaggaatatggtgacattggcacggcacttaggaacttccctcgatatctcataacagagagggctatcgtaagtatatttttttcttttactttttgctgtcgatgtaattttttaacattgtcactgccatttccccccctagcgtatttactagatatctgtgccacacctttccaatcttccatcaagtttttggtgaaaccagaaatcgagttgaggtgcctgggaggatctgattggtgccagtgctcttggagtctggatgtgttatacattagatacaagatgtacttatgatgttttgaggaacatacaagttatgtggcatcacagtttaatcatatttattatatgctccagaatgtgaattttagtagatgatgcatgataattacctacataatagaaaaaagttaccagcttatgctgaaagatattataaagaaggcatcgctacagtaatgaatttgtatgttgattttgagctttcacttttctcgctccaaatatattaactaatttatcatgaaggtagctatcctcccttttatcatctcatttaacatttcttattgtcaatcagatttaaagtacattgatgcataacccttaaacttatgttttgttttatttttagcttcagcgcttgaagaagtaccctggcaactatctacaagcactaatggctatacctagaacactgagactgatgtatgttatgttcaatatctgaaattttgtctagagattccaacacctgaaattaatgtaattttccttatttacgacaaatttaggctatacaattctacatattaagttgttctgattattctattcaggtatgtgcatagttaccagagttacttatggaaccatgctgcaagtaatagagttcaaaagtatggtcagtataccttttgctcaatagggaattagggatggcagtttcagactaggagtgattgttcttttctaaataattttttattatttgctttatcgatggtacctgcaatggatatgctcatcagata

SEQ ID NO: 24259 - DNA, 515 bp, Oryza sativa
aaaaggaaggtagcaagaaagctcactagcaccagttgcactgtggcttgtagctgttgatgctaggggaactgaaaaaacaggttctgcaatcttgacttgtccagccaatatgtgcactgttccttgtcccaaatgcgcctcttagaacagtggaagaaagagcattttttcttcctaaaagacacaaaaataataataattatagatgatcttgaaggtaaagtctggtatgacagctgatgtattggagctgccaagtacccaacacatactaggatactggctagtaccgcagtcaatgtttcaaaatattgagataataattggcagagtcgaatttaactaaaacaaaatttctaaattgaaataccagttttgtaacaaactagtcaagagaactacaaccctaaaggtacttggcaggtttgctcctaatccgagtctcattatttcagtagcttaaatgacttactgtcttcaaaatgttgaaaagcaaccctagcagcattcat

SEQ ID NO: 24260 - DNA, 525 bp, Oryza sativa
aatatttggtgttaaagacagcaactaagtgataaccaatgtttcatgcaggatgaccccaagtatggttgcttgcggcgctgtaaggcaatttctatccttgagaaacttcatgcaaaggggtaagcaggccttttgaattttctattagcctctggatttcactgttcatgttttatttttggaacattttaccaggttcgttcatggagatgttaaaccagaaaattttctacttggccaacctggatcacctgatgagaagaaactttttttgattgatcttggcttaggtatgcaatggaaaccttatgtgattgatactggttgcaaaaattgagcacataacccatctcaataagatttaacattccctaatcagaattgcggatgttcttttgtaatgctgtttgtacctaatatcattgtaaaatgtgagttcacaagtgctcatgctaccatttacaatttcagcatctaaatggaaggaaacgccaaatggacagcatgttgattatgatcaaa

SEQ ID NO: 24261 - DNA, 5529 bp, Oryza sativa
  unsure (1)..(5529): unsure at all n locations
cggagttggccatgactgtctggaagtagaactccatggggctcagggagttgctgaagtacaggagcagcgtccttgggaggttgtcgggagccaccaagcaaaactcgactaagtcccggctcaagatcggccttggcgagcctgtgcatgtttcgcatcaatttgttagtgaatgacccgtgcgagaaatgacgtggactcctaccggaagcctacctctgaagagctcgaacgcgtcaggctttgctcgttgccccgacgagaacgatatctcggcgttggtgctctgcaggaggttctggtcgacgacgaccgcctcggcgccgccggaatccatcctgtggtcgatgaagctgagccccctccgcacggaggagaaggcgtagagaaggtctgcacaaacacgatcgccagttcgccacatcagcatttcatcgcttgtcatcggtggcatcgaaggcaaacaaccaacgggacgacgtcgagcttaccgtccggcgtgacgagtgggtagtccgacgcgccaagcgtgacgagccagtcccactcggcgccgaccctcagcaggacagcggcgccgcggagcacggcggcgacggcggacggaccgcggccgtcgacggggtcgcccttgccgacgacgtgcacgttcccgtactcgaggaacgcccgctccgaccgggcataccccgccagcctcgcccgctcgtacccccccgccccggcgtccaggtgcagcaggtaccggttcctcgggtggtacacggccttgagcagccgcgtcatccgcacgctgtccccgtgcccgccggagatgtagtacgccagcaccggcgggtacccgggcccccgcctcggcacggccgccgccgcctcgacaacatcgtcgtactcgtacgccggcgcgccgaggaagaaggagctcgacgcgtagccgatgatcagcaggctagtcgtgacgacggccagcgacgcgagcgcggccgacggcgagcacgtctgcaggagccaagaaccgtgcggcattgtgcaccacgtcgggatcctcagccgcgcgccggagagatgcatgagccggcgcgtacactacaagttatagtcaactcctcaagagatcgatcacacaagctgcctggcagatggaactaaccgggaatcacattagttcgtgggggagcagacataagccctgacgcaatgatgaacgggatcggagtaccaaacatcgatttacaccaatataaaacgtgtaggacagaattagtaggataccaaccagcggagattttttgttttgtttttgttgtcgggatgctacggcctacgcgcgagacgtgcatatggaggccgtggatcggtggatggaactgtgcggcagacgtggttccaaggaggggaatccagcaaatcgggtgaggaaatgatagaaaaaaaaggagcagagtatatggaagcaaccggcgtgctgcgaagctgacgaacattggaatcgttgtgcacttgtgcttgtgcagatggatcgacgctgacgctgctaatttctgtcgcccaccggccggctgccgcgcgcatacgcgatgaactgtccaaatcagagttcgctgcgtagtcgcatcgcatctcgcatcagtcaaactagttagtttccaggcttctgctagtagagctagcacacatctcctgagatctccccgctgaggcggcagtgtgtgtactaccctttatcaaaactacaattttgaactaaactgaaacaaagtgaggtatctaatcttggacgcgcatgaaacttggctagttttacctttccctctatcgaacacaatccagggcatttggtattggacgagaaaaggctagacaaaggctaagcattagaccgaaaccatgcattgcattgcacaggcatcatcatcctgttcattcgtgccgaccaaaagatccatctcatccttcggaaaatggaaaaggatccttggggcttgggcttcggccactgggccgaccacgcaaacccaacacatacttgctcactggccaggcttgtgttggaccacagctgcgtaagcccaattcgtcgtgacttgctgctgccatctggctgggccgcttgcagtgctagcgcgccgcgtgtttgcagttgggctagagtttggattcgaaacgtcttttgcgttttgccgtttgcccctctactctccccttctctcaagagccacagcgtaatgacacatttcccttttctttttttttcttttcttcttgttctatattttttcctcattttccttttcttttcgtgcgatacacctggctctgtacctgacccgcaccaaacgacgaaatacagtagcttggaggaaaaaaaatgcagcccttgcgtattccttttctgtcatatatggacttcatgaacatggtgtgatgccaccggatgagtaatctcaactgaacatacgtggagttcttgtacgctcgtttatttattctgtatttttgcgagaaatttattgtatatttcttaatttatttactgaatgaagcaaaccatgcgtatgatactacgctgcacatgctccacgatgaaaacaaccgaactgaaaagataagcatacgtgatgtgtcaggattaaaaaaaaaacttgagcatgcgtgtgcgattagtttgggggcaaatagatgttaagcattgccgtatttttcctcgcgcttttacagggggaagtttagacctaaataacagtctcgtattaacttcacaagtcatgatcccgccgtagatttcttgctcatatacaagccgaaaatcattaatacattgactaatatagcactatagcatccccataacaacggtaatattttcgatctgaggagtaaataactttatctgtactccatctcggtaaaaacacacaagaagaagaacacttgagttcaagagaaaaatactactgctccctccgtcccacaatataagacgtcccacaatataagggattttgaggttttacttacaacttttgaccactcgtcttattcaatttttttttcaaatataaaaaacgaaaagttatgtttaaaatactgtagataataaagtaagttacaaataaaataaataataattttaaatttttttaaataagacgagtggtcaaacgttaaaagcaaaaactcaaaatttcttatattatacgacggagggagtataaaagaacaatacttctataaattttgtatttggatcccagatagagaaaaaaaagcagcagcaaatacgtcgagtcacgacgcccccagtacagagagacacacctctccaaaaacgaaaaaaagaaatagagacactcccggaaggaaaaatcttactactgatgagtagacggcgggcccaccgagcaatcccacgttatccatcaccccaccggggaagcccaagcgcatcgtgacccttgaatccagcgagccgagccccggttgcgggcagcgagctcccctcctccccactccgtctccgtggctccgtgccttccaaagcgtgggaggaggagaaaggaaacggaaaattattcacaacgggaagccttcaaaaagccaagcccttcctcgcccattttccagacagcgtctctcggttcgggcctcagcgggcggtgtgtgtgtgtgcgcctccgcgagaccagacaccaacctctctctctctctctctcccatccttcccctcctcctcctccgcctcgccgccgccgccacacgccgcacggtctctctccccgaggtaactagccttgcacgcctggacttcttcccctctcctccttcccgtcgtcgtcctccctctatccggagggtctctcgggggacgccgcgttcgtgggctgggctgtctccatgtcggtggcggcggcggcgtggggggacgcgggcgatcgtcggcgcggggcccgatcttagagtccgtcgcgtccgatcgcgcggcgatcgttccggcgcgcgccgatctccccgtttcggcggcggaaattcggggttgctgctcgtgtttcatcggttggtgttggttcgggctacggttttcctgggacgatcgggggggcgccgatgatttggcgagatgtatgcgttcgttaagcccgatttttgatcggttttggttgggaaaatcagtgtcggggagatcgggataggatttggggcggacgggttgtggaaaccactgttggcaaatctgatggcacagtctgccgtgattttttttttggctggagatgtgatatggttaggagttgatgggtctgctattagatgtgaaatcatcagttggtttactcaaccttatcagtgttagtttattctaatccacatgtttttgagcagtataaatgcaggattaatccgtggtgttgtgactttttgggtggtagattcgtgcgcggcaggaagtgcatggggagaaaggatgccagagttgcgtagtggagtccggcaagctcggttgaaggcaaagaaggttgaggaccttgcagcacaggacccgctgagaacttggtagtggtggcaccgacggtggcaggaagacgtggtagaggaaggggtgggaggggtggaggtagagcaacaggaagaggaagggcaggaggaagagggcgaggtgttccggtgattgatttggacccggaccaaccatgtgaggttctttcaggagctgctattggcggagtcgctgctggaggcccccatcatatcgaggaacttgctaataaggttgtgaagatggatggtgggagtggtgagaagattggtggaggcgaagatgatgggaatgcatctccagttccggataaggtatattcttcatattgagctcttactaatntattatgcatgttatcacttgcatgcatttctcntgttattgtgattgcagacatgcactgttagggtttcggagatgacgacaaattagtagattttggcctggtaccacaagtgtaccgttatatcatattacgatattatgtcgttatgtgcatggttcaggtggaccaagcttttttctttacgtagatattggtaacgccttttggaacttattaaatgcataaaataattgacgtgataacaagcataacagcaccttccttactctaccatttttgtttttggcattgtttgtagggcaaggcaggtgcccctatttatgttctattcagaaatgtttccacttttttctatggatgcttccttgtcaatgatgctagcttgaagtttttgatagtacatagccgtagaatgggatggttgacctcacagaattcatgagggcatctccttatctgttaccgtgcgaatgccagtgcacatggtgctgtgcatccctcaacttaggcttactgtttgcttatatcatggaagctgttcttttacaacatagttgatctaagacgtaatatagttgtccccaaatctagtttggatgccactgtggagtttgtgcaatagcttggagtcattaggttcttc

SEQ ID NO: 24262 - DNA, 8125 bp, Oryza sativa
ttatggagcagtgggagaataattactacatcagtgcgatagcgggtgcaacaaatggaagttccttggtggtcatgtcaaaaggttgtctcagctgttcttttgttggaggtctctcatgttactaccattgtattcttcataaaggaccatctatgtttagaaacttggcctgtttctctttccattcacttcgcaggtgtctcaatttttttttgggaagatggttgatatgtcctgatgtagtgatgtgtatatattgacttgcatgttccacacacttagtgtttcttttgtttatgtattatgacatgaatggggttagtctgacatggtgatttactctttccaggaactccttacactcaacagtcttacaaagttagtgaatcgtttcccttcaaatggatcaacaagaaatggaaagaaggatttcatgttacatcaatgaccactgcaggaagccgctggggtgtagttatgtcaaggaattctggattttctgaacaggtatttgtggttattggtgtaatatttttttttcctggtgtgcaaatcagttgcaatctaagcgatggtatttcaattttttttttggcatgtgaaaaagggtacaaaactctttagttgtcagaaaataacttgttttcagatgaaatgagttgtcgtattgatggaaaccagtctttttgaacctgacagggattcttacatcatatatcaagttgattatacttcatctctctcatgtactgcaggtagtagaattggattttttatatcctagtgaaggtatccaccggcgttgggagaatggctatagaataacttctacagcagccactggtgaccaagctgcttttatattgagtatacccaagagaaaattgatggacgagacacaagaaactcttagaacatctgcttttccaagcaaccatgtgaaggtacgaatacatgactaattcctgtgtacattgtttttcttcacagttctctctaaccagaccattcaacttacatttcttgttcaagcgtcaactcgatcactactctaaccttgtcccatactgttgtctttttgtaggagaaatgggccaagaatctttacattgcttcgatatgctatggccggacagtatcttgaggcataccctgcacaccaactcgggcttagcatattcgcaactgagttgatgtcgggaaaaccagcaatctagttgctgctctctgttactctgtatgtgtaggtaacattggctaggtaaaccttacatcatggccagagttaggggcgcgagaggaagcagggaggaaggtggatggacagctaataagctgatgaggatgtcatccggctggtggtctggtggaggtggcagaagcggatgccgtcaacatattttgcatcaagatgtgctttgctgcagtccttgctgcggtgcacagcacggatgacccttatagcctctttggaggcctataatctgagagcccgttgtgtatagctcttatcgtgtcctgcgttttgtctggtggaagcgaaattaccatgtttccagaactccggaattgtctctaaattattgtgtgagaatgggtgtactgataaatcggtgtatcgattccattattcgatggtctcattgcattaatgcaataatgttgcattactgatcatctttttacatcttgtgcacagcgatattcatgaagtaccacttgagagagcggcatccatgaaaagtcactcccagagggtgattatcacgatactccctattgtcacgatgctcctcagagggccgttggtcctacaatttgatgtcaagtttgacattccttttgcacattcgagtttatcacctgccttgcctcgctcaatattcattatcgtctgctttgcgtcgctagcacttagaaattgaccaaaatgccctcgttgctttgtcccttttttctatttcttaggacggaggaaataggtgaataaatgaagggtatcatcttttcgcttatgcttatcagctagaatttgaattttcaattttaaatttggagttggttttgggttttttcattaaagtttatttttcagtctttacttttagatcgctaagaacacgtatataaaagttttattcacaaattatatcccgtgtgtaaatatgatgtttggcttattctacgaataagcgaagcaatgaagctggaactagactatattctgactatctaagcggttcaaaagctatctgagcggtccgaaagcaaaggttaaaagaaacataaagcaataaaaatacccctgaaattaacagaaagcaataaaaaatacctctgaaattaactacaaaattaagtaaatggtacgtagtcgaagcggtatattttgggatagaaaatggtgtttttttttaaaaaaaaacttattattactcccttgactattaaattgaaacatatgagatcacttgaaagctaatgagtcatggtgaatatacaactgcctcgatctacaagacacaatttataggacacacaaaaaaaactacaacatgctgacttagaagccttgggcctcatataaggtgcaaatccttcgcttggctagtacacaaaactcaacatgtaagcatataataataatttatttcattctaaaactaaacatataaatactaaattatcattcacaaatcattttcataatatttcaatccaaattattttatcatttctataatatttaacatatatcccgtaacaaagcgcatggcatcatctagtactttaggaaaaaaaaaaactcctttcatctggaattctttttgcagaaaaacgcgtgaacgtaggattaagatcggacggttccgcatctcgtcccggcagaacagaacacactaacgccggcggcaactaacatccccactgcgcgcatcggaggaactcgtcgtcgtcgtctccatctctccctcctcagatctcaccactccctaccgatcccctctcccccccggttctcctcccctccgcgatccccgcggtcgagataggcccaaaaccctaaccccccgccctcctgggtcggcgccccccgccgcgcctgaggagtgaggacgcggagatggccttcatggcggcgctggaggccgatctgcgcgcgctctccgccgaggctcgccgccgccacccctccgtcaaggacgccgccgagcacgccatactcaaggtattgctcccatcgcccgtgcctcgtgggtactggagatctcactgccgcctcccatttagttgtttttttgctcgctcgttcgtctcggatccaatttagccaggggagttctctccaatggtttccgaagtgtgggctccagctccagctccggtttggttattcagttcaaatacgcagtgaggtagtggcgtaggagtatgattcccacctgatatttttggtgatcgtaagcaggataactaagttttagccatttctaattgaactaattctaagaaatttcaactgtaactgtggtctgccaactaacttagcttaatcactagggttagtgaaaatgtagccaatggttcgagtgcaggatttccatatgctactagtagtggttaatgattatacagactaacctaaccggtctgaatgccaaccaatgcttatatggttgctggtagggactaggggaaacccattccttacctgtaaaacctagtaaatcctcttttataatgctaaatttagactgcagagaatgcttttaatggagtttaaggaattattgggttgccatgttgatttcaatcagagatttttcatttattttttttatttgttcgtttcttatttgaggaactcatgggctcatgctcgagccaggtgcaatgcacttgcttagaatgcttctgtaagaagcctaaggtatcaccagttgtagtatgaactttaaagagctggaggaacttaatgggttttgttcatccattataggagatctggagaaactttataactttttattctccatgtaagagtttgtacaaacttttgtttttttaattcaataagggctgggctttgaatacaacattgccattatagaactcttgacaggttctttcagtggagacctctcttgtattcaagtttcaacgcaagggacatactagaagtagcttatttgtgaaaggagccataaatccacagtagaccagaaccagaatctgagcaagagaatggggtctatcgaaattagtagtggaacacaaatatacgatgatacaatctaacctgattctgctcagaagataagctttgaagtttgaaataccaagttggaaaattgaaaacctattcttaatatttgatggaataacatctgataaaccaatcaaaatgacctttgacctaactacacaagcaagattgttttcatgtattttctagaaattgaggtgtgaacttgagtggtatgcgctgatgtgtttattgcctctcttccactttgtttttcttttctcaaacgtttgagatactttaaatgctaatatgattgacctgaccagatgactgattgtattctgagatcatttatcttctttaccaactgtatacctgttatttgcaagataatgattaagcatgtccttccgcctatctgaagctaatctgttgacgttcttaaatctttggtatcaacaaatctcctccataactcaagtgaagccaataattttgtgttgcaatttagatgatgcatagtgaacaaaagttctgtaatttcttatgttagaccacaaagtaccttttaacttgtttccttcttttaaccgtcatgctacttgtttcctaacttgtatttgaattctttttggcatgcagctccgttctctatctagtccgatggaaatagctcaaaatgaggatatattgcggatgtttctggtggcatgcagtgttaaatcagtgaagctgagtgtaataggactatcctgtttgcaaaagcttatatctcatgatgctgtagcttcttctgcattgaaggatatactgactactttgaaggatgtgagttttgatcgcttctgtatccatatacctctcactattttcatttgttctttatttggtcttaatagatgtataaactgaatcacatattttgtgtcatctagttatcctgatgacctgatgagtctgatagtgtttttctttttgaaaaaaaaaacaaacgtatgtttagaaaacatgattaattactaagtccttttgtttttgcattaggatattttgttgttttattcttgaaacaaattctgtacaatattagctgatgatttctcaatcctgttttttgtttcattttccttgcagcatgcagagatgacagatgagattgttcaacttaagactttgcaaacaattttgattatttttcagtcgcacctacaacctgaaagcgaggtagcaatgccaatggttgccatcagtttaattggttgatttgtataatagatgcaaatgttttgttattttctggtgtagttgcctttagatcagtctgaagcttcccctgttataaagaaagcaccaagattactggccattatcaaacaacttgttaccgctgttagcattttcaaaaatcattttcatgtctttctaatttggcttatgtgtatgaatatcttctttccacgcaataaggaaatcacttcccttattttattttggagcagtctgtttggatttgggggttatgacatgttaatgtgtgaaacataatgcattcttgttcaacatattctggttgactctagaatgtgtttctataatgataaaaagagtaactcaagttgcagtattaatttttgaagtcttctgaggaagttaacatgactaaaattttctattccttgggactgtttagaaccttccctcttgttttgcatagttcatgcaaaacctaaataatatgtgcagtatcattttatctctaatgcctttccaggatcataggaatgtaaccatgaataggtaggcctatttatcaatatattgtttatatctcttcaggtgaacatgtctcaagcatttgacatatgccttcacctacttgaaagcaaccgttcttctgacagtgtccgcaagtaagttccttcgcttaccattaactcagctattctgacttcttttattgtgctctcctaacacacatattgtccttagcacggcagcagctacatttagacaagcagtggcattagtctttgataatgttgttcatgccgaatcacttccctccagtaaagcttcttcagcaagactcagttcacgcgctagctctgttgctgataatgtcactcgtagcttcagccacacactgtaagactgtctattttatcttacattatacttaacgccatgcaggaatgctatttggacatttgaaatctgttgttcatgatatgcccttttttccttgggaggctttgacaacaatggcaccgtatgtattatagtataatataatcagcttcacaataaagctcgattctttttttgccatcgtgcctattaatgagcacacacttgcattgctgaatcaacagttctcttatttgtactgtgtttagtatatcactcatgttcatgtgctttatttggatgatatggcaaccacacaatgcttgtatttccattccacaagcatagacacatgacaactaaatgtatcactgatgcaacacatatatgccatttttcactctgtggattttttcatttcttttgcttgttaaatttgtattttagcttacactagcactgcatgacaggtatagggaggaactctgtggagcctaccgtgagggaaaaactgagcaagttggcaagcttggtctccgtttacttgaagacctgacagctcttgctgcaggtggatctgtatgtgcgaacaattcctgattgcacttatttattcttgccacatgattttttgagacttgccgcataattttttggagtatctgccaatttttattacggaatttctacaccttattttctgattaagctattgttgttattttctgtaggctacgtggcttcgtgtttattcattgcataggacatttgcccttgacattcttgagtaagttttctccacagttaaatgtctgaatgtttttttgtattttttcaaggcaattataattttgtagttatcttgacccaatcttaccttttttatttcaaattaagttctatgttaacaagatgtttcaattgaaccattgttatcggatgttagtgaagctcatgatctgataacactgatttggagtgttgggttctgtcaggagttttagaaaataatgtgaaggacattatacaactgaaattgaaaaaaactaatttcaacatttgtgtattcacctagaaactaaactttatagtgcaacttgtatatagagcaagctagaactcatctagacatattttgtgccaggtttgtgctatcaacatatgtttctgtattccgggcattgttaccttaccagcaggttagttcctatgtttcttttattatgtctaatatttgtgcaaatgttgatttgtaacttacgatgccattaaaaacctgccaggtcttgcggcatcagatatgctcgcttcttatgacttcactccgtacaaatgtggaagtaagtacatcaaaatcaggagttagtttttaaaattgtgtaacgtgctcaagtacatttgcaaaattgttgcgttaccacagtggcaaacgtcattggcagcagaacaaacttctgacttacaacattactagtatagaagtttaacaccagttcagatgccacaccacttatatgagggaggcaaattggattccatctaaaggaacaagtcagtcaacatttccctggcctattgaagtgtttgcactttgcacagcctatatagttgtactttcctgaacaagcaaccctctttgccagcttggatttttgaaattccttcctaattgggtaaaggcctaagagatgcaaaatgtgcctacccttccatttctgttgaatttctcagcatgaatgcgaggat

SEQ ID NO: 24263 - DNA, 665 bp, Oryza sativa
tcatctggggggtttgcatgtttacacccaaacatgagttcgcactaatattctcttctaacatccagctatcaatttcctatcactatcaataccaatacagctacactccttccatgtatgaataattatacattcttgctcactggtcctaaaactaaaaaattaaaacgctggatatgagaggaggggctctcatatcagatattattaagaatgaggctcgaaattaaaggaagatgcctgagccttcctcaactatcatgttttgttactacaaaattatagaactacaaaaatgcttccgtttgcaaaattggggcaatgtaactgcaatggttcacaaataagggcagcagaacttttttagtcaaagctttgttagtaacagcaaactgaattatgcaaagaaaataccttccaagacatcgaataacttccggagaggaattaaacctttcattctgtggagcctccagaaataggttgacaacaatcggcacaagcttttctatgaacataataccccagccacagcccactgcattatccatttttgtgctgctgttattgagatgactccgttcaactgtaaccataataaaatcacagagagtaaatcaagaagatattgtatttcattatattatgaaaagttggatatc

SEQ ID NO: 24264 - DNA, 2311 bp, Oryza sativa
accctatgggtataatgacatcagaatcgaaggcaaaggcaatgtatattaagatttcctcactcagatattcatggagcgaacatacttcaaaattggattatcttttgtctatcttccttgcccataagtattttccagcacaggaatgggaggcccataaattctataacaacgatcactaagtgagctcactaaccgggaaacaacttccttgaagaacatggaagcaacctgaaatgaaaagcttcagactaaggactgataaatcacagttaaatgaatgcgcttcatgtgcacgatcgtaacggatgattttacctgacgatatagtggcgactgaaacttaaaatcaaccaagaagtaaaggtcacatgttccaggaacaggaccaggcttgaactcccaaacatttatcaaatgatcaaaaagtccactttcagatgctgtcgtctgcaatcgagtaaataccagtcagaagtaaaacaacgcatctgttctaacatggaaaaaaagggtaaaagtaggaagtgaatggtcacagtgaattatacgccatttccccacttgttcggtacaaataaaacaaaaatatgcaacagaagttttactcagaaggggcaacagattttaaagatttatggcacttataaatagttgcaacataagtacatttctcacgaaataatgaacacaatcttcaagcaatcatctaaatactaaagttagcacggcgtctgttcaacaactatcttagttaaataaaatagagcatcccagttaaatagaagaagtttatatcaagatctgcagtgatattcaatcattagaacctggagcatgagttagcacagcatctgttcaacagttatcttagccaaaacagggtgcattttatcatgagcagcaaatccaagttgctccaaagaactgagattgagaactggttaacagaaatcatctgtgcatacacacacacacacacacacacaaactcccacctatgcatcaaatcttctattcaagaaaaagttatcgtaacaaatctaacttgactactcccaagtcaaagtgttagaaagtttccaggtttcatgcagcaataatcgcatcagccttcctacatcacaagaaaattttgttgcatgccttattaaaaagggataggtgaagctactccatcagtcagcagcatgatgacggttttacagtatatataatttgatgtatggtttaaggatgatctcagaaaaaaactactttgccaatttgccattgacaactgcagttcatgttagcgctaaaaccaaaaccaatattcattcagaaagcaggcaaaataaatagaaacattacttttgtccgggttgatacagccaaatgatgtactatatcttctcgaattaactaatgcaactgttacttcgtatttcagatattctaagttatagccaacattgcaagcaattcaatgtgttcactactagtcggcacaagtaacatcatatctgactgtttcaagaaatttggcccacatagccgcattgaagaaagaaaaatgaaaggcacgtcctcgacgacagaatttttacatgtttggatagactacaagtaatcctagaagaagtaaacctttagcagatagttgtgaagcaatgtgctaaggaattacaacacaaaagaaaaacgcatgactaaggtgacccatgtgacaaaacttaactaatgcggcttcaacaattaatttgtcgctttcagaaccatttagttattctagatatgcttgtgttccatggtatgttatgtactaaccaataaagtatggtgatagtaccatgatgaagttctcaccttgatatattttggcttctccatctccacatgagaaacataactctcgacaaggaacttgaatccaatttcgagttcagcatcaaacgagccattctcgtgtcgcctgataatcctagacctctgacaccacggcacaaaatcctcatagaggtctactgccgcgacaacagcgaacatctgctccggcgagtacctgcacccaccaacgcaccaacaatcagcaccaataatttccgtttccaaacaatcagagaaggtaaaattatgagctgcaaaacaatcggtccaatccaccgtaccccatgacgcgcctctcctcgtagaccttggagagcacgctcccctcatccccgtcgccgcatccaaggaaggacctcgtctgcgtgcccgcgcgccacaccccgcccgccctctccgcctccccgcgcgggggacccgtcggatcggcccaccgccc

SEQ ID NO: 24265 - DNA, 1518 bp, Oryza sativa
gcgccactcatacgtgcaaaactactttaaattaatttttctcttaaattatttatccaaatcataattcgattgcaccattaaattcgttgcaattaaatctttaaaacaagaccacacatggatatattccgacgaaatttttttagcttattattgatttttttttaaaatgttgcacaatgttccaccaagtatatcggaattgtttcactaagtagattgaaaatgtttcaatcgtttaaatcgggtattgtttcatcttatataaaaacaatgtttcagcaaaaagcgaaagaatgtttcagttcactgcaacattagatctatacatagtgaaacactgtgagtacattaggtgtaacaaaaaatgaaacgaattcccttaatacagggtttccaaaatatgtgggtgatttattgcaaaagaatgtttcgttcactacaacattagatctatacatagtgaaacattgtgagtacactaggtgaaatatttttggtggataaaaaatgaaacgacccttaatagagggtttctaaaatatgtgggtgatttgttgcaatggagtatatggtgcggaccaaggtaataaatagcatatagtgtgtttatagcggattagtgtctggcagcagattgcggatagcgggcgctattgcggacgctaagttccaatagcgaaattaagaaaaataaccataaatttagattgtatatcaatattaacataaagtttcacttaaaatttaaaattagactgtttaattactgctacatttcataacataaaatttatgaaataacatatagatatattagataaagaagacaaacaatgctaaattattctatccatgcgtgaaacgctccgtttgagcattatagcgatctaacaaagtcaatagcgggttgttatagcggtcgcgaagcgctatagcaagctgctatagcggtcgtggagcgctatagcggccgctaagttccaatacgctctatgcagtccgctaccttgtagcggtagcggtagagctccgctactgctatagcgggcgctacgaacgctatttattaccttggtggagacacatggtatggggggcagagaatgtggtggggccaggtgcctgcatcacgcgcgtggggggcggggcgcgcaggggagtgcccgatctgctccacccccgccggtcgcccggtagccagcatttccgaaaggaaaaagtacgaattacctccccccgaactatcgcggtcgtccgaattaccccctgaaccacaaaaccagacattcttcacccccaactatgcaaaccggacaaattacccccctcgacccaatccacggtggttttagactatgtggcgtacacatggcagtccggtcagcattttatttataaaaaaaagtgggacccacatgtcacacacactctctctcctatctctctctctcactctctctcctctcagcaatggcggaggaagcgagcgcgggaaggcgaggcgagcgcgac

SEQ ID NO: 24266 - DNA, 5683 bp, Oryza sativa
  unsure (1)..(5683): unsure at all n locations
agaaagtgtgtgagagagatagaagagagagagtatgacatgtgggtcccacattttttaaaataaatagaatgatgactggactgccacgtgtacgccacgttatccaaaaccaccgcggattgggtcgaggggggtaattcgtccggtttgcatagttgggggtgaagaatgtccgattttgtggttcaggggggtaattcggacggccgcgatagttcgggtgtaattcgtactgacggagcgtggggctcctcaccgggagaccgcgcgggcccccctttgccggttcggccgggggcgctgggtgaggttctaagcccttgatctgtggaatggttcgcgaaagagcaaatgcgcaagacacgagcgatgtagacaggttcgggccgctgagaagcgtaataccctactcctgtgttctggtggatctgtgtatgaaggagttacaaagagctggagagcaagagagttcaaactctagagcccctctccctcctcttttctccagtctaccagctccggtcctctctcctttttttctccttccgtccgtcccctcttttggtaggcatggtcctccttgtatatctcaaggggataccacatacaccatttctacctacccttcttttgggtggggacccatcctactttgaccaaaacttggcttgtaccttcgtctgacaccgggataaccctgtcctccctcattaatgggcggagatttacaatggctgctgtccgaatgaccctccgatgggatgggtcataccaacctccactccgccggaagcaggtgcaacgtggaagcacggttgtttgctgatgacgcgaccggcgtcagaccagtcacagaccggtcattcttgtccaccacgcgtcagtttagcatgctacacgtatgcccttcttcatacaatgacctccttgcaatggttgcgatgaagcctggaatgtatctggccggggctgacgtgccaactccaggagttcccacgccggctccggctagggacgagtgtctggaggctctcatcattccgacgggacggggcgaggcgtgtgtcaggccgcctgttgccacctaacccgcgatctgaccggtctgtgaccggtcacacactgcgaccgatcacggaccggataagcatgcgctatgctgcattaaatgcggcgtgaggcgctcgtccaacccacaataaacgcggttaggtgagcgccgctgtgctcacctaacccacacacgtggcgccaaaccctcagggggtcggggcgccccagccctcggggggtcgaaacgggagcggcccgacccctcggggagatagagggtggggcggcctcatcaccctcgggcccgacccccccgagggggtcaggccacgtgggtgaccgcggctgccccaaacctctagtcaagatatccccggtcccatgtcaccggcacgtaccttttcctttccgaaataatagaggaggagttttgggtccggtaccgcggtggtgccaacatgttcgaagagaccagcccacatattagttacggcctacaatagactttcggttaaccgacatatcgcggcccaagcagatgcttgcgcttgcgctaccgtctccgtctcaatccccaattccccatcacccttattaatgatccaggatccaggttttagccgatcaatttgctccaatctcacaatttctccgccttctcgtcctcctcgccgaaccacccccatcgacccacacaaccagcgaaccggaaggatttcactcagctgagtttcctgcctccatccccacggcgatggcggaggaggcgaagaatctggagacggcccgggccgaccgctccgtgtggctcatgaagtgcccgaccgtcgtctcccgcgcctggcaggaggccgccaccgccgccgcctcctcctcctcctcctcggacgccgccgctggcgccaactccaactccaacgcgaaccctaaccccgtcgtcgccaaggtcatcgtctccctcgacccgctccgctccgaagatcagcagctccaggcaagccgttgatccgtctctcctcccggcccacgctgttcgctcctgttccgtgcgctcggtcgatttattcgtgcacgtggagggtggtttcgtttcccccttctattatgctgcttcaatttttagggtagttcaatggttggggcgagatgtagcggtttgatttggattgggggacctgtttgatgtggaaggttaagttgattggttgctttatcatagattgccacattctgaaatccaaaacaagaccaatggatcattgctattgattttgtgcttttaaatgctaacactagacagtttgcttcaatttccatctcatcattggttaactctgtattgtgtatttcactggccatggtggctaagcaatcttgttgcaacttaaacatttttgaattcaagcaattagtacatgtgttgttgcagaatatatttctttgataaatgattatactacaattcttcttatagtttttgggagaaaagcccaaagcaatttggaggcataaaccaactactgtttgagcgtttgaaaccaaaatgaatcttaaaaggttttaacagaatgtaactttgtaattaacttcaaatgatttgttatgttgcagcatagttaggattacatccttgtttccttgacgtttagatatgttcatgccttaaaagcagaagctactgtcatggatttgcattttctgtattcttgtataatagtagaaattgacttacggcttctatacttgtacacacacccagtgcctgtttcttatatgttgttagtgaaataacagttcaagatggagatggctcaaacaggcaatggcaatacaccaaagagttactccttgaacatgttcaaggattttgtgccaatgtgtgtcttttctgaatccaaccaaggtaagaataccaggctttctctttatttacgatgcttgcatgtatttctcctttgatatgtgagactttatcactagcaatttctcatggttgatgtgcagttcatttttattccaaatacagtctaggaatagcgttgttcaaatggtctactaagccgtattactaagctatatcgaaggaattggtgcactacctgtaactgtatacttgctggttaggctgcttaattggattgtttaggtcatgcgaccactactaggtgggtgagcaacaaaaaaatacatattgcccatttttggaatatcatctgggaatatgtaaaatataatctgcattcgtactttcctagactttaatgcactgagccagatgggagaggtcatttagttatagagttctgggttatgatctcactatttgtatgggggtgtctgtgggtaattgccttggatcaggttctgattactatctacatattggcttttcatcaaacgttgatgttgttactatcaatatttttttttgttctaatacactattgaaactgtgttctcaacgtatgaaactatcttctttttctataagtttgtatatgatctggaatttttatcggaacacattattgatgtttcaattcttaatttactcaatttctgcattactgaggacctccttgaagttctgctgtctgctggaaacttcatatggcttgcgtctaccgacatatcttacgtgcattcatcacataggtgtttgcataaagatttggttggcacaggatcatgctacattgaatatcccatatgtggttgatgaattctttggttttagctttgctaattctgttacgtggaagaagttcaagggcaacaaacattttcttttgtcatgttcttgccatttcaacaattttttcattcagttctttttggtgttataccttgtaaagtcttattggcattttatttgctgtattttgaagtcattgtggtataatctcctctactacatatgctatagcgaccttatgggaaggactatgcttcttcatttcatatttgggttaggaaggctttgtgttgatagtatttttcacggcttgaagataacatggattgcaatctgtttgctctgtaaacatagtattaacttatttgatacactaaatcatcaactccttgttacagggaagctttcatgcgaagggaaagtcgggcacaaatttgacatggaaccgcacagcgataatcttgtgaactatgggaagttatgtcgtgagaggactcaaaaatctatgattaaaaatagaaaattgatggtaggagtttttatgatattatatatgccatattgatctgcttcatatggtagaagtatttattgtacagattcaccttttgcccttgtctgtttttaggtacttgcgaatgacaatggaatgagcatgaggccgttgcctggcttggtgggtctgatgtcttctggtccaaaagtaatctttcttcagataacaatgccatgtttcatgtattttttttcctatgttgatagtttatcggatcctgttaactagcacagttccttttcccctcaactatcaactgctccgcagaaacattttaacttactttttttaaaccaatctttctattggcaatgtagatctataatgaagggtctataatctattgtaagtttttttttcccagcagaaggagaagaagccactaccagtaaaaccatcagacatgaaaagaacgagaagggatcgcagggaactggaaaatatcttattcaagctttttgagaggcagccgaattggtctcttaagaatctcatgcaagaaactgatcaaccagaggtattttttctcaagttatcctaattatgccgagggtggagcatttgttaagaaattgctagcaccaactctagttattgcatgttctgatatcaaagcctcaactctcccggcttgtttctgtgcagcaattcttgaaggagatattgaatgatctgtgtttctacaacaaaaggggtccaaatcaagggacgcatgaacttaagcctgaatacaagaaatctacagaggacgctgatgctactgctacttagaagtcttatgcttcggtctactagataggagtcctcgtccagtgtggactccaatccgttacttgctgcgttcaaggaaatcttggatacttcgtttatagtttgtttcttgagaaacatattttgtacgcatcaagcgatacatcttttggtgttactggcggccatatcttagacccagatttcggggactcgatatattcgtgtccatcagagtttagaaacaaggatgttgaaatttgtgtgtataatgtattttagctcttctaggcaaactaacatgatgattttcatgatcattaaacaccttgacctactcttccctgcatatccctcttttccatggatgtcaggctgggacgaaaccaactgagatcccttgcagtactgcaatagtaccacacaaatttttgacccttttaaaaaactaattttaattttacaaataaaccgttgccaaaacttatttcaaaaatgatactttttttcagcgtcaaatcacccggcgctgaatttagacaccttancgccacgtcaactggcgctgaatgccgtactatcgcggatgggaggctaaggcagcgtgctaacgcacattgagcgcc

SEQ ID NO: 24267 - DNA, 7222 bp, Oryza sativa
gtgtaaaatttatcacaccataaatgctccatgccaaatttgccttgttattgcaccagtgaatcgtaatgaggaaagcgatgtcatatgttaattcttttaccgaaagttgttgatttcgtttcatccttctatatccattagaaatggcggtgtagaaagatattacagaaaatgaatggtttgggagatgcctctgcgttcctatgcagctgggctctggttgcatctcaacatggcatagtagtgctatatatctctctccttgtattttaggtggttgtgttgttgtgttgttgctattcgatcatttcaacgcatcaaggaaatgagacaactcaataattagttgctcagagtgcagctcttttcttctcatatggatagcccatgttccattattttctacaacaaagataggttttaacattccttttatacatataatcctagttcttagagggcaagctcttactaatgtacccaggaattcatgtcaagagcatttgcagtcaggcatcataggagattaaagaatcatgcattttgggtgtaaatgtggttggaaataggtatcagtatacataattaaggttatagatttagactaagaaatatcaagtttccggcttatcggaacacaatagttcagacatgcaccggcaatacagctttgcaagaggtcacatggggatttacaattgccttgtcattatttgtgtactttgttgttaagaaaactgtagtttggaaatgaacaccctgggtcattgaagattgttgtgactgctcatcatctttatcaccttgccaaattcttatgcggttgccataggcttactcatgctttccatcagtattcattaggattaaagtgtcattcttttactaaaactgtaatatgctcattatttgtgctttactagcatttgaattcttttctgggtagggaagatttgcactgcaaattgtttacactgtttcagttgttcttaggtttggttgttgtaggcttgtagcaggaggattgactatatctggccatcatttcatagttattaacaggaaagatgatgcaatggttttatgatttgtaataattggatggggctgattggacattatccttatgccatctccgtttaaactcatttttttttgtgatttccattttgctctgctctataatttgagtatttgactattggaattgatatctaagctattgtaacttactttgactatcatgtctattttttattataggtgagcttttgacaactgaagaagcaaggaggcggcaggggctatatgatgagcttgcctctgtcggtaagctctctcctgcactcattgtcatacgggagcatctaccttctggaaaagcatgcctaagagttaacattgatgcaacgaaagtggggaatgtggctcgttttatcaatcattcgtgtgatggaggcaacctgcatcctgtcttagttaggagctcaggctcattgctcccaagactctgcttttttgctgctagagatatcatcgaaggagaagagctcaccttcagttatggtgatgctagacttaggccgaatggcttgccgtgcttttgcggtagcttgtgctgttccggcctacttccttcggaagagacataatgccatcatttgtaattgagaatttcctgatgtggtgctgccagaataatattggcatggcatcaggacgagtagacggtacctcagtacctgatgagtgatgactagtgctttcacaaattcagtgtacactatgcatgctgccttggccgttttcatgacccattctgtaacttttatctgacactctgagaaaacgacttgcaagctatgcattctttgctcatagcatagtgtaccgcaagttaccggagggtagagagtcttttggtagggatgttcttaaatcctactagtaaaatgcaattcatgctggcagttgggcatgcatttcccgcttcaggagtcaggaggtgatgaagatgaatcctttgacaaagaagactcctggagagagtggaggactcaacagaaaaacaaccttgtgccgttgcaatcctttatccaaagcacacttccgtttccgctttccctagcgtttgtttcctctgtgcagcaaccgcagcttatgccaatgccaccattgcccatgccccatgttccatttgcactagctttgcaagtgttgtcagagtaacacgatcgggcttcgcatatgtgctgtcctatgatcccgtattcctgatccatatgtcaattgagtcttttactgaagaatcctaggattttgctgtctgagctgtgtgcctgtgagcttgaagcatcccggtacatggcagcatcacttggggtcttgggctatatggcataaacgactcccgagctaacaccctcctcttccctctccccgtgagatccgcacgcgcagcacccgcatgaggagcgcctccgcgcgacatggccctcataaatcttgcgtgcctcggtaacaagacgattggccacgccgcgccgcgcgcgcccacgcgccgggccgccacggctcagtggcgcgccacgcgcgcgcccattttaaaaacccctcacttccgccttggtacccccgcgcgcgggcgctggcgctggcgcacacgcacgcacacatgcatgcagcgcagccacccggcagcagcaagcgccggggcgccgtggagcggccagctagcggcgcgggcctgcaggcggaggaggcgtcgtcggcggggcccggggcgccgtgcggggcgtgcaagttcctgcggcgccggtgcgtcccggggtgcgtgttcgcgccgcacttcagcggatgcggcggcagcggggtgggggcgggcgtaggagggagagggagggagcgcggcgcggcggagttcgccgccgtgcacagggtgttcggcgccagcaacgtggggaagctgctgtcccgggtgcccgccgcgctgcgcgggaagcggcgcgcacggtctgtacgaggcccaggcccggcatggcgaacccggtttaggcaagggtgggcacaatcttggggttcaagcacaggtggggcacacgatctgtttgaaaattggaacagcaacgaacacacacaattcacagcctcctctaccagtcataaatcaagaacaaattcatgtcacaaacacaaactgacacaaataatattgacccctatgaaaaattccgttcttctgattcgaaactccattacgcgagacgacaggtatctctcctgcaagggcagctctccgtcctggagtctcagctcttcaacctgcgggtggccttggcgagcgcgcaccccgacacgccgccgcagcacttcgtcgtgctgcagccggcgcactccgcggcgtccacgctgaaccaggtggtggtgaactacgacgacctcccgcacgccgtggatttcatggacgcggagcccgccgcgctgaggggactagagtctctccagctctcgcagccactgcagcgggaggaagacgagggccaccgagacatgaacctcttctcggacagtgtaggacaacggcagctgtaaaattacctgtgcaattgcatgattaggtgtctctgtggctagtacattcactcttgagttggaccacattgtgtgatttgagaattgcgtgggatcatcaatcatgaatatccgtattctaatttgatcaattccttcacgcgaatttcatgttcgtgaaaattatacattttatatgcgcctttttaccctgtgaattatgaaaaaactatgaatggtagcgatccaaactaggagccaaaaatgaaataatccagtgttcacaaaaaccgatccgttctcatcaaaaccgcactgtgttttgtgaaagtgaaactattggttgttgatttctaaaaaccaatcaatttttgctggttttcgcacgatgttgacttaaagtcagtccttttaactgattttcggtatgtttagcataaactcgtgggaaatatcagaagatgaagatagagaggatgactttcatggagagaagcatcaaatgtctatcctatgatcctatcctatcctatctacacaaatcttctcatttacacaccaattaacaaattttattaaaaaaatatagaaaaaaattgtacaaacacttctaatagtattatacttatgtgtaaagtcataatctcaaattcattatattttagccaaaaaaggataaaaaaattataacagttttgagagtataaatatgtgagattctgtcttttttgttgctccctgtatataatggatttcaagatgagacttcacacataaatacaatactactaaaagtatatatataattttttttctagattttctagtgaaatttagtagttgatgtgcataatatgggggtgtttgggagagacacacaaaaccataaatccctagaagagggacttatatttttatatttttgagagaacacctcctatgtatacgagaaaacttatgtgcataatataggttcctctgcagaagctacaactaaatgcagaggattcggctcccacactatcaaagtactggaagttttaatagatgagatctcgtgggctcagtccaagtccagtgcaggggaccaaagaaaggcactactccgtcgtgaaggctaaaaagggagggggatcgaggcgagaggaacgccaccgaacccaaaccccatccaatcaaaaattcgtacgggagagctctcgatttgatcgccgcgaccgcgaggatgtacaagtcgcggctgcaggagctgtgccagcagcggcggtgggcgccgccggagtacacccaccggtgcgcgggccccgcccacgccccgctcttcggcgccaccgtctccgtcaacggcgtggagttccgcacgccggaagacgccgcgcggtcggccaaggaggcgcacaacatcgccgccaaggccgccttcgaccacctctcctccctcccgctgccgccgcctccccctccctccggtgagtgccatcttccgtgcggaaaaaaataaaaaaaaaatcccccgcatttctttgttcctggatttttcggtggaaccttccttcatataggaatcgaacctcggggagcggtaggaggactagatttgggtaatttggttgcttgtagtttgagttaactgcgaattctttacctttgatgggaggcctgaagaaagaggcacgaaccatttggttatttactgggattttttttgtgtgaaatggcaaaccgagagttagtttcttggcgactgcaaagtttacaggtgaacagtgaactgattacagattaatggtaaattgcagcgaagggaaatgctcaattgctcatcaacttcccacttgaaaaagtaggagtagtacaaagcgttcatgtaggtagatgtactcaccggtacacatcagtctttgatttggcattgaagaagagttactgcactccactcaatgccccaatgaaatcttgcaccataatagctagtcgattcctgaaggtagcaaaagtttggtgagagcataaagaacggattgtcttttctttgtggatcagtttttttcataagttcatgtgcatctttgttgattattattactaaactataggaaggaaggtcgagcacatgcatgggaaccttatttaatgtttcatgaaactcctttattttaaagaagtaaaaaaaaccccgctaatgcttatatatgcataatatgtgtgagcttctttttgtgtctgttactcttgttttgaacttgtgacatagattttttttccgactagtcattgtatatttgaatattatcattggaacttctaaaagatgccttcgaacaaatatatatttgaaacaacttattttggcttgcgtaattagctgcattgtctagcttatttgttcagcgcctgtgatctgcgaaaaggatcacatgtgtttgtttgtggaacaatttagatgttggggatatgtacattatctttttttttctaactggtgtacaagcactgacatggaaaggttggatttaattgagttcgtgaatgttggaaatggagatctcggcttactttgtcctaattgtcctgatccttataacataatgttagaaaacacttagatcagatgggaaaatgataaaactatagagattaaatagatccattattaaataacacttcaatgttgctactgtaatgtgcccgtgaggactgtcgaaattaattagctcatatttctcatccttcttgtgcatccatgttagattgcaatgaaatacaaagaacacaattttatgttcagtaaaaacgatctatacattgcaatattcttgatcaatactagtacattacgctaagttctttcttgtgtcttgtcgcatgctactgaatgtttacagtattgcaaatgtattgcagcgaatgtcgcacaggcatgcacatcaatatattgcagtatgaatcatcatttctaaaagacatggatgtgtgcctgtaactcaaagtctaaactattatagtagcattccatgctgagatgtccatgcagtaatctttagtttgttgtcttctggtgaaaccattttccatgcactatggtccatgtggcttgaattagtatccaatacctgttataatctgaactatggtccacaaaatcaacggttggatgttgttctttctctgggattttctatcgtacttatctatttttttcttagggattccaatcgatgtttgatggacttttagtatataataggtaacatttgtagttgcggggtctaagagcaccgtgtactggcatggtgtaagaaaattgttgtttttcacttttatattctctatatttctcatattgaatgatttttcctattgcagaaaaccaatcttcttacaaaagtcagttgcaaatttatgctcagaagaagggcaaactgttgccttcgtaccaaacaattcgggaaggtccaggtcatgcatctcggttcaagtcagtagtgactgtagatggcaaagcatttgaaagtccggaatactttcacacagttaaggaggctgaatccggtgcagcaaaacttgctcttatgtccttacctcaagaagcaagctcatcggagcaagtgccggttagtcaagcttattacaattcactatttactaa

SEQ ID NO: 24268 - DNA, 632 bp, Oryza sativa
  unsure (1)..(632): unsure at all n locations
agaagctacaaagagctggagagcaagagagctcttactctagaaaccctcttctcccttttttcctctcgtgggatctactctccagttcctctctcctttcttcttttggtccatcgttcttttttccgtccccccttgctaagtgggagaggtcctcctttatatctcaaggggataccacaggcaccatctctcttttttgtgtggggactaatcctctcttttctcaaacttgacttgccttctcttcataaatggacggagatttgtaatggttgccgtccgaatgaccttctgatgggagggcccatacctacctccacttccgccggaagcaggtgcgacgtgggaacatggctgtctgccgacgacatgaccagtgtcagaccggtcacaaatcggtcattcttgtccaccacgtgtcagtttaccaatctgcatgttggcctgtggtggagggggggctagcttgtaatggttgggataagctggcatatatctgacggggtccaanntgccacctccagaacctaacacgccggttccggctagggacaagtgcttgaaggctcttatcctgacgggatggggcaaggcgtggttaaaaccacctgccgccacctaaccca

SEQ ID NO: 24269 - DNA, 3258 bp, Oryza sativa
tcactactcaggatggcattaatctaagaaaaaatgtccatggtgtcgagtaagttaatctgctactctgcttatatgtatgttgctttccggagcgtactttaaagtcatgcatggttcttgtatatagcagctaattcacgtgcatcccaagaaaaacgaagatttaaatacagcatttgcccatgcaaacatgtcttgggccttattcactagtcttataacttctcttttttttcctccatcgcacactgttatgtttgtacacctctagacaagttcttgtgaatcatggatcatacatagggtcttaagacttatatactgatagcttcttttaatttgaaatcatgcataccaagttactgactattgtgtttctaagggacttctctattacaaggatgaaaggaggttatcgtcgggtgatccagcgacctattgattttgaatggtaagtgcaaccaagtgtttcatgccatgctgttcacctttttaggttccaatttatttgttgtacagtaaagtaaattttagacaaataaattccatgcacctctgtgtacggttgttggatatctgctgatattcatttaatttgttgttttatgtagggatctcatcacttatacagatgagaaaatacctttagtagaaacggatttagatgttttgtctaaaacgaagccattagaagtaaatgaactactatcagatgggatttccagctgtacatcacatgattctgggctggaagcttcattggatgcctctgaatcaataaatggagctagcctagtagtagcagaagccaaatctattggcagctcggatatgttggagaaactggccataaaattagcatttactctaccagcatcatcttatgctacaatggctattagggagttgatgaagacttcaacttcggtatttctccaattctctgatcatttctttgatttttccaaactaaaacttagttatgagcaaatttcatctgttttctgtgtcgttaatatatttttatctttttggctgcacacaggttgctcatcagaaaacattaaacatctgaaccttcggccatttgcattatttatgaaactaatctctgatctaaaggacatggatgtttagcatgcatgttatgttacgtgagtaaatattctctcattttactgattagtttttgtctagtccttaatcgtaatgctattttttggggggagttagtaatccgctgtttctttgtgcttgcaatgtcactcttgtactgcaatgggagaaaaatctaagtctgatccttcaaaaaagaaagagagagaaggaaaggccactgaagcgtcgtgactcgtaaacatgcttagctcatctggtgtgtaacaccagaattacatattaccgatttgtccatgtaaccgctcgtgcatattactacagtcacgtactgggaattgcctgtagtgaactagtgatatgtactaatgtttggttatcaactactccgctttatcgcagtttgacatgcataaggtttgtcaacttcaattatactggcagcctgttagctgtagccacaattttaacaagattcttttttaataaactaggttccacacaccattgtgtaaaaaaattgtaataaaatttccttacgctgcgtttttttctcccattttccaactcactctctcgttttcccacgcacgtttttcaaactgctaaacagtgcattttttacaaaagttttttatatgaaagttgctttaaaaaaaccatattaatccatttcaagttttttagctaatacttaattaatctaaactataatcgcgtgctttgttttccgtgtcaggtgcctccctaacacagccttaagcttgctaagatgtgaccaagaattcgttcgtctcaacttatgtgcaatatttgttggcaaatgatgataaagtataactagaaatcaaacacaacctaaatctaatctaaccttttatgttcttttttttttcgaaatttatgtaggcaagatatctgttgtatctaactctaactctagaacggagagaacgaagcggcctagaggtgtggtgatgagcgggttgttcattttgttcgattttctctcttgtccattgaatattgccactttcccctattttttctctcttctcaagtacaaatcatgattttacagaaaatatacagctgcggctttaaatttagatttgaactattcatgctcgttacaccttatacaggctgattgctctagagcggttatcaccgggattccaataccagagagcaaggataatagtatagttcatttcctactattagctcatcttaaaaccaatatatataatagattagctataagattggctacaattttcttctcctctctctatctatcacttacacatttaatgtatttatcttggatattgtgctaagttagctcttgtataagagccaaccttttgatttttttgttacctctcctccacgtaagtttacagtaggcttatagttcactattatacttgctctgattagaatcgagctcctgcatttttgtttcgaaccgcgagccagcacgtactaactgtgccacaacgctaaacgtatcgacccgtcctctccgcttttctagctattacctgttccttgcctcaaagcgattcaacccggagggggaaaaatgggttagtttgatccatagttatttagataaatatcattataattcgtgtattcatagatgtgattaaaattttacgaaattgaaaccgtgatgatgattttgcttaaaatgtttctctgaatcaaatactataatatcgtgcaagctctccgcttaagtctgaatgtatcttgtcatcttgtggaaagcgggttcagataacaacgaatgatcatgtcccctataccttaaaaagaaaaaataatcaaggttgaagggctagtttaatattggaaccttttagaccttgttcgattaattccttcgataaaatgattaggagaaatttagagaggatatattccacatgtattatgatataaaattattcttcctcaaatcttttcattttttttattaaacgaacaggccttaggttgctttttttttataagaaagtttttgtttggcctatcacggagggtcggaggccctcgcgcctcgttgatgcggcgcgtcacgcgtgctctggaagctggtgcctctctactgatagggtgtttggg

SEQ ID NO: 24270 - DNA, 6869 bp, Oryza sativa
tctcccatacagcccccgagtctactcccgttcaacttcgagcacctgacgctacgggctacgggggtcgcgacgacgtcgcgtgctgctgccgtgcccgcgtacgtgccgtgctgcggtgccaccacgcatcacgcttcacgcttcacgcatgcccgccgcgcgtttcaggcggcgtcgggattaccaaggcgcgggcgatcgaggtgtagggccgctactggtggagtcgagcgagtgcaacatatgatgatttctttttcttctgcccataataaaggttgggcattttgctagtgttgtgtatatatgaacaagaacgcgcccagagatccctccattaattatcccccctctctgctccgtcagtcggtttggcggtcgatcgatcggtgacgccgtgacggtgtatgtaggccgactggtccacgtacgtgcggtgcgattgctgttgtgatcgaggaaccgcgaaatgggtcgcgggggcgacgtggacggcgcggcgggcgcgctgcggcggttcgtgcgggaagcgggagggtgcgcggtggtggacggcgggctggccacggagctggaggcgcacggcgcggacctgcatgacgagctctggagcgccagctgcctcgtctccgcccctcacctcatccgcaaggtcacccaacacacgatgcgtggtccttcactttctccataacataactccgagttgttctgacggcttcgtgcaattaagccctgcaggtgcatttggactacctcgacgccggcgccaacatcataacctcggcgtcttaccaggtgtttgacaagctgttgatatagtaatagtatatggcgtctaacgtcggctataatctcggtgtcgtatatacggtctcattttcgcatgcaggcgacgatacaggggttccaggcgagaggcctgtcgcgtgagcggagcgaggcgctgcttcgtcggagcgtccacatcgcgcaggaggcgcgcgccatcttcgccgagggctggtccaagggcccgtacgccaaccaccgctcctcgccgcgccggcccgtgctcgtggccgcctccatcggcagctacggcgcctatctcgccgacggctccgagtacacgtacgcacgccccgatcgatcagtcgttgatccctggctatatacatatagttgtttagttcgattacgtgtgctgtgtgcagcggcgactacggcatatcggtgaccaaggagacgctcaagagcttccaccggaggaggctgcaggtgctcgccgacgcggggcccgatctcatcgcgttcgagacgatcccgaacaagctggaggcgcaggcgagcggcgaccccatcacggagtgcgccgccgtggccgacgcctgcgcgagggtcggcgccgtcggggtgaactgcaccgcccccaggctggtgcacggcctgatcctctccatcaggaaggtgacgagcaagccggtcgtcgtgtaccccaacagcggggagacctacgtggccgagaccaaagaatgggtggtcagtgcacaccgttgattttgtacttcttgttttggtttgtactgtacgtgttctttcgatcgattggtcgtacgatacacgcgttacgtgatgcaaatgcaatggtgcaggagtcggagggcggcgcgtcggagacggacttcgtgtcgtgcgtcggcaagtggaggcaggcgggcgccgccctcgtcgggggttgctgcaggacgagcccggccacggtgagggccatctcgtgggcgctgcgtgaatcggatgacgccgtgggtggtgacggcgatcgcgacgatttccctgcagtggccgtgctctagttgttcctgccttgtcgtcgatcatcgagtctcgtggttgtctggttgagcgcgcagttttgtgtgtgtatccatgcttccaatcaatggaaaatggaaataaaatggttcggttcgtgcagtttattcgattttcaacaccttctcgccttctcggtccaggaggaacacaatctttcacatcttgtaacgaaaaataaattgatccgcctcaatgtttcatctctaatgggcttgtctatggctactgatcctattggcttggacttgaatcacgaatcattgaatcagctaaaaagaggcccaaaacttcgttgattttatttagggtgcttacacgtctgagtagcacgcaggaaacaaaacaaaacgcggattcggtaattcttcccaaacagattctataaataaaatctcggtaagaactttggggagctacgatttgcctatgataaacaaattttacatcggggtgcatgtgtatcctcatctggtaacataattgcagcagtcagtatcatcttcaaaactctcatttagcaccctggtgaacaatctgtctacagccatatctctgacgatttgtcaaatgcaatcaggatctgtttacttatcaccacccatgcctccaaacatgccacccatttcttttgagcccatttgtttcatcaaagattgcaggccacccatgccgcctatctgcttcagcatctgcggcgggagaactttgctcatgtgctgaacgttcatgttgcgggacagtgcactcatttctcctttctttggtatcttgagccctttcatcttgctccagattttagcaagccgcttgtactcttcgagcatgtcgacaacatctctgacaggtcggccagatccccgagcaatccgaagaatacgcgattcagtcatcaatttaggatttgtgctgtcaagctctgagataaaattttgacatcagcataataaataagtatacagggggaaatcatcaaccacacactcacctccatctgtcatggaatccatcatcgtcatgtaccgtttaatcttagcttggctttccttctcatgtccctttggcatcaattcagaactaaatccaggcaacattgagaaaacctgcaaacacaccaatccagatttaaaagcgtgctgtgataatcttaaaagaaatgaaccctgggcatgtcaattaaacaagtaaacagacatcatgagctgtacgtttcatttcaccgcaagtaaaagatgttgctaacctggccaataggacccattttcaagatgttctggaactgctcatacataagtctcagagtgaaggttccttcagacagcttctgcaaaagctcaggttgttgatcagtgggtactacttcatgaatcttgtccataaaccccgaccagtctcccatgcctgtcaattacactacaaaggttaaccataagaaacactcagcaacatgggacacgtagtattttcactgacctaaaagacgactgacaaatggtttcacatcaaaaacttcaaactcatcgatgtgttctcctgttccaataaatatcactggactttttgttgctgcaaccctgtaaagaaacaagggtgtcagatatgataagtcattaacagattctgaaatgttaataggtattcattcacagtatcaaccctaaataaggcatttttcacaaaaggaaatgactacatgaacagagaaagtgtcgtgcacacaggatctctgcactttgaacttttaaagtatgctatcctgaagcacatacaatatgatgaaactgttttgcggataccacatctaaatgccacaatatcatgatttcaccaagctcaggtacttaaaataaaatttgcattaactgaactaaacttcatggttgacttgacactatatggttatctagaataaaacagggctctataagagttcttgttttaaatatgacccaaagttcacacaagatctctttcagattatatggaaacagtactcatgaagtgggaaagagaatagaacaaatatgctatcgcaagggaaagaagagaatactaacgcgctaagtgcgccacctcctttcgcatggccatccattttagtgacaatcacagcaccaacagaaacactttgcttaaatgcttgtgcctgatcaaatgcagcctgaccgatactactgtccatcacaaatattaccagatctggtttctgcagagaagcacaaaaatgtgttttagtttttcactataatcagggtgtttctcgaagtacttcaaaattttgactatattaccgtcgcttctgaaacttggcgcatttcttcaaaaagggctgcttcttgtttgtgccttccactcgtatctacaatgatgagatcacagttttctttcttgaacctctccacaccctcaacagcaattttcactggatcagactccatgtagctgcaacaagacacccattaggggggaaaaaagaatacataaggttaaacaaaagttaaaggtagacaaaatatagcaccttccgtaaaaaggaatcttggcctttgttgcattctgttttaactgatcaaaagcaccagccctaaatgtatcagcacaaacaagtgctggcttaaatcccttgcgctgatgataatatgcatatttggtacaagtagtagttttaccagaacctgcatggacacggtgcttgtcatgggaatggaatattgcaattctattaatgaatctaaaaagcagaagataaaagccaaacagaacagaacattggtctttgtggctaaagcaaacaacagggttcattgctaagccaggtagtttgacaagaatgacaaaacttgcaattttgcacatatttgcaacagatccatccatcgggaagccataaaaaattctggttatagtgtccaattgcaaaaaaaaaagagtaaaaaagtgatagagtatatctgttcatgatgcatcatacacaagcccagataaggaaaaaaactagatgaatgtcttcgtgcaagacccaatttaggattacttaataatataaaatacttagatgattcattgcttctgaatgggatgatccaacagataaaccatgtcacacatgataagcctaactacaagaccacaataggaacccacggttcttaaaaaggaaaactaaagtactccaataaataaagctgttggacaaactactcgatacgtgcatgatttattcagctgctctgctttttgactaaacagaagaacatgaaactaaaataagaaaaacaaaacttgcagcatccttgcaacagtcatgctaacactagccattaactggaccatgcacatgaatggttaggataaccatacttgtgtgaccaattcatttttatttattctgcctggcaataaaatcagaagagaaaccacttaatagttaatactatcacatccttctgtttgaactaatttatcaagttccctttcagaatcattcgctgaggcaaagttctcaaattcagctaagatcatggtgattcagaaagtgtctaataaaaagtcgtgatagataggacaattctactttctacattcttaccttgtacagatgtaataaaccgaaattatcataaaagagaaagcagcagaagtaattaattggggcataactcagcagcagctagactgaccttgcaaaccaacgaacatgaccacgcaaggtttccccttcttgggagtgaaggaaggcttcccgggatccaacatgttgcagagctccgtgaagacggcctaaccatcaaaccatcagtcaacaagatgctgcaaattacccgcaaattacaccgatgcgaagggggcaggggggctcacctgctggatgatgcgccgcttgttggtcccggcggcgagcgtctcgaggttgacgatgcgcttgatgttggactgcatatcgcggaccatcttgaactggacgtcggactgcaggagcgcgcgcgagatctcgttgaggcagtcgctgagcaccttctcgtcgatcacggtggcgttgctcatctgcgccagcgcgcgggagatgctcccgccgagctgcgcgagcaccatcttgcccggccttgggggattcgcctacctccggtggtctcccctcctcctcctccaaaccctacttcccctcggatcgccgacgcgcgtgcgggagagaattagggttccgtcgattggggggactgtatatctattgcgagttggatggattacgccgccgcggaggtggagccgtggaggtggtggtaatcctcagatggggggcgactcggttgaataccggggattcctccgacgggaaggcacggagtacgcgtgtgtgtaacactattctttttttcaaaagaataataataattttcataaaacactacatattatatataatgcaaattacgcaaaaccacattaattttagcacgcgacgcataatctcaggtattatcatcctaaagttttacaaaaccacaccgttaaccattctgatatacttatagataaaaaatttaaaaacagatgtaatatttatgtgattgataacaaattcataaatttaagcaatgattttagaagagtaaaatccatcaccggtccctaaacttgcacagctctgtcatccaggatcctaaactcccaaatcgaccgtccaggtgctaaaacttgtccgactgtgtcatcccggccactaaacttgcagattagggaccgggatgacacagtcgaacaagtttgaggacctgaacggtcgatttgcgagtttagggaccgggatgacatagcggtacaagtttagggaccggtgatggactttactcattttagaatttataaaacagtggtacatctgttagtgatatggttccgggggtatcagaaccatagggaggaggctgcccccggtagccacgtggccctctcctcgaggggggtcgggcccgaggcagggcgacggccgccccctccaagtctgggggtcg

SEQ ID NO: 24271 - DNA, 6556 bp, Oryza sativa
  unsure (1)..(6556): unsure at all n locations
tccgacccccttcacatagtgccgcgtgtgtagggcagcgcccacctaaccgcatttaaggcagtgtgaccgagcgctccacgctgcattaaatgcggcacgtggtgcgcctagccggattgtgaccggtcgaatgaccgatgtagccaaggtagtgcgcctgcgcactggttgcatgtcaggcggtgtgccatctgacatcccctgtcacgtcacgatgatgagaggttgcttagcctctcatcacagccgaagacggtttgcctaacccggttaggatagggtttacgtttcccgacgcaagtgaggatccaaaagtcttcactcattaaatatcgaatgacatgcgtgtcccccgtgtcagccagataaatttgacgggccccacgccatggcaaggcgtgcaagagacttccaaggcaagcaatgagacatgcatttaatgagattatcctccatagataggctaggtagacccatgtggtaaccccttaagatataaaaggaggtccaagcctacctagggagaggatgagcccttttttttagagcagtcctctgcccatcatcatcaacaccttctactccaataaggagatattgtaatttctcacacaatcagctaagcacaggagtagggtattacgcttttcagcggctcgaacctatataaactccttttgtctcatcgttctcggggggttcgaccccctctagactgcctttctcaccgagtcctcgaatctcacccgctgcccccggccgaaccaacaaaggggggcctcactgtcccccgctagtggagttcaccctccgacaacatcacagttaaaatgattaatagtgtggtcttgtgaaactttatgatcataatactttggtttatgtaccatatctcaaaattcatgtggttttgtacagattggaccattagctcgtgagataaatgtctcaaacttagattggccggactaatatgaaaggagtatcaaaatatcacctattgactctgatataaagaccaaatctaattgtaatgcataattgaaccgagacaagccattacatcataagcatactactccctttgctgataatacttgtcgttttagacaagggttaggtcaaactttagaatctttgattatgaatcatttttaaaatatttgtctttcaaatatggtcactacatgtatagattagttctaaaacgtactttaataaaatcatatatttgttaacacttttacacatattataatggaaaataataatcaaagttatttttttggagaccatgctcttgtccaaaataacaagtattatcaacccagatggagtacattttgtcggattatggttttctctgttttttagtgtgttttggcacatgttacgctattttgccaaaaatacaatcctcatatttgtacgaaatattgcatagttgaaaaaaggctacatcgttcgaaccaaaaaggttcacaccgtccgaaaaaaggcagaaatttcgggtggatttcaatcaaatccaccacctttagatccgtgctgcgtttcgcgctacacttcttctccaccaactcaggcaagatggcagcaacctgacgaattatgtctcaagttggggtcaaggtggaagggtggaggaggagtttgccaccttagaaggatggttatgggaggcgacaatgcagtgaagggcagtagaacggacggggaacgatgcggcgacgacaccgaagccgcggggtcgacagcaggcgatggaggcaaagcaaagtgattggttaacaagcgagggagaccgtggcgcctccggcggcggngagcctccgaagacaaggaagaaggtagcacgggggcgccaccactagcttcangaggaggaggatgaggaggaggaggaggaggagagttgagaagggatgaggaggaaggggggaggggaaggtatgcgggccttcccggcacggttggctccttttcgacattggcgaggcttgaccgcgggggattgggcggaggaagcgaactcaatcaattgatagggactggtggcgtagtcgtgggaacatgaggaggtgaaatagagttcaagtttagagaatgcatgaatcttagaataaaaaatacaagctatgggatgagattttctatcacgcgttgtataggtggtcccagaaaatgcccaccttcaatcaggaaccagtttggcagtcatcatgttctacgaatgtatagatcctttttcctttggttttgctagatttcatacgactaaaagtttgtaactctttagttacctaaatttgcacattgccaacccaaatatgcgatgctatgcaattaactgtagttttgttattatatatagttttgcgctgaatttatctaagtttgaatcatgtaatttcatgaattgcatgttcatttcatgtttgtgttagaaaataattattattcaactgtcggagatatgggtccgagggtatgcgaagtgtggggaatctaccttcctatcttgccgcgtgtccctacagcctagtcctgcccccgcagcccgcgaaccgctggagcggccgggagggggggtcggggccttgtggtgccacgtcatgcccctcgggcccttgcaccgcttcgccccgaggccctcgcccagccgccatttggcgggaggagcgagcgaggagggggcccaggctgagcttccattaatgcgcgcaacgccccaactgccccctgtcgtatttaatgcagtgaggcagacgtgcggcgtgctaatctgacgcgccatagtcaagaatgaccggtctgtgaccgacctgacaccggtcacgtctgactagaccgacaaccgtgctcccacgtcgcgtctgcttccggcggagtggaggtaggtatgacccgtcccatcggagggtcattcggacggcggccgccacaagtcttcacccattaatgggggaatgacagggctgtcccccgtgtcaggcgagggacggcgctggccccactcaagggcaagctatggcttagcttccgggcgaaggcacgggtcgagcccggtcaggatagggtgggtccccatccgaaagaaaagtaggtagagacggtgcatgtggtatccccttgagatataaaaggaggaccttgtccaccaaaagaggggacgactctcagtaggcttgaactctaggagaagaagagcgagagtgctctccggagttgaggaacccttgtaacactcaaccataatcccaaacacaggagtagggtattacgcttctcagcggcccgaacatgtataattcgattgtgtgcaagctaactagtagccctaggggcggatacgtgatctctaagaggcgagctccttcctccggtcgaactcacgaaagggggggggggtctcacgacctcccgctatcgagggacttccctcgacatcaacaattttaaaaaagagagactttgtttaaataagtaataaagggagtgataagaactactccctctgctctattataagtgcagccatagttttccgcgcctaattttgattatttgtcttatttgaaaaaaaataaaaacatacttcctctgtttcacattataagactttctagcattgcccacattcatatagatgtgaaacggaaggagtaagtcacaagcaaagtattattcatgttttatcatctcataacaacaaaaatactaattataaaaaaaattaaattagatggacgattaaagttaagcacgtaaacttatggttgtatttaaaatgggagggagtgagtattagattgtcattcaggaggaaaaaaatgactgaagtactcgaaaattccagtcacatagtaaaagctgggcactcctttttctttctttattcacacaaacggtttgtccaaccaaaccaaattagtaaattacaatagggcaccctatctattggttcaatttaggactaccagagaggttccagaggggaaaaggagtagggcgtgaaggcagtgatggacttctgaaggtggccgcaatcatccattaagtggatagcgatggatcgtcaagggtcagctcggttaggctgattatcatttggacgtattcgtaagaagctagctaggagtacggtttaggtggtctttttactctaaaattttcatttacgacgatagatccaattatccaaacataattcccataccattctatcatattatataaaataattttcgtttcatcatacattagcataagaaaacgaatccctttatttcttccttctcataaatcgatccctatatgctccaaatagacgatatattcgctcagctcaaattcaaatgaattaacttagcaaagtgagtgtaactcttgattaaatttcttatgatagatccaacacacatatgttcaagttctagacttagacacgggttctcacatagaggtaagtgcgagcaccttataatcgtctccgtttatactgtgtttaaaaaagaacccaactcagctcagctcacaagagaccctctttgatttacagttgaagtgctcaaacgattgaaggacgaggaagatcagtgctcaggtagtcatcgttaagagaagaagaatcacgtcaaaacaatttagtagagattagagacagatttaacaacggaaaatccgagcgtctaagcacacaaatgacagatttaagtagggaccagtaatgaacgacaaatcaagagtaaggagctaataatgtatttttgagattatgggaacgtagatgacacatacgaacaaaatatacatcgaatttccagctgcccgcatgcttgcacctcatgcgcaccatgtgtgttaaaattacaaactcaattcagatacagagtacaaggaattggcataatttacaggagtgatctacgtcaaaatataacaaaaaagaagctatctacctgctgactaaaacgaaccaccatatttcccaacaaaatgttacatatacaacctttctcgtaagcacaaaattgcccgtcgcaatgtagaagcaaaaagggaaaatttaccagcaaaactctataattctatgcaataaaaataatataagggaggattacaccactcatcgttacgttagacgttgcagtcctagttccgaggcaatgagtctgagcagaacctgtacaagctcccgtaccctagcttctttgatgcattgggatatatagaacttcagtataacttcattagcaataaaaagttggtactataataaactgaagccaatttttaagaaaaaaaaaaacaccaccaactgctttagccgtgcagcaaaaaaaaaaaagttgggaactatacccagattgtcaaatccctaacaccgatacttatttttctctatagagcttcagggcatgtccatctgttaatatttatattttgctgtgtcgtgtatactataacagacagaataaacctgaagccatttccataggttattcttgtcttgttcaaatttcaatgcaaagtgtaaactgaaaaggacaatccaatttttggcttccatgttaacaccatcctaatgttgaatggaaaagaaaaacacaaatggcttactcagcaaacataaacatgcattgccagcacataaagctgtcggctatgacacagagttgtactgtaaaattgcatgcgcacttaagaactgtggggatacaaaacctttttcttaccttgagacaacaagctcagaaaaggttggtagcaaagccaataaatgagcccgtccatgggactcattcttctctaaagcttcttttagatataatggcatgctgagggcattagctgtttccatgtttattattagtctagcgagttcttgtagaacacaaattgtctcatcaatccttacactaggcaatggtccttctcctgcagcatatttgaaatatcaattaccatgttgaaaggaaaccagaaaatgaagcaggtttacatattatatataaggaagttcaaaattatatcattatccatttacctagatcattttcatcagctaaaaactgacccagtataatctcacaccgcttcgtaagaactgagatcgatactttgctggtttctgatactgtagcacataagcttgtccccgatgtacaactgcaatcattgaaacaagctatactattcagttctaaatgtatgcagagtgtagcggaggttaacgttctgatgagttgctagtcttgtgggtctatggactatcctatgttatcatgtaatgtgtgaattctcaaacatgggcaatgtttccaattatttttaagataatctgcaaatgcttttgaacactgacggatctggttttcacagtgaggagcaggtgcaatgcagcactggttatcacgtttgtcttttggggctatttttgtcagatttggtaagtattaaatactatttgctgaaaaagttgcaataaatattcaaacaaaatatgagtaaaaaacaaatttgcccatagtttaacagttaatggcccaaa

SEQ ID NO: 24272 - DNA, 1245 bp, Oryza sativa
tgtcttgcttctgatgaggttgtttgaaatagaagaataatgattagtgaagccttcttctgacactattgagttaaagctaccattatggcattgtcatctgcaaagttgtggctatgcgcacctcaattataattttttgtgttgttttgtaggtagtgtattgagtggtggtggaagtgtccctgctccccaggctactcctgcagtttgggtgaacatggtaaatgaattccagaaaggcgccttgtcaacacgtctaggaatacctatgatctacggcattgatgcagttcatggtaataacaatgtctacaatgccaccctatttcctcacaacattgggcttggagctacaaggcatgtgttctaatatctatactttcgtgtattcattttgttgtgtgagtgcgtgtcaaacattatctttctttgtattagggatcctgacctcgtaaggaggatcggcgaagcaactgctcttgaagtacgggcaacaggcattccgtacacctttgctccatgtattgcagtaagcacacgcacgctgtagtattgttgctgttatgcattggatcttcagtggagcatgttgcaattgcatgagtatatggctatatgtaccattcttgattcattaagagctttgttgaccaaaaatgcttcatacaatttggttcaggtttgtcgagatccacgatggggccgatgttatgagagctacagtgaagaccacagggtagtccagcagatgacagacattatacttggtctacaaggagatatcccaataaatcataccaagggagttccttatattgctgggaagtaagatattttttctcattggtgctataaatgatattgtagatgtaggccattgtatggagcatgtgcatgttgacctaaataagtaaagcttatcggcctaaatgagcaccttttattaacaatatactttttacatacatacgtatgtaatagttagtggcacatctacattgcaaaagctataggaaaataatcaatgtcaatgtcaagttgcaatgtgaaggttttctgtcttatgtctcagcttatggcttttaacagggataaagttgctgcttgtgctaagcactttgttggtgatggtggaactcataatggaatcaatgagaacaacacgatcactgatgaacatgggcttctaggcattcacatgcccccatattatgactctattattaagggtgttgctactgt

SEQ ID NO: 24273 - DNA, 7651 bp, Oryza sativa
tggatccccctgtgaatttctttcaagaagattagttcatattttcatactagctacaataagcatggtttagtttaattttagtcaacattcatatcatgatactggaagtggaactggtcttactactttttttttgtggggggaagtcttaatacttattataccaatattaagctggaagtttatttcgttctttttattcagaaaaaagaatacatcatttcatctccataacaggtcatggtgccattcaattacacccaatacattgatgatgtgacatctcttgttaagaagggtattatcaatatgagcagaattgatgatgctgtcaggcgtatccttcgagtcaaatttataatgggcctattcgagaaccctttagctgatcttagcttcgcagatcagcttggaaagaaggttgataactacaacatgctgtatactccacagagtaaatttcacaaaactacaaatactttggttaaattatcacaaaaccatagatttaaagtgatgtaacacagaactacatatttaacaataaatttatcacacaactataagtttaaggctaagtatcgcaaaactacagatttaataataaaattattatcacaaaactacaaattttggggtttaaatccttagcactaatgttatgttggacttataattgttttaaattttgtgattaaattatcattaaacctgtagttttgtgataactttgttactaaatctgtagttttgtgatattctaccttaaatttgtagttttgtgataaatttagtgttaaatctgtagttttgtgatgtatcaagttaaatctgtagttttctgataatttgatcaaagtatctgtagtttcgtgaaaattactctacacaattgacaagtttggaaatcatccaagtaaatgagtaactaatttaacaggagcacagagatttggctagagaagccgtcaggaaatcacttgttctattaaaaaacggcaactctcccaatcaacaattcctgcctctaccaaagaaagctagaagtatccttgtagctggaagccatgctagcaatttgggctaccaatgtggcgggtggtcaattgaatggatcggaggtagtggagatattactgtaggtatgtgttttttctatatatcatatattcttttcttttaaaacgaataaatctactatttcaggttcttatttgctaaattcaactatacttaagaaaagctattttgattttttttccttactgtaataattaaatgcatttattctgttcaggtacaacaattcttgaggccataaagtccactgtcgctgattcaacacatgttgtctactctgagaaccctgatgaaagcttcatgaaaaacaatgacttctcattcgctattgttgttgttggtgagcgaacatatgctgaaacaacaggtgatgacccagaactcaccatcctagaccctggtacagacacaatccgaacagtgtgttccacagctaagtgtgcagtggttatcatctctggtcggcctgttgtcattgaaccatatcttccaatgatggaagcgctcgtcgcagcttggcttcctggaacagaaggtcagggtgttgcggatgtactgtttggggactatggcttcaccgggaagctcccacgcacttggttcaagtctgttgaccagctgcccatgaatgttggtgacctacactatgatccactcttcccttttggttttggtttgacaataaattcatcgcagccagggtaagtaatttcatcaatcatccacactaatgcagctcaaaatctaatcctaaaaatctgaaaggcacactagttcgaatcaatgctttgtggtttgaccttcatattgtttcatgttttcaggttctctggtgctgacagactgagagataggaatggggggatgatatacgttgtgttgagtttggtactgtcagtaatactgatgcatgcttcgggcataggtatattttaactcgagttgccctttcctagtcgtagtatggttccacatcaagtgctccatgcctccatcgttatacgttgtatgtactagctctatggagattttttgattgcaaagatgcatttatccctaaagctaggtgggtcagtgggtgataagcagatttgttctttcacggttttaccaaattatgtgtggttataatagagcatttttatctagggaggacaaagtagatggattatgctctgcaaatactgatgggcctacagcacttctttactctccgtaccatgtgacactccacagaaagtaaaggaatattaaaatgtgggtaagaaattgatgggtttgaatcatactccctccgtttcctaatgtaagtcattctagcatttttcacatttatattgttattaatgaatctagacatatatatctatctagattcattaacatcaatatgaatgtagaaaaatgctagaatgacttacattgtgaatatatatctatctagaatagtttgttgcattatgatattcacattgcaaatgcccttaaacaccgtaataataagttaacaaccacaactaagacatggcctaggctcaccacccttggccatataggcgaaggggcaaaggaagggcccctctggctggccatgcagcacggccgtgcaccacaacgtcacaggcagccggccgcagcaatcctccatcctcacctccacctccagcgacacgcgctcgcgccgccgccgctggctctccatgcgctcgtacagctcgccgggtatccccaccccgtcgctggtcgccacgatcggcacggagccgaccgcctgccccggcacgcagaacccgcccgggaggtcggcgtgcgcgagctgcacgccagcgtacgacaccgccgcgctggcccggccggcgcagaacgcgcggcgcgtggcctcgttgtcgacgcggagggtgagttgaagacgggcgccgctgccgccgcgccggccctctcgagcccctcgatgccgggcaccttcacccagaagtcgggcttccggtagccgtacatgctgttccactgcccgtacgctatgagcgataagagagtcgcgatgaaggtcgctagtagaaagtatcgtagacatgggcgcctgtccaggcaattgccgtggtcgtcgtcatcttccgccatgtcggcgcccatgactctaaccgctaaaacgatgcggcgagaaattaacagtatcaggaccggacctggataggcacgtacacctgtacgttacttataaaagactggtcgtaactcgtaacggaaaaggtaagactggtcgtacccagacttcgggcctccggtagccgtactcccgcgcagcgtcgtcgtggccggcctcgtggatagcagcagggcagcacagttggccccagcaaacccagtgtccacaggaggcaagctcgcgaggagcgacgactaccacaggcgcttcttgttcgcgcggatcggcgccctcgacagcatggtacgtcgctgccgccgctgcttcgactggtcttgatcgccatgagcccatgagctgccatgcatgcatgctttaatactagctagttacgttcgacaagatctccaatggatcaaatataatagggtcgttgaatccaatcacaaaacggcaacactaccgaacgtgatcaccatgtcccacagagtcttataagtaacgtaccaaatccaggacaggtcctgacttttttctcgctgcatcctagtacgtcttagcggctagatcatgggcgccggcatagcgttagatgacgacggccacggcgattgcctggacaggcgcccatgtctacggtactttctactcgcgaccttcctcgccactctcttattatcgctcatggcgtacgggcagtggaacagcatgttccgcgaccacgacctcgacgccttctccgtgcgcctcgccggctacgagggcatcgacctgggcaggccggccgccacggtgtcgccggagttcagggtgacgctcgggacggcgaacggcgcgtgcgtggaccgcgcggccgtgaccgtgctgtactcgggcgtggcgctgggttgggcgcgcgcggagccgcgcgactgcgcggcggggcgcttggagagggacgtggaggtggtggcgcggggccagggagtggggctgtcggatcgcctccgcgcgcgcatggcgtcggaatggcggcgctcgtcgatcgggcgcgctggagctcgacgtcgacgtgaagatcttcgacgaggacacctacccggtgcacgctacctaccacatccctgacagggtgatgctgtgtaaggtgaggacggatgggcgagggtcggagtcgccgtcttgcccttggttttcgccgataactttagctttcgcatagaaattagtaggcacactgcaaactgattaattaatattagtagattgtatatttgtactactgttgtttgtgtacaaagtccatatattaagattggtagattgtgcatttgtactattttttttaacaaagtccgcatatgttttttttccataaaagaaagttacaaagcgagacgcttatatatgtgtgcacatttaccactatgaacaccttcaatcaccacatacatctggttcttgacaggtactgtatgtctttaatcactaaaaagataatttaaccataaatatgagtaacccatgtcagattttaaacctgaatttttaccattatctaaaaaagattttaaacttgaacttggattctcaagtggacatatttttaaaaatacacagtatgaatgcagacgttcataatgtggatatattcatcctatgaatgcacgcaagcacatttacccgtacagacgcacaccttacctatgtgagtatctcttaccatatatatcgaccatacattcatgcttattttacgtagtttaaatatgttgttggtaaaattccacaaaattgcgttgatgtatcggaatttcttctatcttttttttccctcgtacaactggaatactcggttgagtttttcttctttttgcgagatacttgctaatttgcaccatacaatcaccaaattatttcgatttatttatacacgtttgatgagtttggagaaagcgagcatcagaccgttgggcctcacctttttcttatgctggctcatcagccaaaattgaaattttcactattagggcccgtttagttcccaaaaagtttttccaaaaacatcacatcgaatctttagacacatacatggagtattaaatataaataaaaagaaaatctaattgcacagttataggggaaataacgagacgaatcttttgagcctaattagtctgtgattatccataagtgatacagtaacccacatgtgctaatgacggcttaattaggctcaaaagattcgtctcgcggtttcccgacgagttctgaaattagttttttcattcgtgtccgaaaacccctttcgacatccggtcaaacgtccgatgtgacacacaaaaattttcttttcccaactaaatacacccttaattttggagttgattttggggttttttcatcgaaatttatttttcagtatttgtttttaaattgttaagaacatgtatacaagttatatttataaattattttttgtttgcaaatatatcatttcatttattccctaaaagatgcgtgagatgtttgtgattgcgtgtgttcggcatgcacgccacgccacaccggtcacatgaaactagacaccagcccacatgagtgcatgacccaaatagtgttacagtgagaccgaaggacaacgccggattactactctcactagctgatgacgtgaaagttgaaagtactcccttcgtccaaaaaaacacgatttcatcacacctggaattcgaggtgaacctcggtacacacctcaccgcgccacggcgtgagctttcaacctcagctatatagaagtagtactccagtaattgacattgtgttgcttcctccgcaatcgcttcaaacagttgttgccacagacctactccctacgtctcataaaaaactaacttagtgttgtccagattcgttgtactattatgtatcacacgatcatctccaattctagattcttttttttttggacggaggaagtacggcggttgaaaccgatctttatcatttctctcctttcaaatcacccacgtggtcagtgtatgtgatgcggtgtcaaatcctattagagcaagtttaacagtatagccaactactagctccaactcatctatagccaatctaatagctcatttatacaatagttatatactacagtattaatacatggtcccatctatcatacacacattgcttcttggagtccgtgttacagctggctataaatctgtagcccgctgctcttctctctccttatttatctccttaaaatatgtctgcagctggcttatagcctgctattgtacctgctcttagagcaagtttaatagaatagcccactggtagctccaaatcatctatagccaatgtaatagtcaattcatacaataggtgcttaccatactattaatatatggtcctacctatcatacgcacgttacgtcttagagtccgtactgcagctggctacgatctgtagcccgctgctattgtacctactctaatgaaccacctccttttacgtgtttggagggagagttcactctccctaccgaggacagccttaaaacaaaagcaaaccaaacaaatttacctcacattaatccctggaatttctatttctactttaaatccagccatcacatcgatccgcactaagagcaagtttaatagtgtagctaactgttggctccaaatcatctatagctaatctaatagcccatttatacaatagttagctataaaaatatactataccattaatactcggttccacctctcatacacatataacgtcttggagtccgtgttacagccggctacaaatctgtaacccgctttcttctccctcttctctttttttctcaatatgtggttatagctggcttactgttgtactatacctttgctttgtgaattgtgaggtgcggccgcgccgatggaaacgtgtgtgtccgtctcgagcccctcgaggcctcgatgtcggggtaccttcacggcttcacccagaactcaggactttggttagtaaaacgccatggcacaagaaactctggacgccttggtaagttggtcccgactctgattggtacacacgttacttgtagcacgtcttgaggtatatggttgcggtaatcatatatcgcaaggggaaggatttccatacatggatggaatcaaattgttgttcgatcgatcggaagttcggaactaatcacggaatcgaatataaaaccggctaaatagaccctaattttcttggactctactataaaatctccagtcgaacgtaaacctggtagcattgttgaacgtgctaattgcatgctaatcatggctcatggggaagacctcgacctccaagctgcggaggccgcggcgccataccatgctctccagggcgatctgcgcgaacacgacgaggcgtctggccgtcgttgctcc

SEQ ID NO: 24274 - DNA, 642 bp, Oryza sativa
aatcgtcgccgccactgccagccaccagccatcaacatcgaacgtgacgcatgggccctatcagtcagtcacccaccctcctagggtctcctcctttgtcaggcccatgaggctactacgcggtgcccctgttccccagcacagagctttgagtggcggcgacaaccaaaaaggactgaacgcgaagaagaatgatgccacacggagcttcccgtcgctatcaccatcgagctccttcgtgtcgtgcctgagggaggtaggcggcaactctttagaggatgagcggcggagacggcatcctgatctgccccagcaccttggcgacgaggagggggacggtggatggcggcacactgaagagtagggaggcggtgtgaacaagaggcggcggttggaagccccgagctctgtcggcctatgccacccaaatccgcaccgcttcgagctccattggccaactccacttcaatgttcaaaatagctggctatggcttttaccggctgggatctgtagaggctaagaaaggctatagcgggctatagcgccgctatcccatttaaccggtttgaaattgcctgacagaaatcaggcaagaattattgcatataaacatggaatcaggaaaaaatcatgaactaaca

SEQ ID NO: 24275 - DNA, 14365 bp, Oryza sativa
  unsure (1)..(14365): unsure at all n locations
cataggaaccacatcacaatcaacagaatctgcatatgagccaatgaaaacaaaaccctgcaaacctgagttacctttgctcttccagaatcgtttaaccactgaatatggtaaggatgtggatgtgtacgtgtggtcaagccaagcttcttgaccaaatcaaaactcaccaagttgttgcagctacctccatcaatgatcacacgtgcacgacgattgtggatgatgaagaaaatctgaaacaaattatggcattgcaacctctcagactgctgcacctgcgtgctgagcacccgctgcacaatgatggtcctgtaggccattgtgtcatcacgaccaaagacttcgccatcctcatcctcaacttctttttcctcctcttcctcttccacatcggaggtggtgatgtagccatcttctgtaacaacatatgcccgttgactagggcaatctttctgcacatgcccaaacccttggcaacggtggcactgaatgcgtcccgtcgaggcaacagatgaggcactcttggcgggtacctgcgaagaacttttacctgactctgctggtcgtggtggagatggttttggtgttgcagaagctccgaatgcagctggtcgcttgctcactggctgggacagcgcccgaaaagagacggccttgggcagtcccacagatggcgtcgtgcacagagtgtacatgctcgccttgttcttgccctgctgctcacgcccctgcaattccttctctgcaagtatagcaaactgaaacaactggttgacagagttaaattccttacaatcaacaatgttctgaatttcctccctcaaaccagaataaaaacgacaaatagcatcctcgaccccctccactatgccacagcgtctgacacccttttgtagctcaccatagtaatcctgtacagatttatccccttgttccaaacgcatcaatttcttgcgtaagtctctatgataagatggaggaacaaacctatcgcgcatagctaccttaagttcttcccaagtagtaggtagtaccccctcatcagataacccagcccaccacatgatagtaaaatccttgaactcactactgacttgtctaactctatgttgctcaggtacaaggtgggcattaaacttttgttctactgtcatctcccaatcaagttatttctcagcatcataatatcctgaaaatgatggtattttaaacttaaccttagcataaggatcatcgggcacacgattattattaccttgttggtggcgagtgccacccatacctgtgcggtttgtgcctaggcgacgtcgtagccgtgcttgccttgtagctggtccgtcaatatagccactcgaatcatacaccgtgtcttcaggatgagcatcgtcgtcaccactcacttcctcattggaaggtgtctccaacgcggcaacccgatcagttagcgtggatatccgcttgtccaacctctccatgtggttcaggaaaccgattttagtgaaggcatcttggacagactttgcaacggcctccgtgatacccttttgagtattttcttggagagttcgtagttgctcttgactgacacagtcagcaaaatcctggggactcttctcaccttcgttacctgccatttaaacaccaaaacagcaacaaacggtgaaggttatccctaataatctactacgcaggtgtagtggtgcctctcaacgattctcagcaatatggagtacccaaccaagctcttataaggttcttaccagcaaagcaaaggatacctggaaggcgtagtcagcgattgcagggatcaagaacttgtgctgtccagaagtaatatgtggagcatggaaggccaaatatatgtatctgagtggtacacaatccaatgacagatagtaatgctgaataaaaatcccaagtcacttgcccttagttgctggtctactcgtgtcctagacagtagtggtaacaataatggctcaaggaaaatgacactagtaaacagcaaagaaggacttgcaggcaagcttcggcgagtttcagcaaaaacaacaaaaccgaactggcagataagctcaacggagcgcgtcgtgagctcaatgcactagtggaaatcaacttttcttttttatttattttattttattgattttttttctttttccagaacacgaaaataggcacacctccaagttacagctcaatcggagttgatatatagcctatggaattttctgaaaccactataaacaaagtgtaggaacttgtgagctcgaacagacaattttgcaagccaaattttggaattttggattcgccaaacccgccaaaggggggagaaacggatgtaaattttttttctcttatctgaaaagttaaaatttgcctgattccgagtctgtatgcaaaagttatggctgtttgaagtttcggcttccggctaggttttccagaggggatataacctaatctattttgcggtggaattgggatatggtggcagcggagtttgtagggtgttctggtgatgcgtggtgatctggatgggtgtttatgatggcggaaatggctctcaaaagatgaactctaacacacggtgaaaggtggcggctagggttacaaaggaaaaacacacgactagactaaaacaagcactagaccagcaacaggaacttaaactaggactcaaactcaacactacggactctgaaaaagaatcatgcaaaacccaaaaaacctaaagatggcggcggtactaatatataaagtttagggtcatgcaaccccctctcgacgcaaccttaatgggttccaacacaatacacggcccaaaggcccaaatacggtgacacagcaccgggacagattctgggcgtcaacttgttcggtcgattcctattgactcagaaagaatttggacgtgggaccaaaaattggaaaggttatcttcttagctttccatccatataaagaacgtcccaattcgagcacgtatgcgacctgggcggccgttttagtgcagactggtcctggactccgaattgcacccgaggtcgaattggtttgggcctccaccttgacttggacgtcctcgatgatcctccatggctctaagtccttctccaagtgtctccttgtcccctccattgttcctaatcacaatataatcattaggtagcaatctattctcgaattcatacaaagaagaacataggaacgagctcacctctaaattcaattgtcgcgcacgagctcttgttatcggtccttgaatgaccgttggaggattgttgtgtgtatctgaggtagtgatgtctgcatcacccaggcacgaccaaggcacgcccgaccaactcgccgtgcccgcccatggaccgcacctatggcccatgcatgatccaataaggctcgggccatgctgtgtcggctcgaaggcacgatcaatccaccgtgctcgtccttgagtaagtttattttgcttccctcgtctctttgggcagtgctttatatgcctagaataagtctatttgcctccctcatctctttaggcaatgcttcatatggctgttttaagtctattttgcctctttatatctttgggcctactgatcgttgggccgtgtcatgccggaccggcatgacgtgccgaggaagagacccaagcatgatctaacggtttggccggattagcatgggcccgacaacactcgggccataccgtgcctggaccgagccaaatctccatgccgtggaccagggcgtcgggttatgggtctttttggccaactataccttaagacttcatcatcgcaaaagccagcacgctcgcgtgttcgcacatggcacgaatacacaaacacgcatatcagtaggatttctaatactgggaggactttttttaagccacataaaaaaagggttaattggatccatgccactacaaatgtgtcaaatcagaaaaatgcgatatccacttggtgccactgaaattttgtaaaattgtaaccatgccatctccatccacttttctgtcatccccgttagatccacatcctatcctccgtttttggcgtgcgcctcgtcaacctcatcggcttcgactccggtgccgatgccgaccggtagctctgcgcccgcgccctcaagcggtggcgcacggctcggtctcctccctcgtttggcgtttaaggagcggtggcggttaccaccagcgggcgacagtggtgaccaccagctcattagcttgtggaagaaagaagcagaggttgccgccgccgcctgtagagaacgccgccgcatggaggccgggagcacgaagtagagcagtccagcaacacctcctcgtcgtatctcatcgctgccactgcgcccccatgatctagctcgggatgcacgtcccgctcgccaccgccctcgccaaggagctctcctcctatcctgccctttccctatccgtcgtcgtgccctcctcctcctccggcgcaggcttgctgcttggtgtgtccatgcacggtgtctatgccgtagatcattgggatgctgagccgtgtcgagagggaccccttttggaagtcgctcaccatgctcactcactccgccgtcgtcacctacttccttagcacgctcccaccaccgctaagcattgggagatgaagacgagaaggagatgaaggtagcgtgacagaaaatgtgacggagacaacggaaatcgtgatggagtggcatggttctaattttagaagattgcagtggcatctacgtagtggcatttttttaatatgacatatttacgatgacatggatccaattaacctaaaaaaaaagcttggacaaacattactactcttgtaggcattggatttgaactcggctatactacaagaagttgctttctccggaaaatacttttcattgaccagtttacctagaaacaaaaaagtgtagaatacagtatgaaagcattgttgatgacatgaaaggtacagatgagaaactagttgctggactagctgttggtacactttagtgttgtttacattatatatgacaagttagttgtcaacaatggtccattgcgcacttagtaacaactttacaagattgctccaagtttcttaatctacgtcacatacattaacaccggtgacccaaaaagcaggatgaggtccgttctgacctctttctttaatttgctatcaaatgtttgatacccaatcttggagaagtttggtgctgacttgtggcaaatgctaggtcacaaaaaaaatgacttgtacgtagtttttgttctttagcagttccgcggcgaacggcgtccacagataccgtagcaatgccaaagcgtgttgaagctagctatagcgagttatcttaattaatcagatcgatcgatgaggtcgtaattaataaacagagaaagtactaaatattaattagcagctgcgtcgtcatgggtagcaggagcatgcgttcccacctcgatctgacaaatgaggagaaattgcaacgaacaaacataggagtacatcctagtgattgatcaatcatgcaaatgcgtctgactgatgacgtatcaagtggaaggaaaacgcggcgaaatttccacgcggtacatcgtcctgtcctacggagtagaatcctagtataccaccgttgattgatctttctctgtttaattttatttgtcgttaaaggggtgtttaggttcagggacgtaaattttggcgtatcacatcggctattatatagggtgtcgcatagggtgtttgggcactaataaaaaaatataattacagaatccgtcagtaaaccgcgagatgaatttattaagcataattaattcgttattagcaaatgtttactgtaaaatcatattgtcaaatcatggagtaattaggcttaaaagatccgtctcgtaaattagtcgtaatctgtgcaattagttttttttagcctatatttaatatttcatgcatgtgttaaatattcgatgtgacatggtgtaaaattttggggtgggatcgaaacaccccctaagcagatgttacactgagatagaaggtgagacatacttcctctgttccaaagtaagcaaacgtcgtactgtgtaaacacaacgaatctactagtatatgtcatatcatgttggtttattctaggacggggattattaattactacggagaatatccgtccttggaatattatatttttttctacacgaatccaaacaaacaactatacaaattcacgtaaaaacttaatgttttttttgttgcaacttgtaaaatttaaatttgaccttgcatatttgtggaataatttatcacatattaatatatcttgttaatatttttttaaaaaatttcatatccatttgaatgatattcaaataacgagagaatattctcacacgagtttaaaatagttttgttttaagactaaggctgcgtttgtttgggatggttgggaaccaaactcctccacacggaaaacggagcaatccattagcacgtgattaattaagtattagctaattttttttcaaaaatagaacaatatgattttttaaggaaaaagtacgaattaccccccgaaagtattgggtgagtacgaattaccccctaaacctggaaaccagtcatttttcaccctcaactatcgataccggacgaaaccccccccccccccgagcagcttcgcaagctgttttggtctacgtggcagtccagtcagcaattattttctttttaaattagtgggccccacatgtcagtctctcaccctctcttttacaccacacctctctatctctctccaaaattctctctcttctccctccctcacctcgaggacgacggcgggtagagcacggggcgacgaaggggacggcggagctcgagggggcggaggggacggcgtaggacggagcttgggggtggcgagaggaggggacagtggaggggaggctagcgagacaggctgggatgccggcgagcgcccgcggaggggatgcggcgagcgcgccgagaggaggaggcgggcggtgcttctctcctctcccccgccgtcgcgccgcgccgcgcggcgctcctctccccgaacgagctcgaacgcgaggggcgtagggaggctgagagatgaggaggccggactcccccgcggccgctgcctccagccagatcccagcgagcaggtgtcggggaagagtagcagggcacagcggtcgtcgtcgggccagaggtggtcgtcgcagaaacgacgatggttgggctggtgctactccnccgggtagtaagacgccacaccangaggggggggcggggggggatgactccgacgactctcccggcctcaccgccccctcgccggcctcctcccttctcggctcgctccctggcctcctcacctcctctctctctggcctcccccgctccggccgccctgctattgccggcatgcttcggccgttgccgctccgcccgtcccgctctaccactgctgcttcgcccccccgttctgcctacggcttgccaccacagctgctccacctgtggcttgccaccaccaccgctctggccatcgctctgccgtctcagggaggccaaggaggtgcccgctgccgccggcgcgcgagccgcagccgcctgcatctaacgggagagagagagaagggggtgagagggaaagagatagagagagttgatatatctgacaggtgggccctacccttttttcattaaaaaaacttgctgatcggactgccacgtagaccaaaaccgcttacaaagctgctggggggttcattcggtatcgataattgagggtgaagaatgactggttttcaggtttaggggggtaatttgtactcacccaatacttcagggggtaattcgtactttttcttttttttaaacaactttcgaatagaaactttttgcaaaaaaagcgcaccaaaatagtagtttgaaaagcgtgcacgcaaaaaacgagaaaaggggagttgggaaaaggggaaactaactgagcctaaggtagtatagtatgactgcattgataaatgttaccaagtaaaaaaaaaatactttaatacgagaacgataataatttaaatgctaaaacgacaattgaattgaaactaaaaccgacattctccctctgtcgcaaaatgtaacaacttatagcaaggtttgtatcaaaatataataatttttttcaccaacattcttttctcaatcaataacaactctccaccatttaattttttttacctacctccacttctgaatcaattgtagtttttttttctatttaattttatctatttctcatacggatggagggagtatatacgaatctaccgaagcggaagtaggattgaaaaaaaagatggtctctcgcttgagggtgcgtggagcctagagagaagaccgtgggttgacctcggcaagcgaacatgccgcgttgccatgtgatgtgtgtgatgcgaagccgaagcctgtgctctgctctaccggctgctctccctccgtggacgtggacttggtccggtcttccttcccttcccgggcggcctcgccagaaaagactccactccagcagtccagctcctgcgcccggtgggcccactagacttggctgatcgggaccgggacccacccagacgtggacgcgctcactggagtcctcgactctagtctgactgtgagttgtgtgactcggactcgctctctcacccgacccaactcatcagtcgtcgctttcagaaatctttcattagaaaaaaataaaattcatcagtcgtctcctcagtcttcactatactattcctattactaataacaatctcaaggaatattttgtttttctctatactattaggagtactatatataagggagcacagttgcagttagcctcggcagctcagctcgatcgagtagtgctcatccatctgcagattgcatcgatcgatcgacgatggaggggaaggccgccgtcgtcgccagcgccgctctgctctccacgctaatcatcccgctcctcctcctctcgcagcaccagccgcgcgccatcgccgaccatctctccgccggcgccaccgccgcaacgctgttcgacgccttggcgcgactcctcggcctgctcagcccgaggaaccacatgatcctgctctgcaacgccatcctcctcctcgtcctcagggacgccggcctcctcgcctgccccgcaccacctgcgcctgcgcctccgcctcgccaccacgccgccgccgacgacgacgcctcaccacctgtcgccgcgagttctgctgcttcctctcgccgccggccccaacgaccgaggagcagcgccgccgtcgtcgtctggcgcccgagcaagctcgccgtggtagacgtgctgcacgttgacgacgaggacgacggcagcgatggcgataggcggcggcgacgtcgtccagcacagcgccacgagccggccatggcgacgacgatggcgccgccgccaatcgcgctaccgccggcgggggaggagaaacagagctacgacggcctcgtcgacgacgacgatcatgtttccgcgggagcgatcgtcgtggtggatgatgatgccaacaagatcagctcccctgtccccgactccgatcaccatcgctactccggcgaggacacaaacggacgagccgacgacgaagaggaagccttcgaccagtgcggcggcggcgacgacgacgacgatgtggacgacatgaacaggaggttcgaggagttcatcgccaacacaaagaggaagatgcagatggagagcctccagctacagctagtcatgatgaaggtttagaacaataaataaaaaaaactttttttcttttttccctctctttccagggagaaaaaaaaaagaattgtaggagaaactaatagtgcttgtacttgtacagtactaccggctgcatgatcactgtacaaactttttggattttgttcactgatgaaattaaaaccaaaccgcctagtttgggaatggccgaatgagaacttggtcccaattttgatctcctatgattagagacaaattaattggcaataacgaacagagcatcccaagcaaaatacacaaagcaagtaaattcactgtcatgagaaacaaaaaatactatgaataacaaagtggcatttaaaagtgagtgaactcacatcttatttcacattaattgcctttttctttttagtatcacttcatgtgggattgtccagcaagagtccatatatgattaattgcacacagtccatttgctgtttgataatacaggaatcaatcgattcgttgtagaccttaaaacggcactaaataacatgatatcacatcaacgtgagacacaatcatgacagtttttcaaactttgcggtatgctaaaccacaaatatagctatattttttatttatcttttatcagcagatgaaaaataaactagcacgcgagctcttatttacatccatggatgtacccaacattgacaatacaaacatatctatggtcctacatgtgtacgaccgatggtttatatgagcaagaattaccgttagcttaaaaaacgtgcacaatagaaaatgagaaagttgtattttggagttaaagaagaagaaatgagatcatatggtttaattggctagagggcgacataaatctttttttttagaactacacaaatctaacttcaataattattttctaaactaggaagtgaggtttttttttgttagattacctttttttcttctaagttcaactagcatggtgacccgcacagattacgcggctagcatcattatgttttctcttatataatagtatatgtattttcttaatttattattaaaatatacttttattctaatatttcttatttttttaatttggaatgtctattatttcttaattgtactccctccgtcccagtatagtggacttcctaggagtatttcattatggaaggtatactcttcttctaatattatttatttttaattccgatttcagttatttctaaattgtatttctataatgactctataatcttcttttaatatttttttaattccaatttttcgttatttccaaattgtatttatatatgaactctaacctaattttaattttcttattttttaattctgatttttcattaattctaaattttatatcggcatggactctagtctcatcttacaatattccttattttctaattctgaattccagctatttctaaattgtctatatggactatagtctccttttctaatattccttattttttaattctaaatttcagttatttctaaattgtatttctatatggactctatttttctttttctctgatcaatatgagaatttctagaccgtgaaagcgaacgtggatgcttattttttctatcactttaataagttaatagatggggatgcaaacaatccctgcctgaattttcaattacatgtaatgcaacgcgaggcctaactcgatggtacttgaagggacgatgtgaagcattccttggaacatttttcttttcctttctttcttttaggatttcaatcatatgcaaaaataaatcatttgaccctttaggaacaaaagagtgacactactaaactcccaggttatttctatagattgcctcaatttatatgaattttggagggtttttaacacaaggtccaactttatgaaaacttgtttcatatcttttctcactccgaattcctttactctttcccttaattattatccaaacaacatatttgaaatcaatcatatgttttatgaataataaggatccgataagctatggcacctcaatctttttttaatttattcctgttttttatacgttccaaaaggaaatagttatacattatgcccagcgaattagacaaaaaaaaaacaatcgaattgcaaaaaccactgttcgagattcgagaaagacatagccaaccctaaaagatatatactggagtagtcgtgtgtgttttagcacatttacacgtggtcgatttcctagttaatttttttctctgtcttttgttaggaggaggaaaaaaatcgatatagctaagtagcgtcgacttgggttgactttgatgaacctgaccatacagatgtttggtgcatttgcatcattgcatgtatccaaggagaccatggatacacatgcctggtgcagatcgatacaaagatttgggctgaattctaaggaataattaattatttgttactcttataaataatgataaaggatttaccattgaacccatatgtcatagacgcatcttaaagtgacaaaaagttaaatgtttcgaattctaaacataagttcgcctatttttttatttatcgtgagcacacgtgtttcgtgtttaaaaattttctttaaaaacaataaataaatctaattttaagtttataatattttatatttaaatatacacatttcgttctccgtgcctcaagtttcgaacaaagctactaggaatttgtcctcttgattcgattggcaatgtagttctaggaatttgctgctcgcctgctcggggccacagagggttacgggctgggctgggctatgtctgggagcatagcagacaaggctgcaggaaccaagcagcacagcatcaacagcaggttggcaggcagcccatacacagcctggcaaattaagtcgcaattccgtcctctcgacctgtttccgagagcacccaaaattccatccctaaaatttatttttttaatcctaaacataattttagatgtgaaaatattaatctctccaaaagatattttaaaattaacttaaaaaagacccacccattagtatcaacagaaacacaaaaagaaatcgctccaccataccttccctacgcacgatctcttctcacgtgtcatcctcttcctttgctgtgcaaaaattgtgaacgagtgcctcctcacttatgaagaacgagaaagaaggagaaggggattccaattttgagacacatataaggaaacgattggagcaaggttttttttttaagaaaaaaagcccaaatttttggattgggcttcaattagggtttgattgaggccgttcatattaaatttgagttgtttcatacaagatttgttcttaaaaaaaacatgctcactcaagacactaataagtgatgttttagacgtcattaacacataattgggaaaaaatatgtggtagaaactatatatatattgaaaacctgaaaactaccattagataaaaatagacatatgagatttgtccatgtcatcacgagtaaaaattttactcgtagatttactctcatgatgatatggacgaatcttagacatccatttttcttagtttttcactacatattttttccccatataatttgaaccattaactatatcttatagatctgaatagtttcataaacaaaccataatattacaaaagctttggttacaacatttttggtcatgttattttcatatgcctaaaacccatgttaaaaatataattacagtcaaagttatctcctattaacggtatggagtttaaatgatgtatttatttgtaactgaagggagtacttgaaatatataggggtagttcaaagtagtaacctgtttgttttaaaagtttttacagtcattgagaagttattggaaggtatcatattttctaatgtaaactccggtactagaaggttccatatttaggtacctcttgttatccctcgaagactgtaaaaatttttatttgttctaggaaagtggcatggcggcgtgtttgttattaatttgcgatttttacaaaatcttttcttattaactagataatgctttaaatccattttaactttttaatagtccatcgattggtttgtgcccttgaataattctcacaaatacttcatacaatcagcattccgtttcattagcacaaaagaacactcttttaaataaaacattgtacaaagtcaaaatctgatacagctttaaattaaaagaaaccctgattgcatacttgttttcatcatcataaatacaccaagttgaaaacattacattacacagtaactctacacacatggtactcagctagcattctcttgttcaaatttacacatgatgatataaacgaaccgatcatgcatacacataaatttttttccttttttttcctttttcacacaagaagactcgtggcctcatcggttttggttcgtcacgtcacatgacgctgcagccggccggctcctcgtcgtagtacggcggctggtacgggctccggccgccgtacccgtacgccggcggcg

SEQ ID NO: 24276 - DNA, 4301 bp, Oryza sativa
gccgccatggccatgctcggcgcctcggcgcggcgggccctccatccgcgcgagggcgccggcggcgtggttggtggtcgtcaccaccttcggcttcctgttgtcgtggtggtggtggtggcggccgtcgtccatgtcgtccgccatctcgaacttgacgtgcttcttgatcatctccggctttcttccgccgcagccgccgccgccgcctgcgctgccgtccttcccggccggcttgttggcgtgcgccttggcgccaccgccgccgccgcctggcatgggtttggcaccaccgacgacgcgaatgtcggtgatgaccttgccggcgctggagcagagcctgtccgagacctcgtcggcgtcgaacggccccgccaccgtcaccgtgttgttcttctcgtcgtacgagatggccttgatgctcgccttatctacatacacacagtgattaattaggccagttcatggatcaagaaattacagtgtgattaatttgggaactaaccttggagcttgcagaggacccttctgatcttcctgtagcatctgtcacattcaagatccaccatcatcacaattgtagacatctgaggtgagatcaacaaagcagagatacaacttgttagtatgacgacacaaacatatgtgggtgattaatcactgtaacaagaacactagaccatcatgtccaatgagaagtagagaacaacagtaggcaatgctaactaagatacaatttaattagcccttttaacctgtctgaaagtatagagttctatgatggtactactattctttaagataagtagaagaatttttttttggaaggttagaaaagcagaggagtttctttttccctttctttgaaggttatagaagcagaggagtagacatcactacatcagtgagcattaatcctagctatagctaactcaaaactgattgaggattacagctgatttgcattgcacgagccacacatatccattcccctgatgtgcagttaggttgttggtcaatttatctttaaagcgcagcacaaacagagggagaaagaaagaaaaaaaagtgtcggtttgcttgctctctacttcacttgccattatcctttaagctgtcccgacaaaaaagcactcacacggtcatacatacagtacttcaaactgaacctgatactctagttgtggaatcagaagttgataactgccggaattcccaaccaagatgagtcgatcgaatcgaaatacaaaacacacaagagatttaattaattatatattggacgagaggttgtacgtcttcactctgcctcagctgtaagtatgctactgtatatcatctatccatggaagaacaagaagatgaactgggcaagtactactggcacacagagccgccattgcagagctgaatttggaacgcacaaaccgatcgatcgatagacgacagtgcaaatttgcagcaaattaaatcaagaaatccacaagaggaaggcaaccaccaactcataataatatacatcagggagttaacttgcaggtacctaccttgcctgccatggattattctcccaagctagcttctctcagtcacctcgctgttggtgagacgagggaggaagaagagatgaggaggatgacaagaagagagagaggaaatggtagggctcgctttttaagctgaagagaaatggcagcacagcgcagcggatgcacgcggcggcgcagttgcaagcatcattgcgcatgattagtttacgctaaaccaccctataaagcgtaaatttcagaggccacgtgtacacggagacagatcaagataggccatcgccttcgtctcgcccgttacatacaaccagctgcgtgtacgtacgtagtacgagccggagctttatacatgtcggctacggctcttttgggtgttttttttttcttttgaacgatcagacacaattcgaactactgcctccgtttcaggttataaaactttctagcattgtccacatttatatactccttccgtttctaaatatttgacactgttaattttttagcacatgtttaaccgtctgtcttatttaaagacttttatatgtatacatataaatatatttaacaataaattaaatgataggaaaagaattaataattacataaattttttaaataagacgaacggttaaacatatttaaaaaagtcaacggcgtcaaatatttagaaacggatagagtatatggtaacgaatcatagacatatatgtgtgtctagattcattaacatctatataaatgtggataataattgaaagtcttgtaatatgaaacggaaaacggaggaagtatatatgttgtatatccaccgtacgatgccgaaattaatatgtccccatggctaggatgtaccgtaagttatccatgtaggcttcaatacaagagctcgttctaaacagaggcgggaaatggctaattagccaatagccacacatgaaatgagaaatatatgataaatttaatatgactccattataaagaattaaaaaatgtatttgtttaattttttaagcaacttctatagaaggttttcgcacgaaatataccgtttaacagtttaaaaaaacatgctaatgaaaatcttgaaaataaaatttaaattatagagcttgattttagagttaattttaaggtttctgtttatttttcaacttttaaacaactagaacatatataaattaaagttttactattaatggttgcataattcctttttcccacggctatatcaaccgttgatgaaatgatcagagcataattggttgaacccttaattagacataatcgaataagataagattggatcaaacgcgggttatggagacaaaaatgccgagatacaggaaaagcatgtacacgcaatcatctgttcatctgccaccctgaattaaagtaactgccattgagcaacccatcaagctgacaaattaaattatgataagcactactccaaaatctttgtagtgggcactgacgtcaatggaccaattctactactagtgttgacctgtggagtggatgctagtagctagtaggattaggaagataaccaccagaacatcaatagaagaataaaattacgaaaaagaatgggagaattatttaagagaaaattggttccatgatagtaagtactacctccgtcccaaaataagcgcagccgtagatatccgtgcccaacctttgaccgtccgtcttatttgaaaaatttatgaaaaatttaaaatatttagtcacacataaagtattattcatgttttatcatctaatagcaataaaaatactaattataaaaaaatttcaaataagacgaacggtcaaacgttgaatataaataatataaaactgcacttattttgagacggaggagtattaattaaagattggagtggtgcaggagccagtaggcatgcagctttcatggggagcggtctgggggtgtgtgttgttgggttgttgggcactaattattatctttaagcctaacataccaatctatctttgtcgttacgattaattaattaactttgctctatgcctagtgcatatttatgcaggagtacataattacagatcggtgcatttgttctactactagctagctattgttagtgtcaaagcctgacgtagcatcgatttgatgtgccggtgccgtttcgctctcggatgaagacatacatgaattctgcaaattttaccgttgatgcggcctctcctttgaaaaagctaggaactttttaaaatttgagagcaagtttaaatggttttcaaaaattgccacaaaattggagtgaaatttctgcgtgtgtgtaccacacaaaagcaccagaccatcaacagcctgcatgatgaaaagcttcaaccaaactgtacgaatctcgcacttgtagcagcagccaacaaacctatgcatgtagctggactgtgtatagtacccaaaaacctttgcttacaagcgagcgatccaacacgtcttgtgcgttgctcaacgaccgctgcttttgtatggtgtagtatgtacacccatctctgatgctatcacacctatgcaaagcagcaaaggttacagcttctaacatgattgtagcagctgtgcttggggcttaattaatcacctctaatgtgcttcaatagtggggtaacagcggattagctttcacatagcaaatatatttgtttacgagtacaataaaacgttttagcagacgatactacattcatgctgccgaatatgctgagttggtaaaaaaa

SEQ ID NO: 24277 - DNA, 24410 bp, Oryza sativa
  unsure (1)..(24410): unsure at all n locations
tatcaattatttttgcaaagccgcaaaatattatctaactctacttttcatgggaatatctaactattgttcctgtgagatctgatgtctaaaagggcatttaggtacaattgaaacggcgataataaatattgtaagagcaatttcaaatgtgtttatgttggtgactttaaaacgtgccattggctatagcctaggacaatgagatggattagttgtgtttgtccaacattatgtcagtccacatcaaggaatctttggatgagttgacatacagttccttgtattacttgttacttcttggctagaaacttggaatctgtgccactgtgccataccattcaagtaatgtatagtttagtcctttctaatgtgcctcattatggcttctattgtcacgggctagtataatagatgaggaaacgcaacataaactatatttgaagctggttacaagatgtggccctggacctcgatggcgtggcggagccatcataggcactgcgtggaagaggcaggacgcaagctcagcataacctaatctccaagctaagcaaaataggccgattttcagcttatacaatgctgttgccagccacattattctcaactgaaaactaacaagcccagaaagataaaactaactcaatctaatcctgaatttgtggtgcctcattgttgccacatttgatctggtgcagacgataaaggagtcctcacctgacatctgtatacacgccgtcatgaccatagcttaactattgagctcactaacataaatttcagttcccctatcctagatatgaaactgcaataatgaatatcatatattacaccatttattattcctgggcaattcatctagtcatcattgctcttgtcattctttcttaatcatgactgactagctggtgtggtttctactgcatcaaatatcaaaagcagcattaacatttttataatttataatgtaacccaaaaatttaggtttcagatgtgcagctcaaccattttcaaggtaaaacctgcaaaacttatcaaacgaaaccactcaagacacatgaaaccatttttagttctttacaagagatctttgacctgtgtccccagcaacatggattgatagagcatacgtcactctttggtctgagtaattatttgatgaacctggtttggagagaaactagaagatacaaagtctggcacaattggaagaccatgcttgattttttctgttcgtggagctatgattttgataaagaactacaactagcaatttcagtgataactatactccaaactttgtcacatagtaactagagatgccacaccaatattttcttttgactcagacatcactgaatgttttttttcttaccgaggttcagttaaatttatctccactacagtatataaaaaggacctagtggtggtggcggtgagtctgtcatccccctaccacctcatgagttgcctttttcctaagagaaatagtctttccaatgtagaactatttgtctactatgatatgaattagtttcttttttaaaattcatgccatcagtttgtttaggtctttggtttttccactacattagtgtagtttcctcacatgaatctgtaaggcacaatagtgacaggaaggagagagatggagcagattggcactgaataatgagcaggtaaatgagcaatgacatggagaagaaacagttcgatggatagacagaaagttggattctattgatattagatggggatgagatgagagatgaaaatgataaaaaaataatacatatgcagattaattgcagtttaagaataaaatgaaaaattcatagttttagatcaagttattgaaaaaactatcacgcaagaggtagtgagaaaaaaatgctcaatggaatcacaacaaaggcagctataaattaaaggtcaccaacattagtgtagtttttttctttgcgaaaatcaagcctatgtaagattccgtactgtctgcaatggctataaaaaacagagaacagaacatcaacaaagaattagctgaaacatcaattttattgttaccaataagtctaaattatcctaatggactgtatgggtgagagggtttttctttagagttagttcaaatttgaatccaaatccccctatccaaaacaggactaaagaatgagttgatgataaagcatcatagttctttactgctaactcttttttttgttgacctttctgacctatcatggtcttcaagattacttagagtgggtatatatcaaggtataatcatgaaaagtactttgacaacaaattaagtgatacaaatctcatacaacaaatctaaataactttaaacatgtctgtaactagaatggctgacagctcagattatagactgcgaagtaaaaaatagaggtatagcagatgactaaaaaaagctcccaaacctttttcacccgtttatcattgtagtcgcaatttagattctattaaacagctattcataatttaggttctattaaacagctattcgtaactcaacagagccactgcattacctacaattaagtttaaataggagtaattccttatcggcactatgaacaattagtaataattacctacaatcacctacgggtacttgcatatctagtcgttgaagctaaaactgttaaccaaatctcgccatctctaattggtaattactagttatggctgtctgatttgattgagccccatggcaccacaaacacagcacagactaaatcacacctctagttcttccacatccctaaaacacccgcgcatcaagattacaagcctagataaaggtttaaacaacagggagaaagaacgagagagagatggccgccgcgggtgacggggactcggggaggggagagtgtgttttgggggcgcgttaccccagtcgtcgtcggcggcggcagcgtcatcggcggtggggcggttcaggtgatgcggatccatgagatgcaaacggacatcgaactccggacgcctcagggcgtgagagcccgagctgcgaagcttcttcccctcaggtaccggcggccggggaggaggaggaggagggcggcctggtgtgtaggctctgcctgccgggtgccggccgccggcgtggaagaaggccggtgccggctgcagcggcggattggcggcggatgggatgggagtagatggtagtgaggaggggaggggaagcaagatgagatgggaagagagactgctggaatttggaaaccgtgggtcgtttccgatttctacccctggctttgttttttctgttctttgcggattcaatttttaaatgaattttagctataatttacagcccgttcacctgccttgaggacttatttcaagtacatatcatattatatcggatgtttggatattaaatttaaagtattaaacactaattacaaaacccattccataacattggactaattcgcgagacgaatattttgaatctaattacaccatgattttgacaatgtgatgctacagtaaacttttgataattatagattaattaggtttaaaaaattcgtctcgcggattagctctcatttataaaattagtttttttattagtctatgtttaatattccaaattagcgtctaaatatccgatgttacatgggctaaaaagttttagtcccatctaaacaccccctaaggttattattatctactctcctcgcaaaaaaaaacaaatctagaattgatggttgtattaaaatatattatatccagttatctaattttatgtttatttttctagatagagagagtgcgctggtaatgttacccttcatcgggaaaattgattttgcaatgacatacatccaattaatcacgtgaataatcctagtaaacgtgacatctctttttatccatgtctcttcacttgcttatgttgctcatgtgagataaaggatagagtggacaagcgtgtccaccagcaacgctcgggaaaatgctcacacccgaacgaccggcggggtggagaaaaatcggacgctgtgccactgcagctgcagcatgtaaagaatcttttcttttcttatttcttcaaaagattttttatcgtaaactatttatctaatctacgatctgattgcaccactaaattcgttacaattaaatctttacaacaagaccacacatgattatatttcaaaaatatattttaattttttattgatttttttaatgttgcatgcggtctcttttgatgtttcaaccagtagttttacaatgtttcagctagtgtactcatgatgtttcactgtgtatggatcaaatgttgcagtggaacacgccgttgcaataaatcacccacatattttggaaaccctctattaagggaatttggtttattttttgttccgcaaaaaatgtttcacctagtgcactcacaatattccactatgtatagatctaatgttgtagtgaactgaaatatttcattgcaacaaaaaacccacatattttggaaacctcctattaagagaattcgtttcatttttttgtttcaccaaaaaatgttccacctagtgtacttataatgtttcactatgtatagatctaatgttgcagtgaactgaaacattatttcgctatttgctgaaacattgtttttaaataaggtgaaacaacaccagattaaaacgagtgaaatatttttgatctacttagtgaaacaattctgatatacctggtggaacatcgtgcaacatttaaaaataattcaataataagctatttttttcaccggaatatatccatgtgtggtcttgttttgaagatttaattacaaagaatttaatggtgtaatcgaatcatgatttggataagaaatttaagagaaaaatcaatttaaaagtagttttgcacgtaaatcggacgctgacgtnntgctnacntnnncgtcnnatnnntncctnnnacatcggacgtccgacgcgtagttctctcccaacggtcgacgtctaacggtctaagagaagccagcactttcccttgctcctccttcgctcccactccatctccctatgtcttttatcttttctcgtggtcgtccctcctccctcccagcaccacttctcctccttatccgaggacggttagccatgagataaataagaagtggtgccgataaggagaagtagcgctagacggatctatttttagaggagtttgagacctgctaactatcaacgtgtaggaggatccgtggggtagccatcacaaaggaggagccatcactgccgctcaccatcgagaggagtcgcgggggatcttcagactagtggttgtcacttagtcatgtacgcttgaggagaccgatggagctcaggagataggggtgagcgtggtcaggtccggtaacggaagataaagatggtggcagtataggctagtgttaatgccaaaatttggtacgattctttagtggattcagttaaggaaaagaaatcgattggtagatggacatatatatagataaagctaattttaaggaggaatcgtgaagatcatggcaagatagtttcatatgtttgatatatctttttaaataggtaggattagttatttcccttttcttattaggaaatcttatatcgtatctgatttggtcttgtcctaacccgagggtataaatatatatgcctgtgatctttataatatatctatatatcaatacaattatattttggtacatcgccaatctttcaatgggttcttgttttcgagcagggttacgtcggttaagtttgatctccgttgagaaatcaaatttgctcatcaagtctcattgacatgaagattcaatgaaagattgcatacaagattccttccttcactagcctctagctattttcccagcttcaacccacagggttcagacctgacaactcgcaactcgtttggtttgggggaatcgtttccagggaatgagagttttgaggagcatggtttttaagtatgttgtttggatggtggacgtgcgagtttttatgagagactagaaaggggaatttaagaacaatccactttttcaatatctgagtaggataggtaattgagagaaaattcattcttaagcacatcgggataaatatgggatgtacatcatcacttaaattttatttctcacccaaactcccctactactccctccatttcactatattaagagcaagaataataatgggctaaacttattatgtggaagagagatacgaagaaaagtgaggtgtattggctttagggtttaccttttttgttttctaggtaaaaaccattccccgccgatttactgaaaataaaccaataattttctgtcaataccgtacaaaaaccaattaataccagccgggtttccacaagccgatggtcgattttctgccaacacctggatcagctccaataccgtccactgcctctgtttttttctttagctcagcacgcctctgtttgttctccagcttcagcacatgcatcggagatcggactaactggagttagtcagaggggttgattcggttggaaagtcaatcagactaggctgtattctttgccatatgtgttatgttccaacttcctttccttattattttttaggtgcacgtttttcaaactactaaatgatactccctccgtcccaaaaaaacaaaaagataaaccgtgggttcccgtgccaatgtttgactgtccgttttatatgaaatttttttataattagtattttcattgttgttagatgataaaacataattaatactttatgcgtgacttatctttttaatttttttcataattttttcaaataagacagacagtcaaacgttggacacggaaaccagagtttgtttttttaggacggagggagtacgtgttttgtaaaaaatttatatatgaaagctgctttaaaaaatcatattaatctatttttcaagttttttaaaactaatacttaattaattatgtgctaataagctttgtggggagaaaaaaatttccaaccatacataacaaacacagccttataaaacaaaaaaaaaaacgatccatccgctttgcaacctggcatggcatagatcacgcccgcaacgagcaaaaatgaataagttcactttgactccgacaactatagcttcaatatgattcatatctattagatatctcgactctccaactattaaaactagagcaatttaactccctaagtagttttgtagagtggtttcgctgatgcggcgctttgacttagtttgacagactaactccacgtgtggaacccacatggcagtgattcctcctttttttttttccttttctttcttctctctctcactcctttcttcgctaacaggaggcgccatcgctccgcctcatggcaggtcgctgcggctccgctcgaggccggttcgccaccatgcatcggggttgcccaaccgcggctcctcctaggcaatcttttcgtggcgcccggctcacacctctctctttcccatcttgctcccttccggccgcggccactgcccacctcaccgttgccgctgcggccatggcctgcagtgccacccatgacacggagcggggacgaggagcggtggctctccccatctcctccgacgcctcctgttgagccatctccatctctaccaccggaattgtcccacctgctagcgccccactgtgcaatgtgcaggaggtgggcaccatcgcagcgcccggctcgctcctcccctgccgccaccgcccacctccccaactgctgtactgtggagaaaacatggggtagagagaagggaaggatggtaagatatgtaggccccatatgtcagtaggtcccacaatattttttcgtgaatgacaaatgtgttccacatattttttttattctaataccacgtaagcaccacgttggacgaataccaggtcaacaccaccacgtatgagccacgtcagtgaaaccgccgaaagagttaaaattacaccgattttaatagttagggtcgagataaccggtattacagtttaaggatacgaatcagattcggccactggttaggggagtcaaaagtggacttactgcagtagaaaaggagaggcccagttaaccgggccgaaattgccacctaaagtttgggcctaactcagcccactcaatacggagtaacttaccgactacgaatcaaatttttttcatttttagattttttaaaaaatatttacagaaataatctatcagccaaaaaaaattataaaaatagaccctgccgcccaccacttgggcggcaagctgacgtggcaaatgggggagggacgggcgatgacggagggagggttttttttgcaggaaaacccttgccgccctctgttggagcggcaaggggccccaatgcaaaaaagctagccggggccggccattttgcaggcggccccttgccgccctctggccgggcggcaggcctcgctgcctataaaaggcatgccgcccagcccccagccctcattcctccccccacaaatccagtaaaaaaaagaagaaaggggaagagaagagaagaaggggcgaagccctgccggattcacacgctgatttcaggtaatattcatagatcgtatatgtgactattgagttaaatactgtatattttttaaaactttgtttgaataaatgcattatatttttagggttttagttgtactaatctagaagtgcgtattgtagatatcggtaactacgtagatctgctagtttggaatcagtactttaccgttgcattggcatatacaagaagatattacgttgtaggtgtttattgcatgaaagaataatatgatctaattattttgttgacagatatatcgaacaaacaaatattccaagtttaccatggcccaagaaacgtccgttacgggccaactggggtagatatgtcagaatttattgtatcagaaaggggaattgatagaccggctgagaggagtgtaccttctataaaaggatggttaatgaggggcttgagagttgatccacagacaagtgacataacaatcaatgttatagtaagtcgggcaactgagggtttttattgggaactaatgccagttcaaaactctcgagtgtggagatggtatgtggaaaatgcattgcaacgcgggtggcctctaactatggttccatttgttcacccaaaggatccaggtgtgcagatgaacatggatgatggcgagggaccaagtgctgaagtaaatgagacttctgtggaagaggtcaacgcacgagaggacgggggcgtagtagctctagtgggcattcaaccaggtggagtggccgacgagggggagactgtcggtgccattgtggatgaaatggagagggaggattctgacaacgagcgtgtagaggaaggtgattcgtcagatgatgagacggatattaatctagcagaatgggctagtgaggatttttttggtttggtcgtctctgaagaggatagtgtgagatgggagtacaaagaaaatgaggttattcagggagcgatttatactagagcagaagatatgaaggaggcggtaaaacattttttagtgtcacttcgtagagatttttgggttgccaagtccaactggttgcaatatgaagttcggtgtgttaaggaaaaagatggttgtccctggagagtgcacgcttataagggaaaatggaaggattattggacagtgtcagttgttaccaagcatacatgttttctacctggtgttcagaaataccataggaacattacatgtgcatttgttgcatctgagatgtatgcgcatgtcatcgataatctcacatatgaaccaaggtcaataatgcgacacatcgaagagacatacaagtatactattagctatgccaaggcgtggagggccaaacaaaaaataatagagatgagatttggaacttacgaagcctcgtatgacaatttgccatgcctgcttggtgttatcgaagaaagaaaccctgggagctcttacgcggtgaagaaattcccctcaattgaacatcctggcaagagtgtgctgcaaagggtgttcttagctctacatgcatgcaagatggcattcgtgaactgtcgtcctgttctctgcattgatgggacattcttgactggaaagtatcggggccagatactaacagcaataggggtagatgggaacaatcaggtattgcccttggcatttgcttttgttgagagtgagaataccgacagctggtactggttcctgaaattggttaaaacaaaagttattggtatgaggccaaatgtgtacctgatacatgataggcacgctggcattctgcgagcgatagaagagttgcagtttgggagtatggaacgaggataccttggtgagtggaaagatgtacagagtaggtggtgcatgcatcatatgggagctgatttcttcaagcaattcaagaacaaggagctcatgaacatattcaagaggctatgcaatcagaaccaggagaaaaaattcaatgagctttggaagagattagatgagttgtgtcacaccctgaagttctttcccaagcctaaattgaagttgtaaatggtctcaagaaaatactggtgtaaaagcaagagtaaaccataataaatcaatgcaaataataatcggaattggcatgtggaattttttcttgagttctacatgtcgaaatacgctaacaagatttttagtggaattttcagagctctagaaataattttaatcaattaaaaattgagcacaagcaatatttaatcccaggaaaattcatttccttatttttcttttttcttttccctttttctctttcgaatgggccgtcggcccattctctcttctctccccctccccactaggctggccgaaggccacggcccagccagccgccggagccccctcctctctcctagggtggcggacaggtggggtccaccagtggggccggtctcccacctccagcgggcgccaccgcgccccgctcccgagtctcccgggccacgtggccctcacgccagggtcccccgggcccactccccctctctcccgcccgcgcccgcggctgagacggccggaattcaatttttgaatcgtgcctctctctcctccccacccctccccactccgcgggggaaatcgcggtctccccggccacgatggaccctcgtgggtctatataaagcacccccgttccctcctctctctttttcattttgcaatggcccgctcccgtgcactccaccgccctagcgttgttgtcctcctttttgccgccgccgccgtcgctccggttgccggtaaccgccgtgccgaaccgcgccgttgacgtcatcacgtttgccgtcgtgcgggccgtcccgtccacccctcctccgtagcaatccgccgccggaaccccgtttgtgccgcgcgccggtgagcttcgccgtggccggcgccttcggtcgctgccttagccatccatggtttccctctccctcactaactcatcccttttgatcccttaggtggtcccggagctcgtctcgccgtcgccatcgccctccgtcgctcgccgtcgtcgatcgtcgtcagtgaggcccctcctcccctttctccctctctcccgtgccgcttagccaccgcgccgccgcctagccgcttagacgccgctatcgccgcccgcgtcgccggaacgccgccgcctccgccgccgatcggtcgccactggtcgccgcctcacgtcgccgctgcgtgcgcgccgcgctgccacgcgccatggccgccgggccggcttgagccgtgcccgcgcgcaccggccgcgagccgcatccaccgtccgatctaccgggcggtagatcggggccgtccaacccggcctcccgcgtggctgccgcgtggccgccgcgtcggcgccacgtcagcgccacgtggtgcaccgcccctttcccagtccatggacccgatccaccatggaccagcgcccgcagccactgccatgtggggcccacatgtcggcaccgcccctctctctcccgggatttatttgttgcgcaataaatcaattaaggatttttctatttttagtaaaaacacagtgaatcttctaaaattcatatctaattcatccgagctccgtttaagcccattcaagtctcagtaaatcaagaaaaatgcatagaatctattaaaaatggttttgttctctgtttcagtagtcttatagcctgtttgtattgtttgctttgtatgtcgcttagattgcggctctcccgacgctccggtgtactttgaaatagttgccgaggttcctccagcagcagagcaaggcaagtcatgcttgtcacttgaacatgttgatcctatattgcaaatgctccattgttttccttcaaatactgcattgttttataatattaccatgggatgtttacctactattatagccatgctattttgtaccatgttcctttgttagtttggactagggattgcttagccatgcttagttcaactagcacacaatggagaaaattatattaatgtatagacttcaggatctagtgttgatgttggattagagccaccgtcctggtgtcgcttcattaaaatatgttaaatggtgggctgtgggtgcatggttttgctagtcgcgcccatggcacttaaggaccagttcgcgggaaaccctggaagaattcctcgtacttaccacaagccagcgtgggcaacggctgggcttgtagtgtagctttcctctagctaacgcatccaggcaagggtgggcgtgatggagtttggatgggccctgcgacggcctatgcggctttcagattcacctaggcacgagaggggactgcccgctgccttgcgaggagtgggggtgaaacctgaggtgtggtgtgcttggttagagggggttatgcgaagggtcctgtcacggcctctatccggtatgtcgtggtggcatgtcggcgcacggaaacatgttgtggggctgtgtcttgtgggtacagttgtaaacctcttatcagagtaaaactatttgaatagccatgcccgcggttatgggcggtcaaccagattcaccgtgattagtttcaccctagtctagtctaatggaattgaatagtataggtgggtggttgggcctgttgcaacgtggtatagcgttggacagtggatgattaatattgattaattattataattgttttactactttcaactactgtttataaatgctcgctttatgcaaacgaacctctatagctatcccttgataattccctgcatcatacccctattccggtatgacttgctgagtacagtgggtagtactcagtcttgctctattttccccaaaccccagagtttgagtatgcgtcaaatggtggcttctccgaggagtaggcttcgtccgtgccgtcgatgatgcctgtggagtggtgatcccgctgcggtccaagtcaaggcttagctccagttatcttttaattttccgctgtatttatgtaagactttatgatgtttgtaagacgtggatctgtatgtcaactttatcgtttgtgtaccccggccggtcctggacgggggttttaatacacattctgcttggaatcctattcgggaatttctgggcgtgacaagttgatagccaaatgcagtaatcagcgtgcagcggctccatcgaccaccgttgctgaccctcctcaatctcttggacctctcccaacggatagtccaacattggttagaagaactggagtggagattcggaaattttctcagtggattctgcatgaaccaaaagagaaatgggccaaggcgtatgacacaggtgatgctagatatggaataatgataacaaatttggcagaagtttacaactgggtgatgcacggtgtccgtggactcccactagttggcatagtggagttcattttacaagggacatgcaggtattttagggatcggttccaggcagttcttccctctatgccgaacaacagcattttattcggaactttcatgcagaaaaagctagaggagttgcgtaaaaaggccatgaaacatcgagctctagtgcaaggtacccaacagcacaggtttgagatactttgtcaagataaggcaggcaggggtatctaccgtaagagagtgaagcaggaatgtgttctcaaagccgacggcacatgtcattgctcttgtgcaaagccgaagctgctccacaggccatgcacccatgtcattgctgccgcaacggagtgtggcataccatatgcagtatatgtgtcacagtacttcagtaagcaagcagtatatcatacatggagtggcgagatttatgggttcggcatagctggggagttcacagagactaacaatgaagtactaaatattcctgacccatcgaagctccgaggcaaagctggaaggaggaagactcgtcgcatccgcaatgatatggacgagtcggaggctggcagggtgaagcgttgcagcaaatgcaatgaatgtgggcacacctacaagcattgtcctaaagacaaggagaaaccaaatgcggcggaggcaggactatcaggatcagcagcaaatggagctcgccctacgggtgaaggcactacctcaactcgactacgtcctaggcgtcgtcgtgccacgtctggctacgtggtgtagttcttgtgttctatgttggcatgtggctttgcttgtaatttgtttcgaacttaccgatgtgtttatgtttcgtcgtgtaatgtcagacttcggcatgtcatgtatttaggtctcgtgatgtaacgtcagacttaggcacctaatgtctttaggtatgctgatgtaatgtcggacttcggcatgtaatgttatgttattttatgttatattatcgaactctacatatatgttaaattgcacgtcatcgttatgtacccttagtaacatttgctatatttaaatagcctgtactcttgttgtacataataattcttatgattttattactttttcataattttacaagttatcttttgttctacattactactttttgaattgttctaacataaaacactatatttttcagagatagcacgtcatgatacacctaatttttataatgacatattaatttgttcttgcaggttgcgtgaggccggcctcctaccgatgtgtcggctggtggaggctgcagccggccacgcggacccggccaaacgctggaatgtggaccggtccctcctagcagctttggtcgaccgatggaggccagagacgcacacttttcacttgccatgcggtgaggtagcccctaccctacaggacgtatcgtacttgttggggctaccgctcgcgggagacgctgttgggccagtgaccacgggtgtggactggaaggatgatctgacggcacgtttcacaccagtacatcgcgcaccacatctcccactccagccgttggcacaccaccgcaacaccggacctacgaagaggtggctacttcagttcatcgtgagtgtttttgtaccgaaatgacaagcgtactacatatttagtcgtaaggtaaggtgcctaacattttatcgaacgcttacaggtcgagcagctacaggcggaggccgacgagtactcctacagccgttgtttggaggcgtacttgctcttactttttggctgggtgatgttctgtggcggtcacgggcacgcgttcgacaagggactcgtgcactacgccaggagcatcgccgacgccgtggtaggcgaggtgcctcagtggagctagggttccgcgttgttggtggctcagtaccgtggcctttgtgaggcttgcacgaagtcggatcccagcacgacctttggtgggtgccctctctttctttctatctgggcagctgagaggattacgatcggccaccctgaggtggaccagcatgcgtacgaggagtcactgtacgcggagcgaccggaggtcgactaccctacgatgggtactctgtggtgccgtcgtcaggtacgttgcatcgatcttctcttattgttaagttcattgctaagttcattgtacatcacatcgatcatctcgtattgcagcgccgatgggctcacgtccaggttaggcggtcgtatcctgagttcgttatggagttcgaccgccttctgccgactgacgtcgtgtgggagccctacagtgccgcggctacccaggctcgtgcgccgttgggtctgtccacactctgcacaagggaccacgcgtactggacgactacggttccgatggtcttcgatatctatgttgagcctcacgcccctttccacgtgatgcggcagtttggcttccgtcaaccttttccagtaccgtttccgacgaccgtcccagctgctgttcaccggtaagatctttcactacgctttgatttgttgcattaaaatctacctctccacaataatttgcaacatctgttgattcacactaatatgatacattaattcgcaggtactcgcacaagggtcagcagtcagctggcgactagcccgccaagttggggacttttgttgagaactggttgctcgcaaccaaggaggtcgtggagcacgagggagagccacacaccgaggaggcgtaccaggcctacctacgctggtaccagccacgcacccgtactagggtcaccttcgctcccttggagcagcagacccacgttgcgatcactagagacctctacgccaggcaccgtgactaggacttcgcttgtgctgtgagtaccctgcatcgcaccattcctttatgttttattcctttctcttcgtcaaattttacgaatatttacgaacaaattaaccatgcaggtcatcgacatcaacagggtcgtcgttgacggttcaacgacgatccaacgtttaggcgcggggattccgatacctgtagaggagcacctgacgacgtacacactgatggtggagtcgatgcgctcgattctccgagtgctcacctgtcgtgcagacgacgttgctcgggcagacgcagcaccacagcggccacccgtaccgactggtccccgtccaactgcgcacgttcctaggccgactccccctccgcacgaaggtaagtatttttaaggatttttttgtacatgcctagcacatctatgtgagccgattcatccgattgcttcagggtttcgtgcaccgttcagcaccccgcctttcttggctaggccttctgttgtgccccccacaggtacttaaaaaaacaacagtacttcgacaattaatttacatgcattttatgtcttagcttacaagagtcccgttgtcgatgtgtaggtttcgcccagttcgctatgacacaggccgcccacttctcccaggctgcagggtcagcgtctcaggcagctgcgtcgacttcgcactcagcgcagttctggcagtacatcgggacttcatcacacgcagctggcacgtcgagtcagggtccaccactagaccatgttgggacctcatcggaccacttggtggcttccgccttgctcttcgacatcactgacttcgacttcgcttcaggctcgacagaggacgtcatcggcccctcacagctaagaggcgcactgccggtgcagacgcaggaccaggcgcatgccactccgccgccagacactcgtgctacccatgctgtgccaccggatcgtttcacctactcccaggaccacatgcgagcacaggcccggaggaccaagcgtggtcgcggcgcggggcagggccagtagagcagacttctctttgtttatttgcttcgcatgctagtactgtatgcttgtgtaatgaatgcgttgttgttatatgtgcatgatacctttcggcgcatgcacgatacctttcggcgcatgcacgactactttctgccgcaccgatgcagcctcctttattcgcgtgctatacgagtatttgcccgccatttgccgcatacgaccaatgtaactttcggcgccaatcaggcgtacccaccatgccccgccacgttcacatgtcagggatatcactcgatttttggtgcctatataagtcgccttaacgagcgaggcctcacgatctttcagaactcagtcacattcagtactctcttccccacttgcttcattacaaatcctaccggctttcgtcaatggctagacgcctgggcgttgaggatccgaactagcgtagcgatccttatgtatacctactaccaccttggtgccggcgtcctctctgcctatgcagtgatcgatgccaactaatggcttcgaggaatcctgatatttgaggaaggcgcttttttaggtgccctaactatgaccgtgaggtattttattatctgcatatgcttattcattccgtatgggcaatcgttttattcttcgtaacactactctattcggcagacccgcactacggcttgcgcatacatcgagtgggtcgatacagaaaatcccgttctcgacctaaccacttgtttaaaagaaggtcgctggtatttcgcatccgaaagtactgagcaatacttgcatagaaaagcagcttacgaacgacaatgtcgtgaacaacagtgcgactggtgggtgctaactacgacactccctccatgggaagcccgtccaagatgcaggtgtggtaatcgttgtcaggttcttcgttccataaagcctacaacattgggtcgaaggttctttgtttgtccaaatattcttgtcgacgatttcatggtaagaatattttgattacatgaatccttattttctcacaacatttactaactttgctcgcttcacatctattctttcctcccaggaacgaccaaggagatgtcaatacagagaatggatagacactagaagagttctaactccacctagccgtgttgtgcagcttgaactaccagagcaatacatggttactaaagcgcggtttgagagaggagagggatcctcacgtaggggttagctattatcggacaacttggcatattgaaatttctactgtcatgcttccttgtcccattactacatcgtcgttgtgttcaactattgcactacctccctcctagttcaaatctaatatcatctatgtaaccgcaatggaaatagttgtatcatgttcaaattatactactatttcttcatgttacataattctccttgtttaagtccatataatgtttctacgaccgagactgcgataggcctatatcaattctctgagtactaatacatcgaataagttacaaaataataccttacttaatatatgaaattgcgaaacaaccaatttcaatacatttttataacaatattaacaagttttaccaataaatacttctttaattattattaacataacatagaaaaatcatttggcgatactttttgcatccgggtaccttggggcggcaaggggcccaaatgcaaaaagtacgaaccccaagctcttttggccgacaaggggcggcaaggggctaaatgcaattttggccgacgtcgtgtgccacgtcagcttgctgcccaccactggggcggcagggtctatttttgtaatttttttggccgatagattatttctgtaaaatttttaaaaaaaatctaaaaatgaaaaaaattcctacgaatccaatgcggagtccgactacgtatcgaatacggagaccgtatcgacagtaaatcaaatacggatacctatcgattccgtattctcctctgttccgctctctcttccccaatccgattagggttttacgcttccccgtctccgcctccacctcgaatccttctctctcgccgtctccatctccgcctcgaatccttccctctccccgcctccgatcaagcttctccggcttccgattctccctgacgccactcccttcaccactcttcacgcccgctgtcatggcgtacagggcgcctactctccggccgcagctcgcggcgtctccggcgagccgagttccgctatctgattctcgtcggccgccagtatattccggaagtaacggcttctggagcggcagaggcagatcgggtcgcgcttcgaccagctcgagtagggttgaggacaaggtactccgacgacgaggtttggatggtgaccaaacttcagtccgcgttttctcaaccccaaaaaaaggggcaaattggatgggcagtagtcccgcttcctctagcagcagcagtagtagccatgcttcctcctcgagcgaaagttggattagagataagctgtccggtgtccgtccgtcatcgctcgccgggcgggcaccgaccaccggcaccaagaggcagtgcagcagtcctccgccatcagctgatcgttcagagaagaaggcgaaagaagatctggcgatggaggagcctccggaggctctggcaatggaggagcagcaggatgcacttgcaactaaggagcaagctctggcaatggaggaggagcagggtgcccctgcaactaagggggagcaggaggtgttgcccgagatggaggaggagcaactggtgatggaggaggagcaggagtcgttggcgatggataagatggagtcggggatggaggagcagccagggatagaggaggaggtgttgccggagatggaggagcaactgatgatagaggaggagcaggagttgtcggcgatggataagatggagtcggggatggaggagcagccagggatagaggaggaggtgttgccggagatggaggagcaactgatgatagaggaggagcaggagttgtcggcgatggataagatggagtcggggatggaggagcagccagggatagaggaggaggtgttgccggagatggaggagcaactgatgatagaggaggagcaggagttgtcggcgatggataagatggagtcggggatggaggagcagcctgggatagaggaggagcaaccggcgacggaggaggtgccggcgatggagacaccagtgctggagaaggaatctgtgccgtactttgctgggccgtcgttcaacttcgcaccacatccgagcgaactcccttttccatctttacttattcacttaattcattctcactgatccctttcttacattgtgttttatgatgcgaattccttactgtttttttacctaactaagtgtctttattctattttccttaacaggacgaacgtggagaggtgaggacaagatgaatgttgattcgatgcactgtcggcggtcagcttacccagcagtcactgcctcagctcagccatccaggccactgccttcatgagacatgctccaactagaacatgtagttatttgttttcttcccctctccctatcaggcttcagggcttgatcagttacttttttttcttcttcctccctccctattaggcttgatgtcaatacgttttgtaacttgctcaatcttaactaaatggatgcaatcgttgcccctaagattatgtaaatggctcaatcttaatggaataaataaatggcaatctttaccctcccttgtaaatttgcagctgtgtgttgtgtctgtgtgttctccatatgagaggaaatgcttggggataatggtctttgcagtagaaagagttagagggaataagctgttctgggcttgaaaaaccagctgctatgccttcatctacatcctcctaatttaggtaatatatcatattttactgacatcgtttccatttaatataatgctgatcatgtcccgtggatatttctctaagttaaaagagtttctatgcacgataaggttgtttttgtatggctgcagttgggcgccgatgatgcgctccctagtgcgaatactcatctggatctggtctcctcccatctccgcgatgatggcaactggctcactgtgatgtcctctttatgccatcccagcaggggttggtgcctctgggctatctttgggtcgcacgcttttgccattgacaccaccgcggacgcagacattttgacattggatttggctggtattgttgccttgaccttttgtttttgctaatttttgatgttgcatgatatatatgtgctcgatgaaatggggcccgcatgcaatacttgttcttatttcagtagatggttataccatttgcagtgtattttcaccctaagtactactatttggttacaacatcgtgtttctgttcatgtgaagtgagccagagggttataacatcagctttaattcacttttttattttgctttaatagctacggttgggtctgaaacttaattgttgagatatatgtgcagctccattttgcactagtaataatagtttgttaggatggtctgtcgtaacaatttactgttacttctgtgacatttgttcaatcaaaatttgatgcatttgtgatatttgctgtttaggactgaaagaaactacttcttgccctagagcaaaaggtaataatgtaaagcactgtggcactgtaagtttataaccatagcagaaagtgcaaaatgcatgactcagttaggagaaaacaggaacaggctgagaagaagatgtgtaatacccaggaaactttcagcagcaaaatataattcagtaactatgcaaaatcactacttggacctaatgggctattaatgtgaaattgaattttcaggttatagatggtgtagtgaggttaaatatatagggtctgataaggtgcaaacactgctagtgctggccttgaggttggaggattagtaagattctgcttctctctgtttttttgggcacacacaggagagctgcgcatcatcatggatcaagccaggaattctgcaaggttagggcttgtttcctatagctagggtcgcggtgccatagatctttgtttaatctgaaagatattgctcttgtttggctctgtatgtgatgtagctattggtctacgtttcgtattatatcttggatcgttttgattttgttctaccactgcatgtttgttcaaaaatctgaaaccgctcttctttgcgggtcttttgttgaacctaggcgttggcgtttcagtattggttgctgtgctcttctaaagaaaatggcaaacatttgaggccaaggcaatttgggcgtctcctttgtgcatgcatgagctttgtgtcatgaccggcaatggtgacactgagaaagaggtttaactgtgaatgatagtgtgtgtgttttgggctagactttatcaaatagaatgcggcctgcgtgccttaaatcatttgggccaacggtccatgtaatcaggagataaatactcaagagagagaatggctgtggccagcctggcaaaaagaaatcgaatctatctctctccaaactgtctctcctctgcctcagctctgtttctcttcgtccccaactccgatctcgtctaaatatctctctctctcgtcggcggtgagtttcgcggtggcgtagtgttacagtggtatcagagacaggttgtgggcgtcgccgtgcgttggattcttcctgattcgccacggcgcccacaaaactttcagcccctttgaagccaggtatggactccatggagtcaaaatcttggagaagttggaaggcatcacaaagtggatgcacgagattgatcagcggctggattcccaaagtggcagtctcgagaaggtgactaccaaggtggatctcgccatggattccgtcggcaaggtgcagcaagagtgtgctgagttggcccgttcgatgaagcgggtggccagctgctctgatcaggccgggattttgggttcgcctttcgggatctcgcaggttagtgcaagtggttccgcgactcctccgccgttgaatccacttgttcctcctgtgttggatggggttgatttgggtcatggttttggtgatgggatttatcggcgtcatcagccacttcctaaaatggattttcctcgtttcgatggttctgatgtgcggatttggttggatatgtgtgagacttattttgacatgtaccaaatcactcaaaatttcaaagtctctgctgctgtgttgcatatgtcgggaaatgcggctcaatggtatcattcttataagttagtgaatgaggttaactcttgggatcagtttagaatggcagtcgcaacagaatttgagtgtgttgtggaacgtgagaaaatgtctgcactagatactctgactcaaactggtacaatgactgagtataaacaacaatttgattctcttgtctatcagatcagagtgtttgatccatctatggggggtaaaatgttagtgactcattttatgaatggtcttactgaagaaattcgagctgctgttgttattcaattgcctgacactgtacagcaagcat

SEQ ID NO: 24278 - DNA, 1368 bp, Oryza sativa
ggatgatcaaatattggggactgaattacagcaaaaggcaatgactaaattgatgggtttgcaatattcttttcaatacaagagaggggttgataatattgttgctgatgctttatctagaatgccttcctcctctcaattttgtgctctttctgtggtccaaccgatctggattcaggaggtgatcaattcttatacagtggatcctcaagctcagcagctactagctgagttggctgtgcattctcctaattctcaagggtattcattgacacaagggattattagattccagaataagatttggattggatccaatgcaggactgcatactaagttgattcaagcttttcatgcttctgcacttggtggccattctgggattgctgctacttatcatcggattaagaaattatttgcttggcctggtctcaagttggatgttgaaaattttgtgaagcaatgtcaggtttgccaacaggccaaacatgaacactgtcagcttcctggactgttagctcctctcccaattccaaaagaggcctggcaagacatctccatggattttattgaaggtttaccgccctttgatggttataatgcaatttttggtggtgggggatcgttttactaagtatgcaaatttcattcctttgcgtcatccattcactgcatcacaagtggctcatttggtggacaaaactgtatttaaaactcatggcatccctcgttctattgtgtctgatcgtgatcatctctttactagcaagttctggacaactctttttgctacttgggacactcaattacagatgagcacagcatatcacccgcaaacagatagccaaacagagcgtgtcaatcaatgtttggaaatgtatttacgatgcatgactcaggctaaccctaagaagtggagccattggattcatttggcagaattttggtgcaatacaaattatcatacatctcttggctgttctcctcataaggctctttttggggtggatcctcattattctcaagttcctgatctgacattggctactctgcctgatgtggtggatgtttagactgaaaggcagcacttgtctgaatttttacagcagcagttaactcgagcccagctgcgtatgaagaacaaggctgataaaggtcgttctgaccgtgtttttgctgtgggtgatgctgttttcttgaagttacagccttatgctcagtcctcagtagttaatagaccatatcctaagttggcttataagttctttggcccttttactgttttggagcgcattggagtggcggcttatcgtttggatctacctgccaacaacactgtgcatccggtgtttcatgtttctcaactca

SEQ ID NO: 24279 - DNA, 3611 bp, Oryza sativa
ttaactgtgaatgatagtgtgtgtgttttgggctaaactttatcaaatagaatgtggcctgcgtgccttaaatcgtttgggccaacggtccatgtaatcaggagataaatactcgagagagagaatggctgtggccaacctggcaaaaagaaatcgaatctatctctctccaaactctgtctctcctctgcctcagctctgtttctcttcgtccccaactccgatctcgtctaaatatctctctctctcgtcggcggcgagtttcgcggtggcgtagtgttacactttgcttatgctgccatgcaggtgagggagatgaacttccggaatgaaattcccacacatgagggctctgagacaattttgtgatgttgatttcatttataccgagagtaacgtgcaaaccagcggtaagtatgcaatattttaactaatcaattctttctaattcaagtatcaattcaattaatatttttctgtcgactttgtgtggattgagaagttatctgttgactctcctgtctgtgaagtagtatcagttactcctctcaaataatcaccatgattctgttctgctatgcacttctctgtctcagctgtcctgattaatagtacttcactaacattcttgtcttgtactcgccatggcacccctgtgccctggttcataatgttcgatctaccctttaaaataaacgatcgagattcattctacttgtagtagaatactgcaagtagaatgcaccagagcgtacccctcaatataattgttaaatctctgcagtaaattaataaagctgataaatgaagccaggttggaatatgactgttcaatatgattgttactttggtggctggaattaatttccaaagtctgtatccattttatattttctctgcgctacaatgtgatattggatttggtatacccaaggtcttcactgttccggcagctaactaattagaggcatcaaaatttcaaaccacatacatccctatcttttttcttttgtttcttaactgtactggcgcactgaattttggggtactgatttggtgtgcttttgtttgatattggttaccttcttctcttgggagaaatgtttagtctctgctcccttgctacacttgcaaccaagtttgtcttctgagaagttaaattagcctccatgcatatggcagtttgctacttgctggtctttgagattgtttgcttgtcaattttgttgggtatgtgcaattaggaaaatagtttctgatggagcaccactaattttgtttaatttccagttcggctagagttggaacagatcgtggattcgtggtgatgattctattcaccaaaatgaggtcaatgaccaatatgaaagtgatactcagcaaattctgattctttcacctgaccaatagtcagccccatcctcttaaagttcaaaatactgctgatcatgttgtagtggatatctatagacatataagattctatagattttaggaggggcatctcagatgctacaagtgtaacagcaccaagtcatggttgttgggtgttcatctgacctcattgttgcttgttggttgctggacgtacagggggcgaaccatcagcacctagttcttagccaggaaagggtcaagctgggcgattgtaagaaagcgttgggccggccgacgacgtagctgccggcggccggcgactgtgctggggacggcaccgccgagccaatggccgcggacgccgtcgttcattgctgcctaccgtggatttgtggttctaattttcattctttggatgtcatgacaagtcacccggcaatctactcgtccaaaaatataagtatttttaaatcctgatacagtattcaagatgctactttgaccagcaatatttataaaagtaaaatgttttaaataaaaagagttgcatattataatagtttatttaataataaatctagtaacaccaattttacatgattgattttttttttgttattaatagtcaaagttaaaaatatttgacttatcactatgctaaacatgcttatatttttggaacggagggaatagatttgtagcaaccaacaggcaacaatgacgtgctttggtccgttgtcagatcattcatatgtctgttcatgtagagctcggtggattttgaggctgaaaatggaccttctagcctttgcagttcctatattggtatcttcgaccgttacaatgtgcttgctttaacttgggtgcttcacatattatcgcatcttcattttttcttttcatgtgcctttcagacctgatgcttggctctgtttacattagtggtcaacagtttttataaaaaaactttcaaatatagtgtaattatattataactattatgtaactactatctaattattatgtaacttgcacaaaagtgcaatggagcaactggttaatggaggttaactagcaaaaaccgttgacttagtctatagcattccttgtttttttttattttttggaactggtaaattcctgaaatttggatcgaacggtggtgagggcacgatgattgcgcagcgtacaagtcaaggccaagtcgtcgggaacgtggacattccgtaacggactttccaaacgccgtcgctgtcgtactactccctcccgcttctcacgccgtcagcgctcgtacaacccgaccagtagtactactcctagtacaacctcgcctacccgctgcaaccataccccacccgacatggacccacctgtctgccagagtagccgacgtggcacgagtaatcttaaccccgcgagccaacccgcagtacaaagtacataaacgaagaggccaactatcattttactatctaaaatcattttaaatgcagtcgtgtgtttctatatccaacgtttgactatcttaaaaaaaattataaaaaaaataaaaaatagtcacacataaagtaacatttatattttatcatataataacaataaaaatattaatcataaaagtttttcaaataagatggatgatcggatataaactgtctttctagaacggaggtagtaattatcagtgacagatgggcccccacgtcagtcttctcccgccttccgtataaaaacggcctcacccgaatcgcgtttccccaccatttggcgcacccgtcatcggtcgaacaccacacctgcgtccatggcgggaggcaggggagcccgcgccagcctccacctccacctcgcctggctctgcgccttcgcgaccaccgcgtgggcgcatggcggtggcggcggcgggggcgattctgacgccgacgccgacggcggcggcgaggggaagccggacctgcgggcgcgggggctggtggcggcgaagctgtggtgcttggcggtggtgttcgccgggacgctggccggcggcgtgtccccctacttcatgcggtggaacgatgcgttcctggcgctgggcacgcagttcgcggggggagtcttcctcggcaccgccatgatgcacttcctcgccgacgccaacgagactttcgccgacctcctccccggcaccgcctaccccttcgcgttcatgctcgcctgcgccggctacgtcctcaccatgctcgccgact

SEQ ID NO: 24280 - DNA, 29060 bp, Oryza sativa
cgccgccgccggtgcaggtgagcagcctactagggttttcacgtgcttgtccgactctgtttttttcacagtagagatatcgtgagctcgcggtggaaaggtggcggatggccgttggattagatgcgactttttcctttattgctgcgttagtacataataccacaccgattgattggttgctattattggttggactggtcagcgaaatgggccaaatttactcctcttgttttacagttttactactacctgatcaaaatcttgtgagtttgtgtgacctaccctaccctgatgctttcagcgagataggaactgatttgtttggttgttcatctttttgttggtgtggcttgtactctactccgtttgcaaatcagttagcagatcaattcaattgtggtgcttagttagttactttatattttttttgtgtctgtctgaatcgataggaacaccttggtgctactaccattttcctatgatcttatctgaatgaaagcatatatagtaggtggtggttattgcctgtactgcatagttcctcttaattactgtcctactcataagttattttgtttagcctgctgctcaaatggccaaaagagaagtatttttgctgctcgcattatctaattaagcattggattatctgcctgtcagggctggaggagggtaagctgagcagcacaaatggcaacgcctctgacccaccagcagctgtaagcacctttccttatgaactcgagtaatttatcctgcgcagcaacagcgcaggttgttgcgtttggtttccaaatggaagaaggctgtgaagtctcaacttgtgtttgtgcaggatgcggcggcgcaagaccactccgtggcgtcgatgctgcggaacgcgagcacgctcggcgacagcgtgctgctcatcgccgcgctctgcttccactccgtcttcgagggcatcgccatcggagtcgccggtaagattattattatttttttgacatagacacgcatggatatactccctccgttgattcttttaaacatatttgacgttcgtcttattaaaaactttttgtgaaatatgtaaaactatatgtatacataaaaatatatttaacaatgaatcaaatgatacgaaaagaattaaaaattacttaaattttctgaataagatgaacggtcaaacatgtttaaaaaagtcaacggcatgacggagagagtatatatatagagagacctcgtgaccttgtccgttagtctcttgtccggttgtccctgcctgctcgacttaattaacactcgctttcagcttggaatttaaatggcccgtacatatgtcttcatgtgactttttatatgaagaacgagttcatatggttaatagttaatggtagttcaggtgtctataggagtaggtgaatctgtccttttttttaaattataagtgaacagatgatcacgtataaacacgacatatggaagtattgacgggcagagcttttgcgcgttcgtgaaaaaaaaatgcttgaaagtatcatttaagcccggggtttcttcctagcttgtttcttgtgaaagtctgatagatcgatgccgctgctaactgattaggacaaattggaatcgtgcgttgttttctcggtcaaaattgcacaagtgcttcactattttctcatagcgaaagctccgtgcgcatgttgaagatagccagaataaatgaaaaaagtcctaggactcggcttatattcaaagccaaacataggcagaataatcaccccgaacccttcatttttattttatttttattttatcttgggttcacgtcttatcgccgtttatcgcaatcaatgtttctgttcactcattgtcacgcatacttttactcgttccagtctagtagaatagatgctctgacctgaatttccctttcatcaacatccatttcgacaacattttagtttgcatcgatctcagcaagctttaccaaaccattcaaatcatgaattcatggatcaccgtagtccatttaaagatggatgcagattgactgacagtggctgtttgagtttcgactgctggaaaatcagaatcagctactcacaacaactagcgtgcagagacgaaggctgacgcatggaaggcgctgtggacgatcagcctgcacaagatcttcgcggccatcgccatgggcatcgcgctgctccggatgctgccggaccggccgttcctctcctgcttcggctacgccttcgccttcgccgtctccagccccgtcggcgtcggcatcggcatcgtcatcgacgccaccacgcagggccgggtggccgactggatcttcgccgtctccatgggcctcgccaccggcatcttcatctacgtctccatcaaccacctcctctccaagggctacaccccgctgaggcccgtcgccgccgacacgccggcggggaggctgctcgccgtcgtcctcggcgtcgccgtcatcgccgtcgtcatgatctgggacacctgatgccgctcatgatttcggacgtttgttggttcttgcaggaatgtgtgtgtgtagtaagttcgtcgtgaaattagcatgtgtaaagtttgtgccactccaaccaaagtttcaggattatttatagctttgaatatatcatcaacgctggggcaccattgtttttgtttccatggattttgggggtaagaaattgaccaaaatttaagttcgaatgcagattgtcaaacacttgagagccacacatgagaagaaaatcgaatgcaaatatgtcaaactttcccctttgctgagctgatagtactgtgttaaaactacgaaatcgatctggccaagctaagaaacctgtttgctcgcctttggcggttggcccagtcagctcgggtcggcccaagaaccaggcaaggctcttttgctgcctaaaaagccgggaaaaaaaatcaaacaagcttgagaaaagttggaaaaatatatttttttttaaaagaaaaaacagcccgaagaagtgccaggcttgccaagcttgggcccgactttttggtcagtttaaggctcaggctttgcatatttctctttcgatcgatcgaccgagtttcgacaggcgtcgatgactactactccaaaagtataactttctccgttagcacgtttatgtacgttttgtgtaaaaattttctatatagaatttttttaaaaatcaaataaatttatttttataatttatgataattaatattcaattaatcaggcgctaatgagatgtcatgttttctgtgctgctgctaatatgctcctccaatgtggaatttcaaatgggttagaatagttttcatgcgtgtttggatgctaatgggatagctaggtgattgagatttgagatctttctcacaccgcatcccaaatactccattcatttcaaaataagttaacctagtatgaaatgtataccattccagaaaggcacacgtacatatgcagatcagtatatagtagatggctagatgcattgcatccatcttaaattactccccccgtcttaaaatataagaatctaggatgggatatgacacatcctaggcttatgaatgctacttatccatattcgtagttttaagatgtgtctcatttaatcatcagttcttatatttttaggacagagggagtagtagattagatggagttagacgtagcagcagtcacgatgccgccgctggcacaactcctcaacgacgtcatctagttcaacatcctctcgtgcctgccttctcggtgctcatgtgcctcgccatcttctgtaggtcctggcgcgacctcatcctccatgacccccgccttcaccatgcaacatgcgcaaatctcttcccggcgatctacgagttccacaacgtcttcttcgaccacactactagaaaaagggttttccttgacggtcatatgagaaatccacctgcggaattttaacaaggggtggagggttcaggaccactagcgaaaatccattttcgctgattttcgctactggttgcttaagaagcccgcttgcaaaaaataaccctatttttattgacgggccacttagctcaccgccagcacgcactaaagagcgacacccttgaaaaaattcacgcacagtagaaaaatcaccgcccattaaaaaaaacgccacccaccactcctcatccacccaccgctccaccacttaccctcctcctcctccatcagcaccctctcctcctccctcccaacaggcggcggctccggtggcggttctcaggtggcggcggtggctccggtagcgatgcacggcggcgacggcgacaggaggcgggctcttcttctccttctcctcctcctccccctctccctcccacggtctcgccgccaacacctcctcgccggtgactgtgattcccaaattcggtggctccactggcaaatccgacggtgacagctacggggtttggtgcgacgggaggagctcggcggcggcggggcttcccacatttgttggctcccccattggatccagctatggcaagaatcagctgctgctcggtcagcgacggcgacgacgacctccttcctttctcctgctgctgattctagcaattctcttcgtgggacgcctcctctcttcgcatgtctcgccacacactatgctcatgccataggacggcctcctcccaaggagaccgccgtatgcgagcaggcgtgtgtagtggtactggcttgtttcctcaaacataccatcgtttgtaagtttttttttctattaagtgatttatattagattgaaaattgtttttgggttaattttgatattttaaaagacattttcagatttgagtaaaactttttaatatgagttttcaactcaaagtttcaattcaaatttgaaaaaagcaataaactttccactgaaaacttgaattttgtgttgggtttagtcccacatcggtaattgatgatgggggaccacgacttaaaaggtggaggcggtcctcacccatcagactaatcttttgggttgtgtaggcccagaatctaaagttgtggcccacggttggtgggccgggctgcgcactctaacaagtgggtatcagagcccaaggtttggaacccggaacaatttccatgggtcacatggtagagaggccaggtaacaagtctccggggtcacataggttgatgtgacgacttaaaaggtggaacccgggtcacatggtggagagaccaggtaacaagtcttcggggtcacataggttgatgtaatggggagattgttgtgtttagtcccacatcggtaattgatgatggtggtaattgatgtaatggggagattgttgggtttagtcccacattggtaattgatgatgggggagcacgacttaaaaggtgggggcggtcctcactcatcagactagtcttttgggttgtgtaggcccagaacctaaagttgtggctccctgtggtggagcaggttcaatgtgacctgggtggcctacggttatcgggccggttatataacatgttgtaactcaaattttgaaacttttaactcaaaatttaaaactttcaaatagagaaagttggtaaagtcaatttgcaacttatatgtggtggagcaggttcaatgtgatctgggtggcctacggttatcgggccggttatataaaatgttgtaactcaaattttgaaacttttaactcaaaatttaaaactttcaaatagagaaagttggtaaagtcaatttgcaacttatattaagcgtacatgcgctcatcccttgcatgttatgtgaatgatcatagtataaattttctgacccttggatcaagatccgaccgtgcacaccatattcctcatccctcatcgaatatttagtcgatccaaacatcaggaccgccgggccgatatgatttagcgaaaccgtttccacttctacatgtccattgcgatccaaaacatacgcaagcgaatctcccgacccgaagagatgacaaagcatcgtttcgtactttcgtatcagtttcgatggagatttttttttccgcaactctccgacgaccttatcgagtgcaacatcctcccgcgcctgcccttccggctgctcctgcgtctaggggtgaaaacggattggataatatctgatccaatccgctccgaattcgtccgaaacgaggatatggtatgggattttagaaatccggcagatacggatacggatgcggatagtataaagcggatgcggatatggtatatctaaaatccggtagatgtggattatccgacattgttgtcaaattatccgataagccgtttgctggataatatgaaattatcaacatatataacactctatctattgcatataacataagttggtatatccaataccctaattcatcaattaacaaagattttttagtctaaggcttttatcgtctcatgtcacactcactagctatatttttttatattatggacatcatgtgttcatgttgtttagcacttaatcatataattattacgacgggtcatttattgattattatattattgttccttggattaataactcgatgttgcattgattgtatatacacgtaacatccgataaatttaatccgtttccgaaccgattccgcaccgaccccgcaccatttccgacatccaaaacaatccgctccgcatccgcattcgtacactatccgcacccgcttcgaatccgctcaaaaaatatggtttaggatatggtatggccactatccgtccgaatccgctctgttttcacccctacctgcgtctccatcggatatcgttcgaagaattgcagatttgagatttttgtaaaaacataaatagtattttgtaataaatatttagacccctaaatgatcacaaataataaaattgtcaataaacaaaactgtagatctcaccgagttttataattttgatatacagtttttcttcatctgagttcgtatgcaaaaattatgtatatatatatatatatatatatatgtgtgtattttccctaaaaattgatccctgtccgcgaatataaaaaaaaatcttggatagtttcttaatttattcatttttatttaaaaaaatctaaatttgtttccgaatccgaaaatatttagaactatccaaccgaacctatccgactccgaaaaaatagtccgaatggacggaaagtatttataccagtttcatccctatgaatacccaacctccaccggatgaggcttgtgactctttgcagtttgcagttgtgccactaacatgtagatgaaagtaaagtggagcccacatataagtagcacagctccataaagttagatgacctgtttctctctccacctttaaccttgtgtttttagggattactccctccctcattataaaaatttgagacttagaatatcattttattaaacttttaagactaagtaaaattctctctctattttttttactcgatgagaccgtattctgttttaggctgagttcttatctccactttcccaactcatatctctatttttccacgcgcacgcttttaaaattgctaaaaacggtgccttttttaaaaaaaatttctaaatgaaagttacttaaaaaaatcatattaatctattttttaaatttattttagttaatacttaattaatcatgcactagcgctgctttgttttgcgtgctagggagtgaggggctttgccacccttgaaactttgcgctcctctattttatcactatttcgttatcattcattccacttttggtagtcaacgtcatttgaacatacgatttagccctcagtctgaaacaagttattagaaattccaaaaaaatacgaaatttagttttcagtactttaagttttgaaaggttgtataaaaattgatggtagaaaaaaattgggttagttagaacggttttagtgcaactttaaacaaaattttcaaaggaaaaatatttctgtgtatacacatataaaatgttttacgtgtaacttggaccttcaactttatattacgtagtagaataaatttatgaaatctagtgagtcaatgatattatgatactattttcctgtttttaaactaagcattttttaaaaaattgatgatcaaagttggtttgagaaacgtcaaaagtttctctctgtgtctctcgctcttactttctactccccccgtccctaaatatttgacaccgttgacttttttttaaacatatttgatcgttcgtcttattaaaaaaataaaaaaattcaagtaattattaattttttcctatcatttgattcattgttaaatatactattactactcaagtttttgaataatattcacaaaagtttttgaataagatgaacggtcaaacatgtttaaataagccaacggcgtcaaatatttatttagggcagagggagtatattacagtttgtttctaggtagactactggaacaaacatacaggtcggttttttcctgttcttgggacctttagaataaaaggatgttctgaaccctttacaatccatacacgtttacacatattaacagctaaagttttctaaggttgacaacaggaactcaaacagccaaacccaacttcctgtatagagcaagtagctgtagttttatatttagatcgaaacccgctaaagcgcagcatgataataaaataattcgctgtattttatcacggcaagcttttgcttacccacgtaccaagataaaatagcgttacagagggcaagagacgcaatttttgcactagatggcacaaatagattgaatgcctgtaatactactacaagggagctcccaattctgcactagctgacgggagtgacggcgcaagatgtctgcaatggatcgtcaggtttaactataaaacattacttcttcaactttggactaccatgttcattacttctagtcttttcttcctgcaaaatgttaattgggaataaggaaatcaaacctaaacatcaaatagatcaagtggctaaattcatattagcaacaatataagattcactgaaatttggcagcaaaatggatcgttctctagaaactaaatcattatgccattgtttctggaagcttgtttcagttgtttgtatcttgctacataatttgttcagctccaaggataattcaagtctgccgacagattcattctattaaatttgcttactgttcttctattgaactaattatatgtttgttgtgtaaagcacagtgtatacaatttacactgcaagacgtgaattagaccaaaagctatgagggattattgatgaaatttaatacaaaatttttaaatatgcttagggaatattcatcaccttaaatcctaaaaaattgtagttttgcagcatgatttttggaaggcgttgttcagaacagttatagatttaaaagttcaaagccatcagatttattaaatgcaaatgtaaacagtttgatacttgcccagatcatttaagccagaatctctcatgaatgagaacaccttgtgttcaaattatcattatctgtttacgttggataaatttatgaatcaactaggtgtgtctcgagtgcaaataaaagtatacatcgtgtttaagtacataagaagagggattggccagcaatgaattctggcatcatcatacctcattcactggctgctccagttcaagcctgtgggctgacattcgagctatctcagagatggctgcatcacggacctgcatatcatcaccagcaagctcttcgtaggcagcctcaaaggcttcctgccagaatcgtggaagtcggacctcatcaccggtgcgtgtgtacatgtcccacattcgacccactaatttttccctctcctccatttcctgcgcacaataacctaccaactcagctgcttatattacacaaagaatttgagaatagatttctgctgcaaatattaatacaaggagtagcacgatagttcttcaataactaggaaatcatagtgcaggaagttttatcggacctccagaaaaagaaatggatttcaatccaagctatatacagataaaaaataataataatcacgctttatacacataaaaacgtcatgctctagggtccacacatactaaagttaaacaatgctgtttaaggtatgtttgcatcttaggctagaggattccaagccttgcctacagcaggagaaaaactagctttgacaagtgagacaacaaacatttacaaacaaataaaaaggcaaatagtcagctggggcaagaaaaccttcacaccaaggcacaacatcatcttctcccatggtgtgtgatcattatcgaccgcattcctagcagcctatggcttatgttccatctcatccatgggccatggcctgagaaaagcccaagctgtcatctgtgcccctagctaatggcagagccctcaaacctcgatgcagacttcggttttgttaccaatcaaccttagtacttgactatgtcgctctgcatgccatatctctgacacgaatcaccaaaagttggctgcagtcataaaactgctgacttctatattgcagatcatgcaagcccgactacatattcaggtttaatctctataatatgttatgtaagagtacgatctcctgattttattctaaatcacatctagggccataggaactacatatgcttgtatcacatatcatacctaatatcagaatataaattactgttcacacatcttgattcttgaatcactatttgttatgtaaatgttatgacagttgaccaaacaaactagctttactcccacgccacagtccaaataagctttttttttttagcctaagctaagcaagttagacaaaagaaccaaatgtacccgtagcatcgatacgcagttccctgtcgtaaacagccccagattagctagtacaaaaatgttgtgaggtcttgaacacgaaaacagtagcatttgcattcagatacaacctttctcacttaattacgacgacagttgtgcaaatattttttcctgcattttcccacacaacagtcaaacagccaaaacaagaacacacttattcagagacctccaagcaataccgatagcaattcacaactgtttcaaattcaattcctactcaaacaaggcattgcgcatatagacgagaccacgcagcaagcagttggcaataagcaaaaggggaagaagaggggagtggagtgggaggtaacgagcgtacgagcgagtcgaggtcgtcgaggaggggcgcgtcgaggtcctcggaggcggtggcggcgaggaggaagcggccggaggaccagcggagggaggcggaggcggcggacatggaccagagcgcgaggagcgcgatggccgccaaggcccacaccttgtaccgccccttcccgaacggcggccccgcctcgccggcccccgccgccgcggagtagtacgggatggtgatctttgtcgccggggatgccgcgctgtcggcggcggagagggccttcattccggcggcggccgcggcgtcggtggcggtggcggcggcgtcgcggcgatgatgagctggtttttttttttccgttccgtttggtttcctccggtttttgtagcgtagtgaggttggccgtgtgggccccgcttccgatacaacgccactagtgatacaagtggtagagagccagagagtgatagtgggaggatactgaactttttttttttcttttggggagaattggaggatactgaactgaaccactaatcggtgtgacaaagatcatcatgcaattgcaacagcatttgaattttttgaatttttagttttgatctcaccaaaaactcaaaggaagatttttttttttattctccctctgtcccaaaaatataagagattttggagggatgtatcacgtcttagtgctactatgaatctggaaagagtaataggatgtgtcacatatgtcggtgatatgggtccgggggtatgcgaagtgagggggagttacctcccgatctagccacgtggccctacagcctggccctccccccgcgcctcggaagacgcaaaggcagccagggggcctcggggtgccacatcacacccctcggaccctcgcgctgcctcgccccgaggccctcaggcagctgccatgtggcgaggggagcgagcaaggaggagacccaggctgggcagccatcattgcgcggcaccccaaccgtccctcaccgcatttaatgcggtaagggcgaacatgcggcgcggcccgtttgactcacgtcaatcaggcgtgaccagactgtgactggcctgtcgccggtcacgtccgatcggacgggcagccgtgcccccacgtttgcccctgtacccagcggggtggaggcaggtatgtcccgtcccatcgaagcatcatccggagctccctccacgtgagaaggaccgccacaagtcttcattcatttaagagggaatgacagggctgtcacccgtgtcaggtggggggcggcgctgggtcccgctcaaggacggattgctgcttagcttccgggcgaaggcacggatcgtggtccggtcaaggtaaagtgggtccccctcacgtgaaaaagtaggtagaagcgatgcatgtagtatccccttagactataaaaggaggaccttgcccaccgagaaaagggacgacgctcagtagacctgaactctaggagggaaagagcgagagtgctctccagagtttaggaatctttgtaacactcgaccataaatcccacacacaggagtagggtattacgctccatagcggcccgaacctgtataatcttggcggccgtacgcgatccagaagcactcagggcgaatacgcgatctcgacaagcgagtttttttcccccggccgaactcacaaaaggggatctcacgatctcccgctagagaggatcacccctcgacaacatctatccaaaatctcttatatttaggaacgggggagtatttatttagtttgacatatgtgaagtgtaaaatctctcctttgtcaacagcccatcagcccatgtgttgggttgggttgggttgcaaactttgcaattggaacacaaaagttgcacacagtctggaatcagctcatgggaaaatctacggagtaataactgatgttttgctgtctaaaggatcatctggtctacactaaacattagcaggaccaatgcattgagaccataggctggcggcatgtaaaaccagatccaaaaaagaagagcaaaaaatcacactcaacgcagagatgttttgctcataggagcgatggcgatgcattcaagtctcgcagatccagcctcctgtcattggagtccttgaactagaaggacggcgaaaatctcaacttcagctccagtttcacaatccttgtaccagcctctgctaatcaaactgtgcctaagtgtttgtttgttagtatcttgtttccagcagggcatcaactagtccaaagtccatggcctagggtaaaaccaaaaaaagaagggggaaataagttataattcacatggcaaatgatgatttactttcttctgatacatttaagagatgaaagttacttcagatgaagacatgaaacgatccctctctgtccactgttgtaccatatccaaggtttgcccagtaaaagcagcaaacatcttatcaactttctgcatccagatttttcagaagctttaatcgcttagagagcagaatcaagagaaattccttaccctcatcaaacatctaattcaaatgtacactgaagaaaatatagaacttgttatctatcacaaaacacttacatcacgagcataaatggtttccccaacctgtcgcctcacctcctccacattaccctgcaaatcatccaatttttagaataaaaaacaaacttcaagtacaacaaacacaaaggcaagcaagtatgtcctagcaagactgtatattgtaagtttcatgtggccagctaaaatgatgatgattattatttactgtagtcacaatgttagaaaatcataatgcacccgctgcagtaactcagaaaggcagaaagccccagaatcatacctctgatacaccttgaggttgatgaatcattactctagcatttggcatggcataacgcattcccttctcaccgccagcaagtataattgctgcctggctagcaacaacaccaaagcacactgttccaactttgggcttgatctgcaataaatggttcatgtgttagtgcagaacaacaaaaaaagattaatattctgggatttatttatcagtaggcgaaattgtagataaagtatttggttatggaaaactggcataacaagtaaaaacacagccaaatctaacaactaacaaggctggtccagctcaaagccagttttagagacaggcatgatttcaggaaatgagatctgttgtctgcagtaccagaccaaacccaattagcacagtctcagcatggcaaatgctcatgtctagtatgtactacaataaaaatataagaatacaaatgttgcaagcactaccattgatatgagatataatttttgcctaaattacattaggctttcctgtaaatgctatatctgtgctatattataaatataaattcactagctaggggcatgcataatgtggaagatacaaaatgttgagatgcatctataatgtgttctcatccaacaatgtaaatattaaattagatgagaataactcagaaagcatccacaagaataaatataggtgaatacaatctctgaaatttgaatgcatgaaggacatggaaaaagtagctcaacatagatggcatacccaggacatgcaatcataaattgctaagatggagtagagacttccgccggggcagttcaggtagatctggcaaaacagaattatacaaaaggagttataagatatagagcaacacacctgtgagctaaaggagcaagccaagggagtgaagttgagcaatcaagagctgctgcagtgaacaatagggtaactgttatgatctgaaaaacacaaaaataaacactaaccagaatatcagcctcttcatcaacagcagcaagtgtgacaagctgtgatattacacgctgtgctacttgcgagttaatatattgaccaatgaagataatgcggttccccaacaatacagttgccagatcaagagcaccagcaggagtcattatggcaggcattaaaggtggattttcattctctgatgctacaattgtatttttcctgtgaaaaaatatttacaatattacgaatgaataaaacaggattctgatacacagcacaaataaaacctagatgagcagtttcaaatcaggcaatgtatcctcattgtatatcaggcatgacagtttcaaatatatcacctcagagaagaatgacaatgtatcctctcgtccaactttgaagaaataccaggtggtacaaattgtggacctaggtgtggaaatttgagtgagaatgcaactcagcacatttgcagcaatatatcatgtgaaagacagatggactaaacagtaaaggaatccaaaaaacatgtccaaagaaaagtttgtgctccgcatatcctgtcattatggcatgttgagttgtgctaatacaccatactgagttactgacaaacacaataacacatatacagtctggaaatctcattcagcagtttgctaaaaggccctaaactaatttcagaatcagaccaaactgaggtgatatgttatatgcaggttatcgtttttatacatatccgttcaaccaagcacatccatttttcgtgtacttagtgagctaatgctgatgcataccagacattggcccaggaaggagttgacactggttcagataaccccaggtcggcatactcttggataatgccgacattcagaggttctatatgctttgcaaaacctaccaatgacgactccataaaaaattggcacagagaaagacaactaggagctgatgggacggctgcccaaatggtcatgttctaatatgtgcaccaccatggacaacatctcagtaaagcttatcaaatcaacgatcaaattccaccaaacagtcctggcctaacgagctgaccaagggaaatggtttgctaaaccaagggttaggaaatctcacctgggagagccacgcctgatttggctccgctccgcctgaagaaagaaggaccagacagagggtgaggggacaagaacgggggaatccatgaagagagaagcgcggggcgagcgagcgagcgaaggaggtggaagttgtagttccgtggagctcacctgcgggagaggaggcgggtcggggaggcgcggagggcgagcggggtggagatggccataggcgccattggaggcggagctggagcgtgggagggagccgagccgaggcgaggactgaggagtgaggaggggagcgaactggggatgaggttggactagtatgggcttgggttgggctgggctgggttagggttttctcatgggcctaagttctagcccatctatgtgtatgggttggaattattattatatttttaggaataagttcaccagaggtcgctcaacttaatagcgagatttttttaagaccccttaaccacaaaaccagaaatgtataccctaaactcatctaaaccgtgcacacaaggtcctacggcagtatatatgggtggtttctttgacgtggcatcatagtcagcaaaaaaaattaaaaaaagtaggagaccacttctcttctctcttatctcttttgtttttcttctcttcagctcttctctcctaggaggccgtcggtcggcggcagataggggcgaggcgatccggcgagagggaggcgaccagccacgtcggcgtgagatgggggagaggagagctgctgcgctcgcccgccgcttgccgcgggatttgaggcttcctctgccgccaccaacaccaagcccatcttcaccggcgtcctcctcccatttttggccccgcccctctgcagggaccccactaacaggggagacggcgcgcccgcgatggccccgctgaggctgccgaggaggctgtatgtatggcctggcatcgagggcttcgcgcgacaaaccggctgacaggatttgaggtcccctccaccgccaacgacgtcgagtccccttcgccggcgtccttctttcacttccgcccccgccccttttgcaggaccccgaccgccacaatcaccctccacgtgcctatactcgactcctgcgaagcagtgacaacagcgatggtgcgaggtgcgaagcatttcttaaatggaccttttcgcaaatttttgctttgtactttcatctaaatttttttattttatttggtcttgtgaatgtgtgttcttgttttggtcttctgattccatgcaaatctttttgtgattaatgccaaaagggggagaatatttgaggatcccacatttgatatgatcgttgatataaagggggaaaatattctaggatcccacattcatttggtgcatgtcttgaaaagaagcataccatcatctaccatagcatccaacatgcaccatatgcacaagcatcacatgcatggatataaatcaattgtcaatttctcatatcatgttgatttatatcattaatttcacctttcatatccaaatgtgattattactaatggatttgtcatcaatcaccaaaaagggaaagattgaaagttcaagtgccattgatttggttttgatgattaatgacaaatccaattatgtgagactaatgtttttataagcatttctttgcctagtctcatgtggatatgaaagtggagtgttggtcacaaggatgaaatgcatggagatcaagctatatgtatcactctttctcttcatgtacatattgatatgtttgtatataatatttcaacgtgattggcatatgcatttgagactaatgttttgtttgagtattatctcttatttagtctatttacattgagaacgtggagatgatgaaggtatgtttttattttaatatctatatttgagaaatgccttctattcttgtataggataagctcttaatgtttaatatcttattatgcatactcttgcctcacataaatattttgtatgcatacatttagggggagcaaatcctatgctttagttatgcatgtaatcgatccaagttattcaccttcatttaattgggatctttacatttgaacatatatttgagtatatgacacttatggtgttgattaatactcatcatttattcatatccttttatacatgcgatcggttggtcaacatgtggaggttgacaacatgatcattgggactaataattttattgagttgaatgaaagaaataggtcccaaggattacaaaggtgttgatgctcaagtgatacaattacacctaataataccaagaatgacaaagtgaagatattgaagatgtgtgatatgaagtggctattatggcaagacggtgaagggcaagcgatactcggtcgcgatggaccatgcggcggtgaagggcaagcaaggggcttggcaccgaagaaccaaatccggtggtgaagggcgagtgacgactttgtcatgatggaccgtgcgagaccatttgaagctacaagtaaccgcatcaatcatttgaagaatatatggtgaaacggtatcggcattggcgtccctcaagacaatgaaagaaagatgaaaaaaaggcattcctaatggtataattatcttcttatttacatttgagtttaggaatgccgtactattaagagggatgtaacgtcgaggtgtttgtgtatgcctcgatgctcaaagtgagctatcatagtactacctcgagagaaacccaagcattaacctatcatttgagtggttttagaccttctttttggttgagttgggtaatcctctgagtgagcttttcatagagtccaagttcatcaaaaagggactcccgggtgaaaagttatagtcgttttactctgtgcttttcgggaagtccgaaaaattaccgtaaactccgaaaatttttcggataactccaaaaattttcggacattccaaaaatggctgcgaatctgagatttgcttctgtaagatttcggacttgttcgaaaagcattttcggaaactccgaaaattacagtcttggcctccaacggctagtttttgagaggctcgggtatataaactcctccaccccacctttgagtggctgctgctcttggggagtattagacacatccaaagccaaatagccatccccatttccctacctttgtggtgcctctttgtgagtgggatttgagaagggaaaagagttgggttgagagagtgaggagttgagagctagtgagcttcactccatcctttgtggtgcctctttgtgagagggatttgagaaggggaaagagttggattgagtgattgagaagttgagagctagtgagcttcactccacactttgagcactcgagttcatagcaagtaaatcttcgattgtgtttgttactcttagggactaaggtctcctagacggctaggcgtcgctggtgagcacccaaggttgtggtgtgccacggaaagtttgtgaaggcttcgatttcacctccgcaagggaagaaatcaagagtgaaaccgaggagtgcatttgtgcaacctcgtgaggaaagggttaaaataggcccggcccttgtggctcctcaatggagacgtaggatccgtggatccgaacttcggaaaacaaatcacgcgtctcctctcttagtttgcccatttgtgcattctctcatattgtgcttgagcttgtttttacccgatctacttgcatgcttaattgatttagttggtgaccttatatcttgtttagataccttatttgtcaccttttgattcatatacattttgtttatttgagctacaagttcatagctagtgttttatttcattatccgctgaacttttcggttgagaccggaacttccaatctcatatcgaaagttcctatttgaactgaaagttctctgaagttgtgatattttttaggaacgcctattcaacccccctaggcaacattaaggtcctttcaattggtatcagagcaaggcaaggtctctcattccgggcttcaccgctgtcacgccctgaagtttccccccttttgcttgctttaaaaattggctaaataaatcgtccgaagaaattatcttaattaacctagagctaattccctaattaataaatgcaaataataatcagaatcggcatgtggaatttttcttggattctacatgtcacaatatattaacaggatttttagtggaattttcagagccttggaaataattttaaccaattaaaaatcaccaaagtgcaatttttaaatcccaggaaaatcctttcttttctttttctttttcctgtttcctcctttttcctcttcttgggccgtcggcccagtccacccgtcgcccgcgctcggcctccccttgtgggccggcccgttcccctttcccctccccgaagtcctccctccctccctctctccttcgggcgccgacaggtggggcccacctgtcggtcgtcttcctcctctagccggttggagccgagccccaaccgccggcgccccacctccccacgccgcccgccttctccgtccctctccgcgcccgcacctcgcgcccacgtcgccgcctcttcccccgcatctcccggcccgcgcgcgcgctaaagagggcgggattcgatttcgaatccacctctctcactctccctccactccccacgtcgccggccaaatcggccacctccccggccacgtccgccccctcccgcacctataaatcgctccccgcgtcttcctctctcgtttttcgcactcgccgcgctctcccgtgcctcctatcgcgctcgcgccgcttgttgctagtgccgccgcttgccgccgccttcggccgcgagccgccgccgctagagtcgccgccgcgccaaaccgccgccgccgttagcttcgccgccgcaagagctttcccggccgccgcctcgcgtcgccggaatcccaccggagcacctctcccctcgcgagccggtgagtttttccctcccctccatctccggccggcaattcaagccgccgtggtcgtcgtctcctctcctaacgcctctccatcttctcctagggtgtcgccgccgcccgtccgtgcctccgcgtcgccggtcatcgccgctcgtctcttcccacgccggtcgccgccatcgcctcggtgaggaatcccctttcctccttcctttcctctccccccgtgagcgccgccgccctccgcgcgtgcgccgtcgtcttcggctgccgccgccgccttcgcgccggccgccgccgtctccccgcgccgccggtcaccgccggcggtcgtgcgccgtcgtcgcctcgccatggccggccggcttgagccgtgccgagcatgtcgccgcccactccctcccccttgagccactgcccgtggggcccgcttgccagccgccccctctcccccccttagtgccgctgatcagtggggcccgcctgtcggcgccaccccctcccctcgctgacgtcagccctgggctttattgcgcaataaattgattaaggacttttctttattagtaaaaacacagtttatcttctaaaattcataagtaattcatccgagctccgtttaagtccattcaagtctcagtaaatcaagaaaaatgcaaagaatccattaaaaatggttttgttccctgtttcagttgtcttatagcctgttttgcttgtgtgctttgtttgtcgcgtaggtttcggccgttttgtcgatccacggtttctcgaagacgttgctgaggtctcgtcagtgcgagagcaaggcaagtcatgcaatacgtttgatcatattgtacccaatttacaaatatcccgcatttctattaaatgttgcattcttttacaatgtaatgtgggatgggtcctattcctcagccacatattgtttaccatatgccgttgataacttgggtatcaaaatgactagatgttggtttaggaaatgcttagccatgcttagttcaactagcacacaaatggggatcaccttattacatagactttgtctattggcatagctttagattggtgccaccgcaatggtgttagttaattaaaatacactgaatggtgggctgtgggtgcatggttttgctggtcgcacccatggcagttaaggaccggttcacgggaaaccctgggagacttaccgtgctttccacaagcgggagtgggtaactgcttgatctgaagtatagctcgaccctttcctaggcaccggtggcgagggtgggcgtgatggagttgggtcggccggggtgtccggttgtccagctgccggattcaccgcggcgcaagaggggaccgcccactgccttttgaggggtgggggtgaaaccttagcgtggtgtggatggttaagggagggttatgtggagggtcttgtcacgatttccccctttgcagtatcatggtgatacttcggggcatggcgacatgtgtggaatcgtgtcttgtgggtacagttgtacacctctggccagagtaaaactattcgaatagccgtgcccgcggttatgggcgatcaaccagattcaccgtgattagtctcattcctagtttagcttaatgaactggtgtagttcaggtggttggttgggcctgttgcaacgtggggtagcgttggacagtgtttggttaatattgattaattactacaactattttactgccttcaactactgtttttaaatgctagctttatgcaaaagaacctctagcctcctttggttatatcctgcatcatacctcctcttccggtatgacttgctgagtacagtgggtagtactcagtcttgctctcttttcccccacaccagagctgaagatcttcctagttggagctgttttgtcaaagttggtttcatcgctgccgtcaaggattgcctgtggagtggagtcgcccgctgctgaagtcaagcttcccggtttagctcgcttttatcttttccgctgcatttgtaatcttttctatttttgtaagacgtggatctgtatgtcaacaattgtcgtttgtgtaccctggctggtcctggacagggatttaatgcacattcagcttagaaattctggttcgagaatttctgggcgtgacaagttggtatcagagccgaccttgaccgtaggacaagccaactggaaaccctaagagccctctgaacccctttttcatctgcatatgcctttttgcacctggaattgttttgggaaaatttggagttttgcctctttggtttgcgggaaaaatcttggtcgttcattcggatcggatttttttttttaaaaaaaaatgagctcagcctagggctttagaaaaattttagttggagtttattcgatagtcagtcgggaatttattgggggttatgcattaggtcgtgtctatattcgatgggggcaatgttatgcgcatcattttccatgcaactagtctatgcattaatttattgtttagttgcattagtgtctttatttgagttcatgaaaaatgttctatgcataaaaatcatcctgctcggttattgatttgagtcttcttttgctttgtttaatttggatttgagcatgaattggttcctatcccttgtctactttagatgtcagtcctatccctcgtttgcaagcgccgcctcgagcttcagagtcgccgcccttagctttatcgccttcttagtctgtttgcttgctagttttcgtgtttaggtttgatgcttgtgggctagtcggcggtcgatatcatgtgtcagtggtatgactgcctcaattaggagttgcgtgcctctttttcagtgttttaatcaagattaagataattgcacttaaattcataagaaagattagtttctgagccccctgtttttcttccttttctcatatttctacctatccccttcagatggagacaaggaatggttcacgcgactcgaacaacgccagtggcagcgaaaagccgatcaatggagcacgtgccaacagtgcatctgacaacagtccgtccccaccgcccgagaacccaacaattgctcaggtgttggacaatcagactcagatgatgacaatgatgatgcaacagatgcagcaacagtaccatcaggtgttgcaacaggtgcagcagcaagcacagctgcagcagcagaacctgcagtttggttctccacctcctcagtccaaactgctagaatttcttcgtgtcaagccgcccaccttctcaagcaccaccaacccaatcgaggcccacgactggcttcatgccattgagaagaagctgaatcttttgcaatgcaacgagcaagagaaggttgcttttgctacacaccagctgcaaggtcccgcttctatttggtgggacaactacatggtgacccgtccagctggggcagaggttacttggacagagtttcgtcatagtttcaataaagcacaggttcccgagggaattgtggcacaaaagaagagagagttccgttccctgcaacaaggaaccagaacagttatagagtatttgcatgagttcaacctcctcgcgcgctacgcccctgaggacgtgcgtaccgatgccgagaggcaggagaagtttttgtctggtcttgatgatgaattgactaaccagttgatctctagagattatgaggactttgagaagctggtggataaggctatccgtcaggaggagcactgtaacaaaataaaccgtaagaggaaggcagctcagttcaggactccccaggggaagagtcagaagcctcgtttcacaatgggacatcacggtggaccttccaccatgattatccggcagtaccgtccctaccacccgggtagcttcaacaagaaccaccatagtgatagtcacaacaacagtgagcagcacagcctcaaccctactctgagttcactaaagattccagctcaatcagttcagccagctctgccagaacagcccaagaggttgggagaaaagcccgaactctgcttcaattgtaacaaacccggacacacggttggaaagtgctcgaagccaagacgtgctggacccaagttcgttcaggcccgggtcaatcatgcatctgcagaggaggcgcagtcagcaccagaggttatattgggcacattccccgtcaactcgacaccagcagtaatattgtttgattctggtgcaacccattccttcatttccaagctttttgctggtgcacatgggttatctttagtgaagcttaagataccaatgcgagttcatactcctggaggtggcatgaccacaactcactactgcccagccgtgacagttgaaattcaagggttgatttttccagccaacctcattcttctcgaatccaaggacctagatgtcatacttggaatggattggttgacaaggcacagaggagtgattgattgcgccagccgcaccatcaagttgaccaatgcaaaaggagaggtggtaatcttccagtctccagtgccgcagaagccagggattagtttaaaccaggctgctggtgaagaacaagaggtagcagtggagaaaaccactaagaagctggaggatattcccatagtcagagagtatccagaggtttttccggacgatctgacaacaatgccaccaaagagggatatcgagttccggattgacttggtacctagaactgcaccgatccacaagaggccttacagaatgggagccaacgagttggcggaagtcaagaagtaagtcgatgaacagttacagaagggatacatccgccccagcacgtcgccttggggtgctccggttatcttcgtggaaaagaaagacaaaaccaagaggatgtgcgttgactaccgcgcactcaatgaggtcaccatcaagaacaagtatcctttgccaaggattgatgatctgtttgatcagttgaaaggagctattgtgttctctaagatagacctgcgatcaggctatcaccagttgaggatccgcgaagaggatattccaaagacagcattcatcactcggtacgggttgttcgaattcacagttatgtctttcggactcaccaatgcacctgccttcttcatgaatttgatgaataaggtgtttatggaatttctagacaagtttgtcgtggttttcatcgatgacatacttatctattccaagtccgaggaagaacatgagcagcatcttcagctggtacttgaaaagttaaaagagcaccaactatatgccaagttcagcaagtgcgacttctggcttaaggaagttcagtttcttggtcacatcgtgaatgctcaaggagtagctgtggatccagcaaatgtggagtcagttaccaaatggaccccaccaaggacagtcactcaggttcggagtttcttaggacttgcgggttattaccgccggttcattgagaacttctctaaaattgctaagccaatgacacagctattgaagaaggaagaaaagtttatctggtctgttgaatgcaataggagttttgaagaactcaaacgacggttggtgtctgcaccagtcttaatcctgcctgatcagacgaaagatttccaggtctattgtgatgcatctcgccaggggctaggatgtgtgttgatgcaggatggcaaagtggtttcttatgcttcacggcagttgcgtcctcatgaaggcaactacccgacgcacgatctggaattggccgcagtcgttcatgctttaaagatttggcggcactatctcatcagtaaccgttgtgaggtatatacagatcacaaaagtctaaagtacatcttcactcaagctgatttgaatctcagacagcgaagatggttggagctgatcaaggattatgatatgggaatacattatcatcccggcaaggctaatgtggttgcagatgccttgagcaggaagagctactgcaatgttgcatgggtagagcaactatgttgtgaggttcaacgcgatttggaacatctgaaccttggtatagttgagcacggattcgtggctgccctagaggcacagcccacactggtggagcaggttcgcatagctcaagcaagtgatcctgaaatagcagagctcaaaaagaacatgagagttggagaagcccgaggttttgttgaggatgaacaaggaacaatctggatgggagaaagattgtgtgtacccgaaaacaaggaattaaaagacctgatactaaccgaggctcatcaaactcagtattccattcatcccggtagtactaagatgtaccaagacctcaaagagaagttttggtgggtcagcatgagaagggaaatagctgaattcgtagcactctgtgacgtctgtcaacgagtaaaggcagaacaccaaaggccagcaggtttgctacagccacttcagattccagaatggaagtgggaagaaatcggaatggatttcatcaccggtttgcccaggacgtcatcggggcatgattctatttgggtagtcgttgaccgactcaccaaagtggctcacttcattccagtgcacactacctactcagggaagaaattagcagaactctatctatcaagaatcatgtgtttacatggtgtacctaagaagatcgtgtctgatcgaggaagccaattcacttcaaagttctggcagaaattacaagaagaattgggaacccggttgaatttcagcaccgcttaccatccacaaacagatggccagaccgagcgagtcaatcaaatactagaggatatgttgagagcctgtgcgcttgactttggtggggcatgggacaaaagcttgccgtatgctgagttctcgtacaacaacagttaccaagctagtctgcagatggcaccatttgaagcactgtatggacggaggtgtcgtactccgctcttctgggatcagacaggggaacgccagttgtttggtacagaagttttaaatgaggcagaagagaaagtcagagctgttagggaaagattgagaatcgcgcaatctcggcagaaaagctatgcagacaaccgccgaagggagctcgttttccaagtaggggattatgtgtatctccgtgtcactccgctcaggggagtacaccgcttccaaaccaaaggaaagttggcaccacgctttgtgggaccatatcggattttggaacgcaggggtgaagttgcttaccagcttgagcttccctccaacatgcttggcatccataatgtgttccacgtctctcagttgaagaaatgtttgagagttcctgaggaacaggcaagtccggatcaaatcgaaatccaggaagacttgacgtatgtggagaagccaactcgtatcctcgaaaccagcgagagaaagaccagaaacaaagtaataagattctgcaaggttcagtggagccaccactcagaggaagaggccacttgggaaagagaagatgagttgaaggccacccacccgcacctcttcgccagctcttccgaatctcggggtcgagattccgtttaaggggggtaggtttgtcacgccctgaagtttccccccttttgcttgctttaaaaattggctaaataaatcgtccgaagaaattatcttaattaacctagagctaattccctaattaataaatgcaaataataatcagaatcggcatgtggaatttttcttggattctacatgtcacaatatattaacaggatttttagtggaattttcagagccttggaaataattttaaccaattaaaaatcaccaaagtgcaatttttaaatcccaggaaaatcctttcttttctttttctttttcctgtttcctcctttttcctcttcttgggccgtcggcccagtccacccttcgcccgcgctcggcctccccttgtgggccggcccgttcccctttcccctccc

SEQ ID NO: 24281 - DNA, 10059 bp, Oryza sativa
gtggatctgtatgtcaacaattgtcgtttgtgtaccctggctggtcctggacagggatttaatgcacattcagcttagaaattctggttcgagaatttctgggcgtgacaaccgccttgagagaagatgtcgacaagaggtgaaatgttcctagaacttcttttgctagatggttcaaattacatatctttgagtactcgtgtgcttaatgtgtttagggccatgggtcctcatatagagcgagttgtagatgtgagtatttctcctcctaatgataaagagctatcatttgatgaggaagagaaatgcacatatctcaatgctcaagctactaatgttttgtttagtgctttgagtgaagatgtgttcaaaaccattattcttagcacattagtttttgttggaaacatagtaaaaatacaggcacccaaaacctacccctatgagcatgttcgaaaaactaggccggtatattttaagagtgacgaagtcatcacgggcttctcgttatcgatgggtatgtcgcctaacactgagcaccagtgtcaaatctaggatttgagttgaatgggctgattacaccacaagaaacctaatcagttgagttacgctaacctcgctcagcacattaatttcattgtacaagaatccaagcatttttagcaagaacgggtataatagcagacaataagccatctataaaaacatatcgaggagataaaagaggagagagaagagcagcgggctacagatttgtaaccagctgtagtacggacttgcaagacgcaatgtgtgtatggtaggtggtgggaccaggtatcaattgtgtagtatatgtttataagtaactattgtatgtattaactattaaattgactatagataatttagagctaatagatggctatactattaaacttgctctaagtcagatgcataggagagaaatataaacaatttaatatttacagtagtgctaatccgcgcgttgcgcgtggaatattagttcgagcaccgcacaacgctccctccttccggttttcccttttttaccaccccacctttcctcagttcgttttttaccaacccacctcccgtgtttcttttttctcttttccattttgtcgtgcttcatcaaagggcctggtaaaatattaaccatccagacttttttgtttttgttcattctatccagtttttctgttttcgcatttttagtaaaatatttaccatctagtttttcttttcgagttttctgtttttctagtgtctccccacgttttaaaagtaatgaatttactctgtggagtttttccatttactctcagcctcacacatctgttcattaaaagtaacatttttactcgtatgaatgccccagttaaaagtaacaaatttacttgcatgaatacccccacatcgtacggcaccattcttagatggtcataaaagaattactaccaccttataacgctagtaattcttttactagtgttataaatattgtttagatttcatgatctgcgagtaaaacaattaccaccctcctctcaatatagcacatgatctcgtagtcaccgtgtagtaatatatttactgatgtattcaatacacagtataagagtaaaatttgagaccaagagtattgttaatatgtatcacaaaatgatcgtgcgaatgaaaaaagtacaggctcaatcacacacgaatgataaaattactcacaggtgaatcaaaatagaaaagaaaaaaaatgattcaataaaaaatccatcgtgaagccgggatccctagtggcttagctagatcttgctataaggatggaaaggttggtctgtgtcttgtgactgatagtggagagggcaaccgggtggcgagcggtaatcgatgatggaatcatgaaaggatgtagcggcgtggtatagagatgagcacaacgttgtgcagtagcagccatccatcatctagcaagcacaaaaaaaatgcaaaaacattatcattcatgtcatagagacgacgagaaaaagaaaaatagcaaacaacctccatcaccggcggactccaccctatcctctgcggctagtcacatggagcacgatatacaaatgtaggacctgtgcagcccatcaattcaaataaggtaatattggatattgcacgttaatttaattggcaaaaagaaattggggctttacgcgtgaaggtgtaggagagtatgcagatgcaaatcgaaatgtcattttcttacttgcttcttctgtcaatgtcgccgacatggagcaaccactggttgttgctcttggcccaggtgaacacatccttattggaaaaatagaatatatactgaaagtaaggaagttgtttttattgaagtaaatcatttactctgataatggtgggagcatgatgatgagacatagggtgggatcgaaagtaggaaagttgtttttatcgaagtaaatcgtttactccgataatggtgcgagtgaggataatatgatgtagggttaggtgggcctgtgctgatatacgtttggctagtagtatctctataatagttaactaataagttgaccaataggaaatatttttgactgaccttaatctttattaaaaggaaagtttgatatggagagtactaatatgtactccctccgtccaaaaaaaatcaattcctagcatcccaaggtagtattagtggagagtggaaatgactataatgcccttaattattgaaaaaaagtagtaagagtgatatatataaagggtattgaagaaataaaacttctcgttttacgtgctgagtgtaggtaagatggtagaagttggtttttttgataaaatttaaactctagaagttgagtttttcgagggtaggtaggatggtagaagattttttttttataaaattcaaactctataatttgaattttttttgacgaagggagtactcatctcgttccataaaaaatagtataggatatgacatatcatagtactataaatctagatatacatatgtccagatttacagtattagcatatatcatatctcgttatttattttttttatgggacagagagtatttcattgtttacacataaatatccgtgaaatcctctttggaagaatgtccgcataagcaaaattcagcattcaccattgatgtgacggatcaagttgttaaaaaaaaaaagaagaaaaaaccatgtgcgcgcgtttgagagacgaaagccgagccgagcaagctgatacggataggcagccgctgatcgaaccgcgcatatgcccattgtttgtttgtttatccgtcgtaatctctcgcttacaaaaatatctcccttctccgcatcactcactactcaactagcactactactagtaagcaagcagcagataagcatcactccctcccactccaaccaccacatcagcatcagcaagcagcagcagcagaagcagatcgatcgatcgatcgccatgagcgtggtgatcctggacgggtcgacggtgcggggcttcgtggcggacgacgacgccttcgcccgcagcgtcgacgcgcgcttcgaggcgctggacgccaacggcgacggcgtgctgtcccgcgccgagctccgccgcgcgctcgagtccttccgcctcctcgacggcgccgggttcggctccgccgagccggccccgctccccgccgaggtctccgcgctctacgactccgtcttcgagcagttcgacgccgaccacagcggcgccgtcgaccgcgccgagttccgcgaccagatgcgccgcatcatgctcgccgtcgccgacggcctcggctcccagccgctccaggtcgccgtcgacgacgaggggggcagcttcctcctcgaggccgccgagcacgaggccgcctccatcgccgccaagatcgacgcccagcgcgccgccgatgccgccgccgccgccgacgccaagtgacgccggccacgtcatcgcaaccgttgcatcggatcgggcttgtttttttttttttttactcttcacgtgtaccgtgtccgtgtgtgtcgaggtgtcggtgtacgtgtacgtatcacaggtggcaacgtacctctctgctacgcttatcaaactggagactactctgctttgaatggaaataaaataattttctatccactctaaaaaaacgtcatttatttgtactcattgtctttttctttttcacgctactcaggcctttctgagttgaggaatttttgaattttttttatggttgtcatatcggatatacacgaatacacatttaaagcattaaacgtaatataataataaaacaaaggcacagatgccaccagagaaccgttagacaaatttattaagcataattaatctatcattagtaaatatttattgtagcacactttcaaattatggagcaattagttaggtttaaaagattcgtctcgcaatttacacgcaatctgtatgattagtttttttctatatttaatacttcatatgttccaaacatttaacgtgacatggtgaaaagtttttattaggaaagtaaacagagcctaatttttactacagtaagtctttagagttgatgctgatcaatcctaggaatgctatctggcacacatacgtactcgcacgggttagctggcgtcgccttcactgcgccacatgttttccatctgtctttccgcaatgtttcctccattctggcggccgctttctgcgatttttttctctattttggtgtccctcccctcagcgcgcatttttcattttcttttgcactctttccctttttttttctgaaaaagtccattatacaccctcgaacttttatacttgtctgaaatacacccccgaactacgaaatcgggtataatacaccctctaactgtgaataccggatacttgacccccttgggctgttttaccatggattttacacacgtggatgacatgtaggatgccccttcgccacgtcagcacttatgattatgtgggccaagcccatattgctgggttgttttgacgttgctttttcacgagcggcggcggtagcggcactgcgaaggcagggttgagcggtcagtggcgcgcatctccgacaagcagctgcggtcgtcggcggaggagttgtcgcaggaaagtagcagctccaagccgctgcgcgcggtcgtcggcggaagccgcgcacgaccgcagagatggctaagcagggagcaaggaagaagcagctccgacacaagcgcgatatagacctcgtcacctcgacctgtctcttgtgacctgtgtgtgatgcttctcctgtttatcacaactactcatatatactgctctccctccgttttaaaatgtttgataccattgacttttatatactactctctccgtttcaaaatgtttgataccgttgacttttagtacgtgtctaaccattcgtcttattcaaaaaatttaaagtaattatttattctttttatatcatttgattcattgttaaatatactttcatgcacccatatagttttacatattttataaacttttttaataagacgaacggttaaacatgtgctaaaaagttaatggtgtcaagtattttgaaacgttgggagtattactaatctcggcaagctagtacgttgtgctgctagctactcatctttgcagtcatgagcatgtcaatcccaaggctaaacctgttcggcttccacgcctccaagcaggactgcaggagacgacggactagcacaagcacgagcaggagcaggagtagtactcgactgagccggagaacgcgctggtctgcggcaacggagacggagctcgatcgcagaggaggagctaggcggccagcgatgacagagctagctcgtagacgccggtcgcgccgaccacagtctgatggaggcgagcccgctcctcattgagtaaatctcgagcttgcttccgccaagctcggcgaatgggtgcgccaaactcgcggtggtcatggcgctcgagctcctccccgcgcgtgtatcttcggcgagctccacctctccactcggagctgcttcgtccctgcgccgctcccttcgccgaagaacgccgcccccactgccgcctccgccaccaccgccgtaggtgctggagctcgatttggttgcaggcggcgaatctgcagctccgtcagggacaagatgtagcaatgagcttgccgatgggtgtgcggcggtcctcgctgggcagatggatgagccatgcgcccatgccgaaggagagagaaagagagagagatagagagagagtggggaggaggaagaggaaggatcggactgacatgtgggactaactaatctatataggtggcatcctagtgtaaaaaacccgaaattttcacatctaagcatatgcaaccttctaattccaaatatgagtaggtaatggatggagttatatttttaatcaagaagcccacatgtgtgtgtgcagtggtcttccatcggacttaatgtcaaacgaaatataacaaactaatggctgctgatcattggacaaatcactagctcgtaggacttgtttaggtctaattgattgtttgtcgtcagaaaagaaaatcttattaccatttgcaattggttggatcaaccattacgagatagggcaccgtgccgtcatgccgttagtctagagctttcttcgtcttttttttttcttaatccatatttgacttggatgttgttttcgttttgaaaattggaactgtagcggtcggttgaaatataatccatctgcttggatcatcaaaatcataatattatgtgtgctaataaatcttgatttgtttcacatagaagctgcatcaacaaagggtaattataatactagcgaaacatattagtggatcatttgctttgtgcctgctagctagtttgattagaaagagaatccaggacaatacatgctcacatttggaattatgaggtcgcatgtgcttagattaaaaaaattcgatacaaaaacagtgtagaaaaccacttaagggggtcttttgcacagtattgaaagtttgagggggtcaaatgtccggttttaaagttgtggggtgtgttttagacaagataaagaattagagggtgtaaaatagagttatccctttttttttaatctgcagcacacgtgttttcaagttttcaagttgaaagttttgaaatcttgactcgaacaaatctaaactaaaagttttcaaattttgagttgaatgtttctaaatctgagttgaaagtttttaaatttactttcaaatcaagatttgaaagtttcaaattctgagttgaaagtttccaaatcaagatttgaaagtttcaaaatccgagttaaaaattttttagtttcgtgttgaaaattttcaaatcaagatttgaaagttttaaaaactgagttgaattttttttaaatttaagttgaaaatattcaaatatgagtttcaaatctagacttgaaagttttcaaatcttagttaaaaagtttccaaatcctgaataaatctgatttaaaagtttgttcagtcaactaaaaaaaaggaaaacacacgcgcatggcgaatttttatcccaaagaaaaagagggaaaaaaaaaggaaacgcatgagggagattttttttcttgatatgaatctataacaacacgcaatagaagggcgtacagctgcgccagttagccagctagcgcacgcgcctattagtagcccccgatctatccaaataaaaattaagtagtatcaaaatttggcactatcaggccacgttcggtattccattttggtacaacttccttatttttcattagcatatgcttcgtgaacggcttaacaatatttttcattatttaaaaaagctttttatataaaagtttttaaaacattcaaataaaccagtttttgtttttctaataattaatactcaattaaccatgtgctaattaacaatacgttaatgcaaaagaacgctttagttcgtgagtgctagagttggagaatttgtcaaaaaccaggtacaggattcccagttttgcacatttgctcactggatgcggcaacaagcttagcgtcaaaaatcggccggagcggatttgccacaaactgtggattactccggttgttaccgatgaccatatgcacttgtagcactagataacacaagctggaatcaagaatatgcatttaccatcttgcaattagcctttaaagtagtgctccctctcgttgcatatggaacttgggtctaggtttgtgcaaggaattaagcaaaatagttcaaatgactaggttatccttgagttaccagacaaacaaaaatactaactacagaagtaaatgcagataacacagcagcctatagcgtttatagatcaatttacaaaaacaggtgattgattacatgtggcaaggttctataaaaccatgactgattacataattggagggtttttaaggcaacttggtaatgggtatacaccaagagtataagcaaaaggcaattaggtacatcaaaagcttcaggatttctgtacccacaacatacaaattagccatctgctcgacagttcgttcagtcatagcttacaataaaacaaactataagagtttatctgacagaggttgcattgcatataaactgacagcagactattatcaggtagatacttcataagccaaggatcaattgccacgggcacaccggagtgcgccagtgagggtaaaccagaaccgcccgtgtcccgcgatcccgaggttttcacctcatgacggggacacggtggttctggttcattgtggggtggcgatcagcggatgcgaagctgatgtgctcttggtgagccagcatgccgcccccaaatgagatgctggagatctcggagcctgtcggtgtcgatggcgagcaggatgtgctgttctctgggcacaggttcttgccaaggacaacggcaccgccgctcgttctggctctacctgttggagactgagctgatgccggtggtggcttctgctgctgctgctgctgctgctgttccagcagctcctttttggtaaggaaccgaccacctgatccacgggctcgcttcatagcatgatgatgtcgagattcatggaggtaaggctgggaacataatggcatcacaattattaatacaatatagaaaagtgtagttacagacagcaggcaggaaggcacgcatgcaggaaacaaatgcaaccaaacaaggactaaacataagtggctacaaacaaaaactaagaatattaatttcgaatcattacagaaaatgtaactgcctctattgatgtttgcaggtaaaggaatgttacaagcataaatgatacatctgacatcactaaaaaggactaatcaatgaatagtacctggaggattaaatcatctaaatatgactatgtgacactgcccaagcttgtagagattgctaggaccaaatatgaaatgcttcagccataccttcagacctttcaccgccttattttgggcctccaattttgcacgcgtttgccttcttctaaggatcgcattgtattgctttgcattgacaaatatgggctcttctacagaaggatcaacaggcaatggcatcctagagtttgcagcaccagtaatttgaggatgaacctgtttgataatacacaagagtttaataccacaccacatatattttgcaggttttcttctatgcctatatattcttctaggtttttccactgggcatagtcctcactaaatgtcattattatttgaaaaactaaatttgtagcattctcctataaaattggtgagaactatttggataattttcatttccatttgaaagcatttgttgcttctgtttggataaataacaaagaaaataaaacaaaaggaggctgaaaattacagccctgtctttacttacaaatgcatgtgaagtgtatcctgttaatactccaccataatatggatcagtaccatatggataagaaacacatgcctggaaaaacacaagaacaggtaaactaaacataaggttca

SEQ ID NO: 24282 - DNA, 1697 bp, Oryza sativa
ataacaaagatatagtatttttcaaaatattagagtgacaacttaattcgccatactgaattacattaccatatatttgaagcctgaccatttgaagaacagattttgatttagcgttctacaggtgcaaagactcgtgatctttaaagcaataatgctcaagatcgagacaatcatcatttgaaaggctagcatgatttatttcacttatatacaacaaccacccacttggccaatcaacaagaagaaaaactaagtgtttctttcatgtgggtagaaacatatcattagatgcataattaaatatgatttaggcccgtgaatttacatacaacattccaaaccaaaacattgctccgtcctatgctgctcagatggattccaaagcaaagatttttctttggtgtattcttctgactacatagttttgtagcaggtctggttgccgcagacgtgaaagtagacaaatgaacgctatgtaaaagctatgggcagggataatacagaagcacatctaaattaattcctatagggattagggttagaatagatatggattaaaactcttatctgcccttaagtaatagtatatttacaatctttcaccaaaataaagcagggaagtaggaataataggtgaatgagcatcattcaaatgcaatatacttcttttgtttcaaacttaaaatggatgatatagtcacagaagaatatattcgcgtttctgcaattttagccaaacctctaagattgaatacgacattttctcccactggcataaaaatttcacaatgaaccaaagtttaaccctatcatgttatgtggggggagcgcatttttgtgttttctttcaaagttttttaaccaaaaattttcccctttacagctaataactatatggcactgacccgaaataataggagcaggtcccaaaagaaattgtttagcgtgcttgagagtcactcatgcatgtgtgttgtattatcccagaagacacgccacctgctcagttggagcgcttcaagcaaaaccaccacaaaatttgattgggggaaagaatgcgtttctggtatagatgagtcattgaagaaaaatgtattacctgattgtggtgaggtgtgttgtccgttgagactgctgtcacttactgcagatgcttcttggtgagactccccagactttgttggtgacgagtcaccatcagagttcctctgaactaactgtttcattggatagttattcctggcaagaaaatcctattcacatagaagtgaattggtaagttcattatcttcagtttaatagctatgattcagtatcacactgtgtggaatatgtacttacatagttggtcttggccatgcattggacaggatgattctccatttcttgcaacagcattatcattattagaaggcattactcaagatccacaaacattttctgtcctattttgaagttcagaaaattttcaggtcagactgacagtggcacataaagaaagccaagttactagataaattagtacttgaattcggtttgtatagtatccacatacaatgattagggattaggttgtcaaacatccaaactcagctggatgaacagttgaaaatgatcgaagcataaaataaatcaaagaactattgtacggcctctacaatatcattaacaaacaatactatgtcaactttatg

SEQ ID NO: 24283 - DNA, 4088 bp, Oryza sativa
attagctcctgatgcttcaactaacagagagtttaatgcccattcttcttcaaggtgattttgctgcatcttctctttgatataatcttgcatcataactattgttgaagtgttcagatttctactatgaagttatccttgtgtccaaattaaatctgagacatgccacatgtaattattcgttgattgcagtttgacgcattatactcttgcagatcaactgatgatgtgcctcctactgaccagacggatcttgttggctcttgtgtcatgcttccgaaatcagattcctttgtttcagtttccgaatatcagcacccattgactgaggacatggaggtcttgagtccaggtgtttttggagagcataggacaaatgatatgatttcaacccaggtctcacattcttcacctcaaccccagcatcaggacaattcagcagtgcatgactttaaggtgaatagaatatattaagtggatagaatatattaagtggatggcagtgtttcttattcgtggttcagcttagtggttttacctgacattcattcattcattctttttctcgtgtaccaggaatatgagccagattctaggtatgagatgccatttatcactaaagctgttgatagtgaggcgacccaaaatataccttatccgtctgaggaataccaccatgccacctttatgttcaagtccggttattatgatctggtgtctgcctgtctgctatacgtcgctttcgattttacattcataaagcacacttaagcaaacagcctttatattcaagtctggattcctctagatttatttgcagattgtgaatgcaacggtttttgagaacctggttatttgaccttgtattagaagtttcagaagcatcagagatctgcatttgtctatgtgaacatctgttacagctccaaagaagctaaaagggaatccaagctgttaacgcagcttgcttttccatactacctgctagtattttatcttttggttttgcacttttggcctgaaattatgttttatcaatggttggactaatcttgactgatggctccagcatttacttgtagttatagtactggatgtttagctttttcttcttaaggcttatccactgtccaagatcaatgtttccttagcagctgtgacattgtgtgaaactctgttgataggggatgggcttgcatgctgcaaatttcaatcagttatctgttactgcagcaactcacacccagtgcctcaaatgtaccacatgcatgtatcgcaatatccaaactgcttgccatatcgacatgttttctctccatactatgtgcctccagtggctgttcaaaactattcaagcaatccagcatttacacaattgccaagtgccagcagctatttggtaatgccaaacggaacgtcacagctagcacccaatggcatgaaatatggaccaccttatcagtgtaagcaaatgttcccttgtggccctgcttgataccgtggttttacaaattaaaattgttacccaatccattcttgtgtaattggtggcacttgttatggtcaaaaatgccatttctgttaattttagggccaccattctttccccactcagccctcaggtaattatatatttcatccttagaccaagccttttctgatcataattttgacacatgctgtaccttaacatgaataatatttgtgcttggttgcaggctgaaacagcagatgtgtggattcaggctcctacagatattcccgtcatgccgtcaacaccattctacaacatgatgggccaaccaatgtctccccatacagcatacttgccaccgcacaatggtcatgcccctttcagcccagttcaacaccctgctcacctgcagttcccagccatgccccacggactgcagccgacaacgatgaccatggtgcagaacccacaacccatggtgcatcagccagcctgtccgccgttggctggaaatatcggcattgatatggcagccatggcttctggagctcaggttggagcatttcagcaaaaccaactcagccatctcggctgggctcctcccagttttttatgatgatttggatggcagtgctctcatgagacgacaagtgagctggtttcgtatcgacaagaaaaagaaaagaaaagaactgattgaagagctatgctctaatgcaagtaactcatgatacttgccaccttttgtttatgatgcagggaaaaacatgttagtattccagttcatcttgcaccgcccaaagcgtgtcctgcattggaaacaccaattttgactgccagtttgctatcttatttatttctggttttatagtatacatcagttcgatcttaacttttctgatcgatgaaatgtgtgctccgaaatgctttatgagttcaactcaaatcgcatgataattccgctgttccctggagattttgtcgagtacccgagttgttgctctggatacacctgaatgctgcagtgctgcatcagatatgctaggacagttcactagtgaggtttaaattaaacacagtaataaaaggttcagggtgaaagataccatcaaccatgattcgacgtaacaaattgttaaatcaacgtcacatggttatgcgttaggtgtaaggtgcatctcaaaattttaagacgacagattggaaggtggaaagtggttgtggataaacaagattatagttcgtggaaagcgatcgtgcttaacacaaatactatgatagaaccctacttttctgctgttgatagagctagctcaatagtttaatggcggtagcaataacgctcatagggatcaatcaaacaagtcggctcgtgtgtgaaagcacgcctcatcttttcacttgtacttatgctcatcagctaaaatttaaattttcagtcttaaatttgaagttgattttaggttttttttcatcaaaatttatttttcaatctttgtttttaaatcgctaagaacatgtatataaaagttttattcacaaattatttttcgtttgcaaatatatcgtttggcttattccacaaataagcgaaacaacggggccgtctactccttattggtagggcacctataatgttaatatgttattatcttcatcccatattgatctccctataatgtttatacatcaagaccaaggataattttaacgccatgcacaatatgtacacattctcccgtaataaatgcatcgattaaaaacaatgcataatcgcatcctttagcatgcacacattctcccgtgctgtattaattgtactccgatgaaatccatgtccatgcggttatacgatgatcaatttgagaaattttagttttcattatatgataatcaatttaggaatgagggagtatataaaactaactagtaagcattaaatgtccctacttactactttctccatcccagtttgatcatcacgtaagcaaataacaccaagaccaaggacaccaaaatatttatcattctcaaattaaaccttatcggctaaagtgcttcattgcttcatcttcactactaccttaagtaaggaaataaaatatgacatgtacacaatgttttttgacagcaaaattaaaaaaagcagcggcattgggtggtggggttggaggggaatgtggcgtcggtttcaaggacggagtggattgcagcgtcgatgttaggggtggagcggattgcagcgttgggtggtggcgacggacaagtttgcggctcccggcagggacggagcggattgcggcattgggcggggacggagcggattgcggtgttgggcgggaacatagcagaatgcgacactgggtcacagcgaaggagaatgtggtgccggtggaaagagtgagaagaagttgagaggaattagggattgatcctgagctcatccatagggtttccatgagcgatgattttttaaatcctgtggaccccaccttaatgccgtctcgagcaaataagaattatggaggatgtctgctcctactaccacccatagcacggtcccacattaatactgagctcattaacggaaagggattctctgacttaactgctg

SEQ ID NO: 24284 - DNA, 687 bp, Oryza sativa
ttgttgatgaattattggatgagctctcaggtactaaattcttctctaaactggacttgaaagctgggtatcatcaaattcgaatggtggaaactgatgaaccaagacagcctttaagacacatcatgggccatttcagtttagggttatgccatttggtctcacgaatgcacccttcaccttttaatgccttatgaactcaatctttgcactatttataaaggaagttggggttgtggttaatggccaaattttaagttattacccttaaccttaatagcaattgccttaatcttcaccaagttttggtaattttaaggcacaaccagttatttgctaaaaggtctaaatgctcttttgctggcattcaactggaatacttaggacatatcatttctgacaaaggagttagtactgatcctgagaagacagcaccaatgctggcttggcctgtgcctacttctgttactgaattgaggggattttggggactgacaggctattacagaaaatttgttcagggttatagtatcataccatgaccattgacactcttgttgaagaagaaggcctttctttggactgatgctgcttagcttgcttttgatcagttgaagcagctatgagtaacactccagtgttagctttgcccaattttaagcttccttttacttttgagactgatgc

SEQ ID NO: 24285 - DNA, 5701 bp, Oryza sativa
atatatatatatatatatatatatatatatatatatatataaaccatgcatatatatgtttcaatacatatatatgcatacatatatatatgtatatatatatatatattatattatattatattatatgtatatacatgcataatatatatgtatttatacatatatatgttatgcaaatgcatatgtatatagatatatatatgaacaaaatatatttacattatagaaaatgtgtacacatgcatatagaaacatatgtagtcatgtattaatgacaatccattatatgtcctagctagctacgatttcgacgtagtagtactcgctgctagctcagaagctaaggaccggtgaattgtgtttccgtcgtagtagaattcacccttgggatcaaggatttcttcgttgatgaatcccatgagttgttcttgaaccgccgcgaataaattccttgtgtgtggtcaggttatccctcatgcgaataaactatatgaatgtatgaaattgattagtaattaaacaagaaatcgctacgtaatgaaattttgaatttatttgtacgtacatcgagctctcttgtggtgatgatttggtttgcaaggcagtggcaatactcgcacacgtaatagccgcacaagttagttccctgcttttgctttgcgcactacaaataaatgacaaacaacgagagatctaattaatatacacttgtatgtatttgaatcggagaaatataaatgtagagcatgtgtactcataggaaatttgaacttccgcctaagtctttctctccatttgccgcggaccaaatgacggaaccgataccaagccctacatggagtttaaagctatgattcgtagtagcaattaacataacaagattttcttaattaacaaaggaactatgcggtacctgtctataagttcgaaaaccttgtcaaacgtagactcttttttatccattgagtcatatacgttgacggtgcaggcctccaggtcgatgagtaaaagcacccagtggaatctgcaatgtgcgtgggatgcattacatatgaaacacttagcaagttcgtacaggaatgaaatttggtatgtaggaagacagtaaattactaactctgtgttgtatggcaacagtatgaacgtcttgtaatgctgcgccttcaggagatggacgagattgtcctctgtttcttgtggatattggtcgagcattgcgacgtttactttccgagggtcgatgaatccagtatcgaaaaccctccgccgtcgggccctttgaatctccattctacaacgtaaaagggagtatattattttctatggtctacttatatacaaggacctaattaattaaaggagacgtatagtaagaaatctaactgaacgatatacttacaaaatccagcaattcataatagagacgtcgagggcgtccagctggtatagttcgtagattcccctgaaattgatccagagaatgtcatctccttgcaagaagtccgtgtccctgatcctcgctccgatcatctctctaccggtggcgctcatctccatgtacagctgatggaacttgtacatttgtgtgggtagggactgcagcagctcaggcttgacaagcggtttaccgagttcgtacatgtatttcacttccgcctttttcgatggtgcgaactctagcaattgatccgtaggtagaccgggtcagtaataaattgttctatcgtcatttctttaccggtcaccaacggctcgatctcctggtttggttgctctccaagctgagggactggtttggactttccagaagatgctttcttcagcgttcgctcatagtctgatagctgatggcctccttgacagatgcagacatacccctgaagaagttcctgacactggggtctataggaatcttcttttctggacttcgaggcttgaattgtctcttgacttctgatgcaacgtaagcgtcaagctcctcttgcgtgcaatcgtaccctgggtccttgttcttggcggcgtcaactttcgccttctttgttgcccttgtgtgggcaagcggtggagctgggggggcccttgactttgaaggtgccggaagaggagcttgcgggggagtaggtgtaggagcacgaggaggagtcggtgcaggatcctgaggaggagtcgatgctggagcctgcggtggagacggtgctggcggagcatgaggaggagacggtgcaggatcctgaggaggagatggcggagccggaggagatggtgcacgagacgccgcttgtcgcccagggaggatgatgtaccgcctgcgccatagaataatggcatggcatgtgtctcgtagatgcgtctcaccgtctcctccagggtaatccagctcgaggtcctcgtacgcgccttcgaccaactcaacttcgaccttggagtatcctgctagaatcggcctgcagtggtaagtacctgaagggtccgttgggatggccatgcccgacgccaccttcatgttgtgagagattatttattagtaatcaacatatataagcagcaactagcggaatggctaaatcttacctttattgataagttcttgaaaggaatatgcagctcacatggtgtccgctgagtgaagtcatcaacgggacaggtcgattcgtcctgtgtttgcatggcgtccatgctctgtgatcctacctgccccgttgaggcgcagctgctacggtttcctgacgggctcaccattgcaggaaggaatggtggctggggatcatgggaccgatgtgcggccatgcgttcatcaaccttccttgccacctcctcttgcatgttgagttcgtagctcgatacccggaactctaggtctgcaatcttcgcctcggtatctctcttgctcctcatccgactcctgtacgtgtggatgtcctccttgaaaccaatcttccaaggaatcacccctttccctcgagttcgtcctggatgctctggagtctgcagggcgagtgtcagctcgtccctatctctgtctggtcggaacgtgccctgagaggaggcttccactgcatctgttagtcgtcgcgcagcctcttgtatctgatagccgaagaccagtgagccatcagctgggttgagcgttccaccgtgagcatagtaccagaacttcgatcgttccggccaattggctgttgccggttcgatacccctctcaatcaagctagcctccatctgctcccacttcggcatcgcgacgctctagcctcctgaccccaagtggtgatggtacttcttcttggcggcattttctttgtttctttccatcatcgcctgcccttgttcacctgtcttatatgcaacgaactcgtcccagtgatcccttagctttgggaatgtgtcgaagttcggtgtctgccccttcagtatatacttctggtacagatctcccttgaagctctgaaactgttctgccattttcttcagagtccaccttttcactttgtcctctgtacccgcaggaagggtgaatgtctcgagcattgtggtccacagcatctctttctccgaatctgggacaaagctctcatgatctccgcgtgcccttgttcttcgccagtacaccgtactgacaggcacgttatcccgcacaacccaaccgctgtgacgtacatagttcttggcggcttcggccggggcactaggacgtccatcttcttccacttccgttatgatgtgccgaccctcaagcttcttcgctgcacctcgttgcccgcgtgccctcttctgtccaacggagggttgactaccactagcctcctcctcctggttcccctccacatccctttccacgtgcccctgctggttcccctccgcatccctctccacgttcccttcctcgttcaagtactggtttggatcctcgttcccctcttcttcattccagtactggctgcttccctccgcgattgtatcgtacaatatctgttcctcatcgcggtcagccatctgttgatacaagaaacatctgctaagtcacgagacatttatgttttaacaatctaagtcatgtatgctaagtgtaaatgtcgtacattagaaccctacacaaccttacgtgctaagtctaattacaaatcgtgatataagctaagtctaggtgacgtatattatacaaccctagctagtaaataattatatactaaatctaattacaaataaaataatcttatattaaaactcaaataatattacatgctaagactaaaatagtcatgtatatgctaagtgtttcgtgcgtatatgctaagtctaattaagactacaatagtcaattgctacttgtcgcaccaattccgtagtcaataattacataccaagtctaattacaaataaagtaatattatattaaaactcaaataatattacatgctaagactaaaatagtaatgtatgctaagtgtttcgtgcgtatatgctaagtctaattaagactacaatagtcaattgctaggagtcgcaccaattccgtagtcaataatgtcatactaagtctaatttgcaataaaataatcttatattaaaactcaaataatattagaacactacacaatcttatatgataagtctaattacaggtctaataatcttaattaattgcattacaaatataacaatcatttatattattacgtcacttgcctgctccaattccttctagggctagctcttccactcaggcttgacggacgactccgacaacacgtcttttctgcaagatacaaaaaaatgtattaggataaatgcgaagtaacatatatacatatatatacatatatatacatatatatacatatatatatatatatatatatatatatatatatattgcatttcacgttaacgttcgtcctcgttcgttcgctcgttcacgttccctagctcgttcacgttcgttcgctcgttctcattcacgttcgttcgcttgttctcattcacgttcgttccctcgttctcgcttgtcttcgttcgatcgttctcgttctcgctctcgttcgttcgatcgttctcgttctcgttcacgttgtcgcggcaacgtatgttgacgtgttcgttctcgctctcgttcgttcgatcgttctcgttctcgttcgttaacggcggtgtggcggcatcggggcggcggttggcgcggcggcgtggtgacggcggcggcggcgtggcgttgtggggccgtggcggcagcggcgtggcgtggcggcggtggcgtggcgtggcgtggcggcggcggcgtggcgaagtcggcggcggcgtggtgacggcggcggcggcgtggcgttggcatgcggcggcggcgttgcgcggcgtcgaaggcggcggcgtggcgcgtcgtcgtcgtggcgcggcgtctcgtggcgggcggcgcgacggagagagatcgagatcggagagatcgagatgcatgaagggagatctggcggcggcggctctcaccccagagatgcggcggcagcggaggaggcggaggcggcggcgaggacgacgagctcgagacgacggcgagatacggcggcgtcggcgcggggatttgccctaggcagtggcggcgaaggagagaggccgagagagatcgatcggccgaaaacatttaagtgttggtgaagaagacgagaaagcaccgggaatatatatacccctagatctttactcccgg

SEQ ID NO: 24286 - DNA, 1754 bp, Oryza sativa
aatatctttagtcccggttgttctcaacaaccgggagtaaatatcttttcccgctatttcgaaattctttttaaacccggttagggttaagaaccgggactaaaaattatagcactgcatatgattttcgcttacatatgtgtttataaaatagaagttaatgcattaacattatttaaagtacaaagattaatgacaattacttcgaaaaattatttttggctgtaataaattaagtggataaatcgtaataagcaaatataattaataaaaattccaataatcatatatacttagcatatatatgaatgatattattatattggtaaaaactctaattaagatatgtatgtacatactgcatgatttaaaattaataaaaattgtaatcatcatatgtacttagcgtaggaattatattaaattaaatgctaaaaactctaattaacatatgtaaatgccacatgcatgattttaaccttttaaaaattcgaatagtcatatataagtagcatatgaaagatagtaaattaaattgtgaaaaactctaatatatgaatgatagttttaaaaatatattaaatttaatacttttaaaaattctccagtcaattataattagcatatgaatgatagtaaattaaatgttaaaaactctaattaacatatgaaattgccacttgcgtgatttaaaacttttaaaaatcctctagtcaattataattagcatatgaatgctagtaaattaaatgttaaaaactctaattaacatacatatgaaattgccacctgtgtgatttaaaacttttaaaaattgtaagtatcacatataactagcatatacatgatttaaacttgttgaaacctctaataatcgtgcgtaattaacatatgccatacatcaattgatttatatagataatcaatacatccaaaatagtttacatcgtgtacacaataattacggcacgtactttctcctcactattgttccctccttgtgatcgctgcgagagtaaggggtgtcttcatttgataggaggatgctagggtcaatcgtcaccgtgaaagggggttgcccatccaactgatcgtaatcctcgtcagtcttgtcctcaactccgacgatttttcttttgcctgggagaaccacttgacgcttaggctcatcaggccctctgcccttctttcctttgctagacatgtccttcacgaaaaagacttgcgttacatcattggcaaggacaaaaggttcgtccgagtatccaaccttgttaaggtcaacagttgtcatcccactgtcatcaatcattacgcctccaccagtcaacctaacccattggcaccggaacagaggaaccttgagaggaccatagtcaagttcccatatgtcctcgatggcaccgtaatacgtggcagttgttccatcgtgtcccatggcatcgacacgaacagcgctgttttggttcgtgctcttcatgtcttgggctctcgtgtagaatgtgtacccattgatctcatatccctggaatgtcgcgatcgacccagacggtcccctcgccaggaaggcaagttgttggttgatcgactcgttacccatgagatgttgtcgtagccatgcggggaaagtatcaatgtgatgccgtgtaatccatgcatcggacttaccgatgttcctggcgcgaactagagccaagtgctcctcgatgtaaggagctaccaatgaagagttttgcagaacagtgaaatgggct

SEQ ID NO: 24287 - DNA, 892 bp, Oryza sativa
aaactgttgtgaaatatgtaaaactatatgtatatgtaaaagtatatttaataatgaatcaaatgatatggaaagcattaatatttatttaaatttttcaaataagacgaatggtaaaacaagtttaaaaaagtcaacggcgtcagaagaagggagtaggaacttgtattaattaaccaatatagtgcggatcagttccaacgataggtttaccaatggagaaattttacggttattaaaagacaccaaaataattaagtgtaattaaattcgaaattgcggtaccgctcgtcgtcgccttaagatagtaaaattactaaaattaatggaggtcaggagcttgttaaccgtgaacctgcagactcgatcaaaccaggtacagattggattgcgcttgatgattgttttacatatataagtaagccgtgccattagcactgtatttacaaagactaatcgaaaatgtaatagtaactacgaacaattttgatagttcagtgttagatagttacagtgttacacccttttcctgatggaactttgttaggcagccacaatataatctagaataaacaacaggagggataattataaaggtagtactgggcagaaaaaaatgcacatatatatatatatatatatatatatatatatatatatatatatatatgtatgtattattagaaaaaaaatggcatagatatagatacataagaaataagtgaattacaccagctggcgcagtggcacattcggaaaaaacatgaaagaatgagggaaattaagcaaagaataaagctaggtcgtcacttattaattccaggaaatggccaatggcattttctagtgcttcgaccttcagcaaaatatcccatcagtagctaaatcgtgc

SEQ ID NO: 24288 - DNA, 22660 bp, Oryza sativa
atgcaactgactagggtagatcctagtaagaaccattatggaggaacgaaacatcccctgtgaaatcatacatctcaagagtgatctcacctgcaaccaagtctaagcatacaacaaaccaacaattcaagcaggagtcagtacaaataaattgtactggcaagcaccaagcaagcctaatactctacatgcatggcatattcaaagtaaagcttacaatggatatttttagcataaagcatattttgtttgaaagaccattttcaaattcagatttcctttcaattaaatttcagtaagcttacacttagcaaatgggcatcaaagtaggtgttaatcacatataacatagctccttattaccttccatggcagcaaggacataatccacaaatcacatcacattttgaagtttaaattcagcttttggaagaataaaacacaagtctatactcatgacatattcacatgccgctcatgactgcgagcatggctaatcgattagttttaactctgtagagtacgtacactttacccacatgatgcgaaataataattatgcaaaagcatggtacgcgatacataagtacccgatttataactcacaacaaagcccttcaaaaattcatgatatagccttacacctacacgatacgtgttccttcatcctagtcatactagaaatatgacctagaaccgttaagtggcgggcccatgccttaaacttaatgctgtggtgacagacacgacgggaacccaccacgtggcactataccgttgtattggacacgcttagtcatctaaactaccacatcggggtaaataggaagctcctctgaattattcgaactcatacacactggcctaccaagatgtaaggctaaaccataaataatttactaagcttgggctatctcatactagcacatgtggttgtactgtatacgaaatgaactgacattgagtgaagtccttaggtcggtctaggcacactctccccctatcagcacacaactaatcaccatatgtataccacatgaggcccaaacctaaaatccacattttccaatattttatttaacaaatatcacattttatcatttctgtcaagaccataaattagatcattttatatacataattgagcccaaatggtaagtaaacccaacactaagcatgactaagcattttcatagacatgtgacctcaaacatcaaacttaatgtgacaaaatgaattgttcctaaggctaggaataatggttaaggtcttttgtggagtttaggtgataatgcaagttaaggagttgatctaacaaattttacaaagttttaatggattagtgtacaatcgacatgcacattttgcaattcttttcaaaaacctccaaatcataggttcaatgtgatcaaagaggggaggtggcttgccttgctctactacaaagtaggtctcctcgtgattcaactgcgaatcatctaaacatacatatgcaaaatcaaaattataaacatacacattaaaatccaacatgctctaaaaagaatgcttttcatagattaagtgtgttctgtgttaaattgatttttagtgaaagaattttcattttaacagtttccattcaaaacttacaaatttttaaagtgtcttcatgttaaatatagacctacatgcatttcggatttttgagacataaatcttcatgattttgttaagtctaacatttttatatgcagagcataaaaatatgattccaacaaaatttagtttgtaaattttagagttagaatgaattttctactaatttctaaagttttaccatttttcagttgatgagaaactagttttgcattttctctatttttctcaaatcattatctctctcgggtccaccggtcagtgactatacttttgcgcataagtccctggttctcgggaaatagatccagcagaccctgagcacgtgttccaggattttattcaaaacggtacttgagttttaagttatttactcgttagtacacaaccccacatgtaagtgtctaaatgattttcttaaacaccctggaagttttaaaagattgcaaggttaggcccttgctcttgacggagcagaggggcagctctcccgcgagcttccccacattgccggcggcgaacggcggcgattcagttcgagctcccaaaacaaaaagtgtagaggacaaccgtacgaacctatcggtagctttcttgcaagatttggtgctctatagcggctgttaaggtgttagaggtggcggctagcttttttgtatggtaaggactctagggactactaggaagctcaccaagcaacgcgaggtcttggcgatggagagctggtcgggcggcggcgcagcggcttcggtatcgtcggcgatgcaccttcgggcttgatctgttcaaagcgattttagatggcacaagatagctctaggcttaaaagaatgcgccgaagctcaccagagaaggaggaaaaaggaaaatggcgtcggcggccagagttgcggatgaaaaaggggatctcccgccgaggtccaactcagatcgattcctttgggattcttgatccactactaaaaaaatgatttttcatggcgtttggaaaatatttttcatggcggctaagtgaaaaaccgccagcgcagaaaatcgcgggggtcgggggtcacgggccgccagcggaaacacaacttcgctagcggtcgccttaagccggccgccaacgaatatatggtattttcactggcggccctcttaacttgacgccagcgaaaatcgtcattttcgctggcggtaggttaagaaaaccgccagcaaaaatagcctatttttgctagcggagttgttaccattttcgctggcggataatggagagcgcaagataaaaaatcaagccattaagaaatcaccgcgcgcatccacctacccgtccttatcctctctcctcctccctcctccctccatatctagccctctcttccttcctagtccctccaaatccaacacctcctccctcggatccacaggcggcagcactcgcgagcgatcggaggagagggcggcggcgagcttggggcgcgggcggcatgctcgggcgtgggcgatagcgctcgggtgcgggcgacgcaggagagtgcggcggcgagctcggggcgtgggtggcgaggtcgggcgtgggcggcggcgctcgggcacgggtgacggaggagaggacggcacgaggtcaggcgtaggcggcccgggcggcggcgctcggcgacagggaggcgcgaggcaccggatccggcgacggggaggtgcgaggcggcggatccggcgacggaaaggcgcgaggcggtggatccggcgacagggaggcgtgaggcgacatatccacaggtctctctcccccactcctcactcctccccattccccgccgccaccaccccctctccctctctcaaatctagcgttgcgtggctttgcagcggcggtggcgaggcggagaaggtggaggtcgccgaggctcggcagcagggtcgtcgaggcggtagaggtcgccggggctcggcagcactgcagcagcgtcgtcgaggcggaggcggttgaggccgacggggctcggtagtggcgacggtgatggtggatgggacttcaaggatgacgacgccggcgacggcggttctctgtatttgtgatgcttgtaatatttgtgatgatatttgtgaagcattgtatttggattgatgcttggtgttcaaattttttgttaaatgtgtggatattttttatgcttgaatgcttgggagaatggaaatttttagctgtaaatttttcatgtaaatttatgtgtggatggagttctgatggaggtagacggagcagtgttttttttaatatagttttgcttttcaaatttccgcctcttcgctggcggctagggcagctgcatggttttgatttttgctggcggttggtggaagacaacagccagcaaaaatggatctttgctggcggttggctaaagacgaccgccagcgaaaattcattttcgctaacggtcgataaccgccagcgaagatcttgatcttcactggcctttgctttgtggcggctctaaattccgccagcaaaaacctaaaatggccgccacgaaaaatggttttcgtagtagtgatcaatggaggttgatgaagctcgtggcgaagtggttcagcttgtcgcgaaccgtggtaagccgggcaacgaacaatggtgatgcggcggtgtccaaagcgcggcggcgtcccaagttgacgcggtcgcgttcccagagattggctgcaccaaatgaggcgttcttggtggtgttagagagggtgttgagagtagacaagggcgagagagagagagagtgatggtccggtggtcgggtaatatatggtgtcgccggcagaggaaaggaggaggagcgcacgttgccggcgtccatgctcacgcgcgtggcgtgagtgttctggccgtgggcccgtgtggagaacgttgtgaggctgacaataaggtcccaccatgcagccctggcccacatggcagtgatttgcgtgagagagggaaaagagatctaggtttttgaccaagtctgggactgtggtgaaattccaactttgggctcgatttaaaattagttccaggcagaatttgggttagtgaccagtggcaaagttgtaaaacaatgtttactctacaggttggatcaagtcttacagcctaggagtccaaggtcgaattttggcaaggtgtcaatgtgtgctccagagaatctgtcaaaatcctgtgtttggagagttgcttggtccatctaatgacttgataaatcgaactaaaatttacatttgttttctaaggttagttagaagtttacatagattttccccagatttttgagttgttacaaatatttttcttaagctcattagttttacttaagaataaatatgctcctataatgcatatgcaaaacatctcaaaatgcaaaagcaattaaacataaaatttttaggcaaaaattttattcattttacttcatccatcatttccatgttttccatacatccaaacttgtggtatgtgacagttcgtttacaccctattgacattttcttttttttatttcatacagatattatttttagttcaaatttatgatatgataaataatgacaacattacaccctatgtgtcaatttttttaaaagaaaaatttatctataaggaagtaagattggtatatattctcattgtttattaataaatggattttatgggacatgaggctacggtaaattcatgggcttgtatactacaatatatttccattatgtgatagatgattcatttggaaacgttttatatatagtgtgtgaggctctacgcaaccattaagaatacgatttgatgggtaattaaatataactgtacatgcaacattgtttttggattgtaatgtattgtgaatgcttctttgatttaaatattttctataacagtctgtttggttgaagggagtttctaggagggattgggagtttaaagggatgaggctattaactgttttgtttggttaggggacatggcaattttggtgggatggggatggggaattgaggaatgaattctctccttttcaatacctgggtaggggcaggtaattgggagggaattcctcttttacttcgcctaaacaaatctcagccatccgttttcattaatgatctaatctccaactaaactccctatcaatttccaccacctctaccaaacaagagactgggatgaaaaatcaaattcccatcttaatctcaccatcaatttcctcgtgtaaactcccaatccccttccctcaagttgccaaacaagccgtaatatttatggaaagctagttttatgggctatcaaccccaacataaaacatggtctaaaatcttcaagagatcttgaatccctttcaactcacacaaggatgaaacattttgagcactagtacttgaccaattatatgcatgtgatatccctcttaatagtacggcaacgtattctgtgcactcaggcacttcggtgcactcgtgcactcgctcgatctacaccctcgaatctcgatctgaaggatgtgatcgaagaaagacatttttgcataaaaccctttgtgctatgctgctcgtggggtgaagtctggaagggagaagaaagaataaaacgaggggttgtgtgtagatcgaaaacctcatccggtcctccatctccgctcggcgtcaatggaggctcgaatccgcccggcaaaaccacagtcgacggagtggaaaatcaagtttaagcctcccgttttcctttttcaatactcctctctaatcctaccatttaattaatctctctttctatctcctggctgtagatttcgttgcatcggctgcagcataagcgactccattcattgtactcgctaatttcttgtgctctttgcctttttgaggtccgtcgacggcagcagcactgatggcgtaatcgctagccatgcaaactagctgatgctacaaagcacaaagagaggcaaattttcaaagctgtagtcgttgatttaagattgctcgtgtataaattgtgtatatcttgatgtatacaccttagattgtcttgtttctcccattgagatgtgattgctcgagtgtagactcttggcattcgacatcattgtcatttttgttccttttatatgtggctgatgcatgtcaactaaacacaaaagcttttgtttttgcctctgtggagcatgagtttcctagagtatttgagccgcagctgacgccgcgtggtgagggaggactctgagaagatttttgagccgccgtcgtcacttcgtcaccacacggagaagaaggattgggatgttttagatctggggtgaagcctggaatcctggacgggagaagaaagaacaaaacgaggggtcatgtgctaacttagcaagcgcggggggttttatgaaaacatatctttctttgatcacacccatcagattgtgatttgaggttctagattaagcgagtgcatgagtttacaggatacgttgtacggcatcctaaactcaaatgtaaaaagaaaagttatatcagcaggaatacattcacaccattttctttcttcacttagagggttaccaacgtcaagattatttgatcatggggaaaatctcatcttcttgatctttaacatttcattttctatttctcaaatgattgatacatgcaacattgtttctggaatgtaatgtattgtgaatgcttctctgatttaaatattttctataaaatttcttattaaatgttaggaattgtgagatcgaaaccaatcactctgtatttgttttagctagcctttacttggtatgaattaattagaattaaattacataatgctttttgtaaagcccacaatgcatatccgatccaactaccataaaattttaaaaagagaccctagaaagtctttatgttccaacgaccaaataaattattttaatttttttgcattctagtatatatattgtttgttcctatttaatacaccctacggctaaaaagttaaggcaaagctaagcacattgtgccttctcccactctgtatatgcattattcttaactccctgagtttggtctacgtactatatatctaccgacttctattgcattccgtcacgcatatttgcgcaagaaaatatttgggttccaaattataaaaaagttaattacaatttgttccagaagtaaatctaatggttgaaaataattggtcaaatatttttactttttttctttgaaatttctaaggttttttttctaattttttagacatggtgacttatgagtgctttacatcatgttttttttgtaattattattattgattgacatgtaaaggataggggctatgttcaagtgatgtattttatttttttaataacgacaagtatggttaatatggatcttgaattatttgtttaattataaataaaacaacagttaaaaaattaaaatcatatataactttttaaattataattatttagctatctaattattggttggtttatattatgttgttatttaaaaatagaaaaattacagaggaggaaattggacaggagaggagatatgtgtatgtacttatggcaaagggagagtttgggagtttttgttcttttagatagatccaattaatgggttgttaatgccaaaatttggtatgcccgaagtcatcatcggcctagagtcagtatcggcttcagagtcttagaatcggccgatgggagttgtgaaatcgccagcagttgtgttcttggtagagtcggatcaattaaaggaaatttatctagagagtccgagtttaaggaggatacggcatggcaagtatatctattaattaggataagtttgttagttccttttatctttaggaaagtgtgtttagtgtcctctaaggactttatgttttccttttatctttaggagagtttctttcttgtcctacaaggactagtatctccccatgggtataaatatgtaccctggggtcattgtaagatatctctctcgatcaatataactactctcggcgcatcgccaccctctttcgtgaggtttttacttatcatccggcagaatttggcacctgacgcggggctgcatcggttcagttcgatctccggcgaaggggtaagttctacgttccgccgctggcgctggcgaatctaccggctatgttggtgttgttcaaggctgcatcgcttcgatctcttggatcgctctggtttggttgatatatttgcctacctgatatctcaattctatctctaattgcattgtgtttagagacgcatcggtttagctgggactgtctcagttaggtccgatcttctgtcttagccgatatatctttacaatcacaatggtgttctaaatagattttttatatccatcacattagacagatctatcggctcatcgggtattagattatcatatacaatctcgtgctgtatcggttagattcgacctactagattgttcttgataatataaatcttgttaagccgataggttcatgctagtgttttatcggggtgctagccgataagttagatttagccgatgacaacaaatactttattgatttatctaatattgtggattttatgacatcggacctccagccgatgtatgctttaaccttcggatcaatacttgttctattatatcatattgttagccgattggtttctactggattatattgctataatattgttatttttcatcatcagtcgatcgcctttatatcattatttacattggacatatagtcgattgctgaaaaccctatcgctatcagctagtatcggcatcggctggaattgctccatcggcttgtcagccgatcagcttattggtctactatttgcatatcttatccgttgcagggtcaaactgactggcacgcccgcatctcgttaacctttggacctgcactggagctaagcagatctgccaggccagtgtgtttttttttttgcatcaacacgggttcatcggtctaaattatctttatttatacataaatataatattaacaaacaaagtaatgtatttcttttaccacttaattattttaatcttattaattaattctttgtgtttcatattattctaatataagctacgtgttgttaatcgggtgtttaaaaatctatatgatatccccttaaaaatatgtctcaagtgaccaattaatagctagtccaaagcaataatttttttacttgttaaatatatatagttatgatttgggccttcaattatatgacaaaatctaatatagtacgtggataaaaaatagctataagattcagataagatagttatgatataataatatgtttgtgtctaatacatctatactagttgcccgcttgcaatcctaatggtgaaatcatcctctttcatctcatccgtccatccaccatttcatttaatcttatccgtccatatgccatctcatcccactccaccgatgccaatgatttcggcaacccgggcgcgatgactcccgccatccccacgcgcgcgctactcactccctccggccgtcccagcacgattactccgcccccgtgctcctcctcactcctctcctccttgctctacgcctcctcgccgctgacaccgctgagcgctccgcgcgcccccgtagctccctacacactgccttccccacctccgctgtgccgccctccccatgacaccacttcccgctccgccccatgcgccggacgagaccacgccacggcgccggcccccacgaccgccgccgccgccgtagcagcagcgtcggactacgcgcactacccgaggctctcgccggaggacgttgccccgcctacccctgcaccctaccacgccgcggccgcccttctcgggcaatccctacgtctcctcccccgccggcggcgtcgcacccgcctccaagagtgcgttccagcagccaaatctgccctccgttgttgccaggattacttgcggtttttttatagctgtttcggatttccatttttgcagatacaatggatacggtgaagaatgttcttggcaagatggggaagaggttaggagaggcggctcgcaagacggagtccctcaacgcccgggactacccccgacggttccccctactgctggagccactgcggcgctcgaccagggacgccggactagcgccgacgggccactgtagcgccgagccaccaccgcggtcccacgttctgcctattcgcgcacgccacgctggtccgagtttgtccccgcctgcaccaagtttgtccaacgttccgccaaacattcttcgagatgcttgggaactagtgatttggggactacttcaagatggaggcatctcactcaggtattgaatcgttctagattccctgtttattcccattctcatgcaattgcggccgtgctgtgcgaatctaatgttgcttctaatttggactggaatcatggttggttgggttggcgagttgcagatttcaaggctgttcagtgaggaaaactgaggggtagatctgttgatgatttggggatataatggtgtagcccctgattttttgttacaacatgacagaaattcagtattattggatggattcacgcaatgcgctgcaatttgtgcagaaaaggcagtttttttgttgtgtatgatagatcaagtttattggatcagcttctcttcggaactccccattcgagttgttgtgttttggtatgtgggaagtatatacgcgattttgctccaagtttgtcttgatagaatttatctgcgctggcacacttgattcggcacaaagtaactttcttgctttcccatccccattagtcctatttttatttgtcaaatttttgccctgctaccatttttgctttactgactcatgcatccacaggtccacaacactgtgcctccgccgacaccgcagccagatcgaccagtcaagcatccactgtgccgatgtaatccccagtcaagccagattgatgggcagatccgatgcaccggccagaagaacgggctgctcagttgtaggtgagttaaactttgccatcttcctttgactcctcaattaccttcttggtttgctaggtgctccatgaaatcccgattagcaaatttgttgttttgtctaccaggattggtttcgcccaaaactgaagtgaaaagaatttgttggtgaaaaaagaagttcagaatcacaggttatgtctcttgattgcaagacaaactgattaactgtgcttgcaagggtgtttgtagaaacggcttaaccactatttcttcccaatcctggtaacaagcaacagacacaaggtaataacctttggtgccagatgctgcatcacactcctgagtgagcagcaaatgtttgacaaaatgcttcttaggtactgttactactcttgcatgctatttgattctttttttccaggcccagttggcagctaaactagtattgtttacaagtcaaagatatatatattgcagagaagatctttggtatgtgtttggccttttatgttaagcgataaatgacatgcaaaacataaatttcaggtttgtcattactcaaatacccattgactgtatgcgttgtttcaagttgcagaaccataccattgtcctttacagtatatctaatcatactttttttttgtccattcatactccatacaaactattctcaattctcaactaccaatgtcttcatatggatgatcttcagttgatgatcttgctaatttaagtgtcgtgacattatcaggctctaaggaaggacatggcgatctgcgagagcagcattgatattatcaaggtaacagcggccagtgtagtgccggttaatcttgtatgaatacagtctttatatatgcacactgccgatgtagtactatgtctctatgcatgcttgtaacaatgcctaaaagaccagggagaggctatgcagagggattggggaatggggactgccaattttctacattgataagtttagtgtttcccctggaagggatatggcagggatattcacaaagtgcagaatacgtgattcagttggagaaaggcaacacatgaggaagatggtttgcataataaattatcttaggttaaactaatgtttttttctgatctggtgttttgtaccctcataaccatctagctgttgtaattcatcaagtacccatgttaaagtggttgtaccctatagcaacctagcagggctttacattttgttctgtgcaaaagttggcatggagtaagaaacagggttatgtttacaattttcaaataaattattccttaccaaggcattcccttcagttttgttgcccacatggcacatagggaacagttagaaattgtaagaaattttatactgaacatgaggaaattgtatttctcttaagtttgtctgatgggtatattgctcaatcaaaggggctgatcaaaaaaccaaaatagcagtcacactttgatgcatgaatattactaccttcgtttttaaatatataatattattgacttgtaggacatgatgcttgactgataatttttttaaaaagctatgtatatttgtgacttgtttcattaccattaaagatacttcaagcgcaacctatatttttcctgaaaagtatttcattgcaagatttgggaggatttcgtaggtactaaatagcaaaaaagaaaaaaaagctatgctatgttatgttattcaaacatataaaagtgaaagtatattgattatttacatgtgcgtcctatcttttgattatatgccactgtgaatttgattttcgaaagaatgtaattttaatataggtcacgacgtgtattgcacgtgcacaattttaaaaaaatattgccttaaaaagtcaatattgttctatctttgtatatacattgccaatatcaatagaagagagagggaaccgaatggatggagggaccgataagggacgtggcccacgtaggtctttcaattttttaataacaaaaataaatctaatgggtccaccatgtttaaaggtaaatcaatggttgtattacgtggtaatttaggagcgtttgtaagagtgccacgtgacggtttatgagtatttataagatgtttaatggacttttattatataagagatatacgactgggcaattaaagcctcttgcactactgcagaaaacacaacaacattgcacgagttcaccccaaccattgacggatcacgataggtgtggccgtcgttgccgagcttgccatggttacgacactacagctctaacttcacaaaactcggccttgactcaacagtatcacatccctgtatatggctgccaccaccaaagcttgctgcatttcatcattgctaagtaatctaccgtcaaggcgaggtgcaatgccacgtatacgaaacaacacaatggaccatataatataataaagttcaaacacgttatttttcatagttttacattatatataatatatacatgctttacaaatatttgcgaaaatatatattccccgtaggttgaggcgtgccaccgtaccgatggcgcatggccgacctaaggggtggtggcacagaaccaacgcatgtgaccgcgtcgctcccgcacggcacccgcatgccatcgcggcaatgcaacatgtaggcagtcggttctgcatgaccgatccgcggaatcatgttggtccagcatgaccaatccgctggaccgagtggtttcgcgcgactgattcgcgggaccgcccctcccgtcggtttctttcttttgagttgcaccgatggcacggcccaaacccgcacgaatgtatatttccgccaatattttaaaaacaacccgaaatattatgtgtatttttcataattagctggaagctctgacttcacttgctccaccgtcccatagcttatgttctttaaaaaaaaagataattgatccataggccatatcactctcggcccaatgcctctcctgccatatttgctcttctcctgatcattcgcctgcgtgttgggctaattcgttctggaaatattcctcctgagaaaggggttaatgactacctattggcatatacgtacaacttcttttttccaaatgcgcaaacaccttttctacgcactatgtttttgtttttgtgagtgcaaacttttttttcctgaaacataaaggctcatcaccctataagtaaatttgggtcagtatattttgaaatttacgaagtcaccacaagtgcctcagtatcgatgggtacatcatgtaccactgaaaaatagttagcaataaatacaagcatatatatcaaatttgtgactttaatttgagtgggtaagtttcaccggcaatctaactattttagggtgtgtttggttcacggtcaaggttggataggatatggcgattcatattttactcgatatggcgatccagttttttgtttggtagagtgaatatggcgatccagttttttgtttggtagagtgaatatggcgattcagttttttgtttggttgtaggaatgaagatggatttggtgatcttttttttggttaagaggagtaggatggatgagtggttgcaatcacctcatcattagaggtggtgagtatacccccttcaaattcaccaaacccaaacattatcaatctactgcaaaataaaaaatctaaagagaaataaaaaaatcacaaagaaataaaagggaaaaaggagaaaacagaaaaaaggaaaaaaaatcacaaatcttctcgccgcctcgctcctctcgtcagccgccacccgcctcgaccgccgcctcgctcctcttgccggccgccgccccgctcctctcactggccgccgcctcaccttctccagatccggttgcttctctcgccgctccgcctcgtcgctcgccaaccgccgcaacgctcgtctccttccccacctctcgccgccccgcctcgtctccttccccaccagccgccaccccgtcttcttccccaccggccgccgcgccatctcctttcccaccggccgctgccccgtttctcccagatccagccatcgtcatcgtctccatccccaccggtcatcgccatggtgcaccggccgctgccgctgtcgtgcacttcccgctgccgccgccgccgtgtaccgggcgctgcctcacttgcgtcgtcgtcgaggtctcgtggtgaggggtgacgcgacccatgttggtcgctcgccccgctcgcccgggcgcccgggcggttgcatccggccaaatcggccggatccccccgatccagcatctaagaggaatattcctcttcgggccactctatcccatcccccgcccaccaaccaaacatccacaaaaaatgggccgccatgtcctatccacccaaatcactccatccaaacacacccttacctatgctcacttcaccacctaacttaaaggtggaggcacatcgatagatccgcgatagtgtattatagctagccaatcttgtagattaataaataatttatgcttagtaagctacaccttgataatttaaaaaacataattaaaacaaataatatgaaatatgtggcattgttggattggatgcactaaagaataagtaaaaaaaaggaagaaaggagtacaacttagggcctgtttaaatcacttggcaagctttttcaccctatcacatcgaatgtttgacacatgcataaagtattaaataaaaaaaactaattatatagattgcgtgtaaattcgagacaaatcttttaagcctaattgctccatgacttgacaatgtggtgctacaataagcatttgctaatgacgaattaattaggcttaataaattcgtctcgcagtttacaagcagaatctgtaatttgttttattattagataatatttaatacttcaaatgtatgtctgtatattcaatgtgacacggtaaaaattttcactcttagatctaaacacagccctagtgtttgtagactccattacatgtccaaaacatgcatgtgtcttccatgtgaccaacaaagatacatgacacttggcagagttaacaagcatgacgggatacgtcatatgtcgcatcctaacttaaaaggatgaccatgttaggtgacaaagataggaaaggatgaattaattagtactagaaaaatttgttagatgccgtgctgatcgaggatacagtacacatgatcgacttggactgatgagcaagcaggtgcatttctctcgtgcgtcgtctgtgctttgacacagcgaacgaccaagagttaaaatggattaagttagactgcatagtctcaattaattccaaacgcgcctttcagtatgagagataaccttttctgctttcccggtagcatatacaggttgctagttaaattgaatttcaccagactttttagttctgaaaaagtatatggctgatcgtgccatctccgcgaagagaagaattttacaaaatgcatgccatcgcgatcatcctcagtctttactcaaaggaagttgagacatgctattcacgaaaaatatatactcatttaatttcgtttcaaaatatactaacctaaaactgaataagacacatcctattataacgaattcgaagaaagacttgcgtagattcattgtactataacatgtcttcaaatctaggttgtgatattttgggatatagggaggagatcaatatacaataattatcaacgaggttatatggtaaaataagggcatggaagggttgaaagtgcatctaggcccctaatgattttggtgattaattataatgcgattagagaggactaacatttttatgtaagcaaatgtgaaggttgttatgtcctcaatgagttagcgtaatgcatatcccgccgaatacgttgatgtgatgtgatgcggcaaatgagcaaatggtatggtgtacgttttcgttttcttgagttattaggaaagccgcactattaagagggatgatgcattgacttacgaggagtgatcaaagtgctcaaaaccttttttaaaaaagtgtttctcctcagtttggtgtgttctggattttttcggagttttccgaaactcattttcggactttccgaaaacacatagaaccagattttcgcttctggaaattttcgaatatgtccgaaaggatacagaagagtggcgcacggttctgatgatttttggatatgtccgaaaattttcggaaatatccgaaaaatttcggggtcttcatatatcaccccgtggacttccttctctctcctttccacttcttttccccacgggttgcctccctcctccctccccaccggcgactccccggcgatctcctcctctccggcgacctcccgcgacacccctcctctccatcctcgagggagcacgtttggggcactttttgggccctacattgttgatcttcaccatgttcttcccgtgttcttcgcgttcttgaggtatttgtcctacaatcaaatccctagattcctcaagttttctcttgcgatttcctttggtggagatgttcccctagtgccataggccctgcatattcaatttcacaagtttttgttggcggatttgtgcggcatctgagttatagggttcggccggaatttttcggacttgtccgaaaatttttggatatatccgaaaattcctggccgacccttatcacttcggatttgcatgtttcttgctctcaatcacttgtttcttatctctttggcttccatacctgattccttgtatctctattgtttgaaggatgcctctccgcaagcaaacctcccacaagtccaagcgcccgagggatcgctcttccactccatcttctcatgatgattcagacagtgattggtccggtggagaggatgcggttcctcaggttgcgcgggtggctcggcggtctactcatgctcatgatggtggtggtgatggtgagggctcttctcgtcaaccgcaaacgccgccgcaccaacccaatgtccccattgggcctctccgcattcatacccccgagagggatccggcggtgattcaccaagtgtatgattggcggcgcaagtctgaggttgttgctcgtcgtcgggacgaggatctgtaacatcctggcctagggtttaataggattaatagaatactcatatcaacaagttacaacttctttttcggaagccaatctccgaagaactccagggttaagcgtgcttggcctggagcaatttaggatgggtgaccgaccgggaaattcttctcaggtgcacacgagtgaggacaaagtgtgcagaaaagacatgtgttggcttgtgagggcagtctatgacctatgaaagctatcagatgtaagcgggcccggcctgggagaggcgggacgttacaaaacccgcgtggtcccaggtgggacccgcttgtcggcgacccggcccaccggctctctctctcccctccccgcccccgcgcgcgccttgggccgccttcttgggccggccggcccattaagctcggccgagccgccccattctcttgggccgcgccctagccgcccgagggaagtctaatttccctccctccttcttttcttttcttttctttttcaaaaaggatttaaataaatccttttcctttagaccaaaaatccaataatcttagaaattcaatatcttcccaaccgtaagtccgtttgactccgtacaacttccaaaatttcctcaaatctcgagatctatctgatggcacgcttagaggtcattaatagggctttattttcgccgtttgttgagttgtcccgtttcgcgtgtagtttcggagcccgaagacccgcagtgcgaggatttcgaggatcaagctcaagatctcgagcaaggcaagccacctttgaacatcttgagcctatatttgaactaagttatatttcttgcaaaatattatgcattgctaggattgcacttaatatgtttgccccatctacgaggcagatcggtgagcatacctaacttgttgcatttgatccttccattgttaattgttatatcatgtttccttgtaaccacctggtcacgcctcgatattcgtgcactctgtgcgagtatcgacggtcgccttcaaacttaaaatatgataaacatcttgggtaaaacttggtttacaaaacgattggaaaacccgacgcctgggtcggtgtcttgtgaaagaaaatgagttttaaaaataaaactcgcgacacaaggccattcctgggcggaatgcttgtgcggtcgcatttaaggaccgattccttcggaattacatccgagcatataatagtgcaaccacatgggtggaataggacactcctggctgagtaattagctaatcaggggagccttgatgccgagagacaagtggattcgccggggtggtgtcggggaggacccctgggcttcctagcacagtatggtctgggacctaacctgttgttggtctgggacccctctcgtcggcatatggtaaacctgtgtcggctttggaaatgccttgtcatgaaagcttggaggtctcccgacgtggctgatccccacgggctgggtgatccgggttagtaatgtcgtgtgggtaaagtgtaccccttctgcagaggttattaaaactgttcgaatagccgtgctcacggtcatgggcggatgtgaggtgattcctagcgtagttttgtttgactactgccttgtgaaatttgctgttgtggaatgggtttgatgtttggaaaatctgcgactgatgggatcagccaggcccgggtggccgtttgaaagctgttggccgggtgccaatcttgatcgattcaaaatactgaaacattgcacatactccgaccggacgagacgcactgtctcatccgtgtcgtttgagaagcactcacttagttgtttcagaaaagagtttaaataaaatcaattgcaaaaacaacagcctttctttgaagcctgcattaaacacttatttcccatggcttgctgagtactcccgtactcacccttgctctatataaataatccccccagttgttgaagaagatgaagcggatcccgctgacgaggagttcttctaggagcaagccggctacgatgagttttagggtttcggcctagttcccaagtgcctgtgatgtttggtccaagtcctggcttccgttccccttttgtaatgcagttgtgagctcgggatctgtccgtagcccaacatgactgtactcctactctataataaagagacctctggtgctgtgatattctgtcttcctgtgataccagcactgtttcctgggactggtatcgattaacaggttaatttggagcgtcacgggctagttccggtcgggactagttcagggcgtgacaggatccgcgctcccttcgccgcaccgccacggatccgcggttttggactctctttcaacaagacttttatgagtctgtaattaagtccaaagctcatcccactgttcccatgcaatggatcaattgggaggagttgcaggcacacaacgatccggtgatcaactctgtgattgccaattgtgatctcatgggtatccgctccttcatgacattgcagcaaaattggtgcaacgagatcattgctcagttttatgccaccgtatactttgatcgctatcgtgccatgcactggatgactcaggggtcctggtactctgtttcttatcagcagttggctgagatctggggcttccgtcttcgttctttgctaaaccttgatgaccttcataatcttcaaattcctgccaacacagacttgcttccccgttacactcgaaatgatccaaatgtggtgttgggcaaggtcgacggcctcaagctatactttgcctatttgaaccggatgtttcgccggtcttttgtgcctaacgatggtgatgctagcagcatgaaccatctctctaggaccatgcttctccggtttgatcctcctcctcatcgcttccatgtctatcactttgtgtgggaggagatccgcatggcttcaattcagtacaagaaggggttggtctatgcccctcacattatgcggatgatcgagactgtgactcagctccagtttcgccatgatgtgactcattctcagcttcacttgcgccttcttaaggccccccgctcctcagctactcgggacgtaccctcctcttctactcagccgcctcctgctcctgagcgccctgcctctgtggctcgtcgtgagccatctcccttattccgcattttgcggagtctttttggtctttgctccgcggaggccaaaaagaaccgccgattgcggaattcggcgaagaagacggctcgtgatgtcaagttcctaaaggcacggtattatgaggaccaccacattgatatccctccttctcctctgggtttcgaggccgagcccgatgagccagaggatgaagagattgaggatccttttgccgggttgccttccgacttcgacttctttggatatggccatggctatggctaacctcctccaccacctctcgaggaccctcctcaggcgcccttcgcttgagtcgtcagctcattgtcctctctttttggtgtcttgatgccaaagggggagaatatctatcatggctttagtttatctatcttgtccttagcgtcgagcactgttggtttttatctgtatgagacttttgtgttttttatgttaagtttaaagctttgtaagactattgtttaattatgaatgcttgtgatgtaatggatctttttatcttttaaagtggtgcaatgccttaccctctttatatggtgcttgtgatgagatgtaattattcctttgcatgcgatgtgttggatgtaatgagcatatgtgatatatttgttctcttgtgagcttcaatgtggatgcaataatttagggggagctctctacttgcttttatgcacactcttagggggagcttccactaaaactttgtaccaaaaaccttaaattatattcattctctcttgtgttctaatc

SEQ ID NO: 24289 - DNA, 42762 bp, Oryza sativa
ccccccccccccccccccccgcgcccggcggccgcccacattttggctttccccgcttccaatccaacccttatcccccaaatcttcttcttctaccacgagcccagctgccccccccccccaagtggaagccctcacctactcacatagctaggagtactccgagagagggcggcgacaacaacgctggcgccacagatgacgccgagtcggggttcgtttcaatttcaaccaaatttcaacttttccatcacatcgtttcaatttcaaccaaatttcaactttcaacttttccatcacatcgtttcaatttcaaccaaatttccaattttgacgtgaactaaacacagccaacttttccatcacatcgtttcaatttcaaccaaatttccaattttaacgtgaactaaacacagccaattttaatattaaatcacccgttctacagtacttctgaccgtcctctctgctacacgtactggcctgctgtattgattatctcctctggaattttaaggaatttgattatctcaattttcaaactgaggaattttaaggaattttgtgaaactaatttaattatgtagaaattcctgtattgatatccgacaagagctgagagcacacatatatatttaatattaaatctagggaacatgatatatactggtaaatatttgttatagtaacctataaatgtttgttcacaccagctaatatatcatttcaataaagtaggaacatgtattaatctataaaaaaaccccaaaaatagtggtgagtagtgaatgtgtgtcaccacccagtacccaccatcactgccatgtgggtcttccaaacaataaggtacatggaagtttgcctcttctccaacctcaagccatcgaacagagaaaatttctttagaagctgggtaaaaatgatgacaaataatattaccaaaagattttacaatgagaataatgccaatagacaatagaatgtcacagacacggtaataaaaatgacggtaggcacataataaataatttaattacactagctagcagtggcacatccgaaaaaccaacatgaaataaaaggaaaataagagaggaaaagaaaaggcaagcagaaagctagctcatcactttattccagaaacggtacagtgtagtgactcgctagcgctccttcctcgggtgaaataatgtcgtcggtgcctcaaccgtgcagccagcaaatgctcggtctccagcgatcgccgtcactggtttgtcgctggtggcatgtgcggcggcttgtgcttgttcggcggtgctataggtttcggtccaggcttaggttcaggtttcagtttaggctttggttctgggtatggtttaggctctggctttggttcgggcttaggctttggttcaggttcaggcatcggatgtggttttggctccgggtgtggcttgggctctagctttgggtcaggtttaggctttggttttggtcctgggtgtggaatgggcttcggcttcggcaccggtttaggttccggttttggctttggatatggtttaggctctggttttggttcaggctttggctcgggcttcggttcaggctctggctttggctctggttttggttcaggtttaagcttaggctcaggctctgggtgtggctttggctcaggcttcgggtgtagcttaagctcgggtttcggctcaggctttggttctgggtgtggtttgggctccggctttggttccggttttggttcagggtgtggcactggctttggtttgggctccggtttcggttctgggtgtggcttaggctctggcttcggctcgggtttgggccccggttttggctctggctttggctttgggtatggctttggttctggttctggttttggttcaggtttatgctcaggttttggttctggctttggctccggtttgggctttggcttcggctctgggtatggctttggttctggttttggttcaggcttaggctcaggtttaggttctggattaggttttggttctggctttagctccggtttcgtctctggcttcggctctgggtatggctttggctccggcttaggttctggctttggctccggttttgattcatgcttaggatgaggctttggctttggcttcggcttcggctccagctctggcggcttctcgtacatcgcacggccctgcttgctcatgaagcgggcgccatggccgagtccctggccagctgccgccgcttcatcaactaaagcgctcgccaccgccaatgccccaagcaggagcacggcggcagtgaggcaaggagagcgcctagccatggctggcaagctaagctcctcctcttcgcttatcttcttctccctctctcacttctgctgttgtacgtaactgaactgtgagcttgtgccagtggatggaaggattgctggggttttatagcccgggaaagccaaacaatgcaagcaggtgtggtcacatgtctccatggcaccctgcttttgtgatctctagctgcttgccagatctcacctagtatcatgcctgcctcccttccaaatctgactattttactcttcttcactttttactaactgctaaccctactttttcctaattaatcagcacctgttctgattaatcaatcggttacttgttactttaatgtatgactagacaattagtcttttgttggaacacatgaattttatacagctttggttagaaactgaagtagtagtaattggtacgaaaagcaagtaaaattgtttgagtcatattcagcagcggagcccgcacggcaaacaaacaggggaaatggaacaagtgcgtaaaatagcttaggctaggtgcagcagaagctagcattgcaggagcaggagatggacggacggatcgatcgtcaatggacatcgccggtggtgggtcgccggaaggacagcagccagaaacattaacgtgggtgaaagtgtccggccctcgcggccattgggcctgttctgcggctgcgtcgtagccgacaccaacagtgccgtgcgcacacgacgcagccgtagccatgccgaacaggcccatattatcttgagaattgcatcgaactgaacacattagattttttatacactatattaacatcgacactgagtaatttaaatgataaatatgatcaattacggaccgatccagcgttgtttttgaaaagatgctaccgtccgttttcagctctaagactacccgccagacagaatctcccacggcttctcctctcaagaaaaagagtattggtccacaggccatacccactctcggcccaatgtctctcctttctcttctcctccatgttgggcttacgcggctgcgtgaatgtttgcaggccatgcatgcaaatcagccgacaaataaataaattcagcatgtcattggtggtacgctatcttttcttgaaatattcctctttaggcctcgtttaaccccataaaaaatgattgaagtagatttaagggattctacaccataacaggtacggtgcacaattaaccctttccaaatctccctcaatcgtcctgagtggggcacgtaggcgttcaaataaacacgtccacacactcacccatatatgatatatatgaacgtgtacacaccttatttgctataagcacctttgaaaactagatcaacatatcttgatatttataaaacaaccgtaagcacgttgttggtgatggacgccgtctattactgaaaaaataattagtcataaatatgtgtaactgtgtcaagtctatgacttaaatttttagtagacatgttacaccaccattaacctaaccagttgagttattctcatttcgctgcctaacttaaaagatggagccgcgcgttgataaatccacgatagtacgctatagatagccactctagtatatttattaataaattatgcatgaagtaagctacccctaataatttaaaagagatatataattaaaataaattgagatgaaatatgtggctttgttgggttggatgcaccaaaaaataagtaagaaaaaggaagaaaggagtacaacctagtgttggtagactccattacgcgtccaaagcatgcatgtgtctgccatgttatcaacaaagacacacatgacacttggcagagttaacacggcatgatgggatatgtcacatatggcatccgattccagaagagaaaaaaaagatggtagtgttaggtgacaaagatggggaaagaacgaattaataattaggaaaaactgtagatgccttgcagatcgaggatacagtacacatgatcatcgacttggactgatgagcagcagcagctggtgtgcatttctctcgtgcctctcgtctgtgtttgagagcgagcgaccaacagttaaaaatggattaagttagactgtactgtctcaattaattcaaaacgcgcgtttgatcagtatgggagaacctttatctgctttcccggtagtatatatagctaggttgctagttaaagtgaatttcaccagacttttctttttagataatatttcacctgactttttagttctgaaaaggtatatggctgatcgtgccatctcagcgaagagaagaattttggaaaatgcatatgccatcgcgatcatcctcaatctttactatcatacccttattccgcgcttttcctcgaaggaagttgagatatattattcacgaaaaatatatactcctttcatcctaaaatatagtaacactcattcatacgtgaatggcaaacctgaagtattgacaccgttgtttgtgtgttcctaaccaggaaagtgtggagctgacttgaagaggacggcacggtagagggtagagccttcttaatgatgcgccctatgaccatagtatatgagaaggcgaccgacataattataatatgtggtaaggaataaatagaggacggcatcacatgaacgagtaataaactaggaaataaccaaggtagagacggaagcacccattggaagggtgagaggtgagtggccaagctatgagctcatgacaccccatacctagagaccgggtctatcatattaatcaacagccaaccattaactcatcgaatcaatcaagtattttcactactacgggaaactaaaccggtcggttgagaaccttgcataggtgccggttttcataactggtacatagtagacgacacagacgagagaaatcaaaggtgtcagttttgaaaatggcacctttgaggtcccaagaataaaaaacaaaagaaactcgatgcatcggctcaaatcccaatcacccataagatttccatctaagaacaaaatcacagaattaagaacaaaatcaacattcatgaacaaacatctaagaacacaatcacagtatcaagaacaaaatgagcgtccatgaacacacacaaagaagataccatcgttgctgttgttgtcgggcgggccgcccctgtgccgctcttcctccttgtcatggtggccagatccagctgtcgttgagctctaggcggctggatctggcggtctctacctccaagcgagagaaaccaccgccatcccagcgacggtgaggggaggaggagttgcagctccgaagaggcgaggagaggggaggagagggaagcaccagagccagaggggtggcgccccataggaggctagatggccggctgctgaagagggaggtgaatagagcgggcaagagagagggaggtgaagggcgagagagtggataaggacatgctccccctccctttgcactaaaaaactggtaccaatagtattggtgtcgacttttctctagaacccacacctatagttgcttaaaagtgtcgactctatatttttttttggttccatgaaggtgggaaaagcgtcaatttatgctagttttaaattgggaagaaagtttgaaatacacccttgattattgggtgagtacaaattaacccccctaaacttgaaaatcagacatccttgaccctcaactatcaataccagatgaattatcccctaactcaattcggcgtgattttggtttcacgttgttgtcccatcagcaaatcttttttttaaatcagtggggcccacatatcaatctctcaccctctctctatccctcacctatctatctctctatactctatctctctgtctctctctttcaaatatcctctctctcttctccctccctcaccttcatctctctttatcaaggacagcggcgggcggagctcaggacggcggacaggactggcggaaggcggagcttgggacaagcagcggcacctctagctctccgtcaccgagaggcagcggcagaggcggagctcgggacgacggaggggacgggcggaaggcagagcttgggacaagcggtggcacctctatctatccatcattgagaagcagtggcggagggggagcacgggaacagtggcgggcggagctcggggcgagaagagctcgagacggcggaggggacgggtggcaggtgaagcttgggacaagcggcggcaccccccccatctctgtcaccgagaggcagcagcggaggcggagctcgagactgccgaggatggtgagcggcagaggcggccatctttcttttccctccccttctatcaattggtttggacgacgagaaacggagttggcgctgcatagtggggcatgtcacgccctgaagtttcccacttttcttgctttaaaattttgttaaataaatcgcccgaagaaattgtttaaattaacctagagctaattccttaattaatgaatgcaattaataattggaattggcattgtgggatttttcttgggtcccacatgtcgtaatatattaacaggttttttagtagaattcttagagccctataaataattttaaccatttaaaattcataaaccgcaataaagtatgacaggaaaatccttttttttcttttcctcctttttccctcttgttgggccatcggcccaacctctccccgcgccgccctccttgctgggccggcctaagcctccccctcctctctaggacaccgacaggtggggcccacctgtcggtcgtccctaacctcccaccgcccacgcctcggcagcaatcgccgctgccgtccacgctgctgctccgcgccccgcgctcacgcccacgtcgccgcccacctcttccacctctcccgctctcgcatgcgcccgaaaatggatgggattcgatttcgaatcccacccccctctctctttcctcccccacgttaccggccaaatagggggccaccccggctgtttccgcccctcccgcgcccatcaaatcactcccccaagcctcctctcccgtttctctcactcgccacgccctcccatgcttcttacaccgtcgcgccgtcacaccaagctccgccgcccgccaacgcactccggccacgcgtcgccgctgctagcgccatcgccacaccgcgcaaccaccgccaccagctttgccatcgcgcgagccacctcggccgccactcggttgccgcaaatcgccccggagctccgattccctcgcgccgccggtgagctcgccattgtctccatctccgattgtttcgtctcgccgtgccgcggctcctcccttcaccctaaccccttcaccgccttttcctaggtcgcaccgctcccgtgcgccgttttccaaagcgccgccgccgctcatcccctccgctcaccactatcactcgccgtcatctctccgcacaccggccaccccacggtgaggaatcccctctcctccttcttttcctctctcccatgagcgccgccgctcctccacgcgtgcgtcgtcgtcttcggccgccgccgccaccttttcgcgccgtccgccgccgcctcccgctccgccggtcgccaccgtcagtggctgtgcaccgccaccgctccccatggccagccggccagttttgaggccgagcagaaccagacagccgccgccgtgccgtccgatcggcctcggggccgatctggaccgtcgttcccgtggaccggcggtggccacccgcatggtcctagtccacggtagaccagcgccctttgagccgctgacatgcggggcccgcttgccggcgccggaccccctcgctgacgtcagccctgggtttattgtgcaataaaattaattaaggatttttctttattagtaaaaacacagattatcttctaaaattcataagtaattcatccgagctccgtttaagtccattcaagtctcagtaaattcataaaaatccctagaattcattaaaaatggttttgtttcctgtttcagtagtcttatagcatgttttgctagtgtgctttgtttgtcgcataggtttcggtcgtttcgtcgatccacggttccacgaagacgttgctgtggtctcatcagtgcgagggcaaggcaagtcatgcattacaattgatcatattgtacccaatttacaaatatcctgcatttctattaaatgttgcattcttttacaatatcatgtgggatgggtcctattactcagccattttttgtttacactatgccattgataacttgggtatcaaaatgactagatgttggtttaggaaatgcttagcattgcttagtttaactagtgcacaaatggggatcacattattacatagactttgactattagcatagctttggattggttccaccgtaatgttgttagttaattaaaatacactgaatggtgggctatgggtgcgtggttttgctggtcgcacccatggcaattaaggaccggttcacgggaaaccctggaagacttgccatgcttaccacaagtgggaatgggtaactgcttgacttgtagtatagctcgaccatttcctaggcaccggtgacaagggtgggcgtgatggagttgggtcagctggggtgtccggttgtccagctgctggattcaccgcggcgcatgaggggactgcccactgcctgttgagggttgggggtgaaaccttagcgtggtgtggatggttaggggagggttatgcgaagggtcttgtcacgatttccccctttgcactatcatggtgatacttcggggcatggcgacatgtgtggaatcgtgtcttgtgggtacagttgtacacctctggccagagtaaaactattcgaatagccgtgcccgtggttatgggcgatcaaccagattcaccgtggttagtcttaccccgagtttagcttagtgaactggtgtagttcaggtggttggttgggcatgtcgcaacgtggtgtagcgttggacagtgattggttaatatggactaattactgcaattgttttactgctttcaactactgtttttaaatgcctgctttatgaaaatgaacctttagcctcctttggatatatcctgcatcatacctcctcttccagtatgacttgctgagtacagtgggtagtactcagtcttgctctcttttcccacacaccagagcggaagttcttcccagttggagatgtctcagaaaggttggtttcattgctgccgttaaggatgcctgtggagtggagtcgcccgctacagaagtcaagttttcaagcttagctcgttttatcttttccgctgcatttgtaatctcttgtatttttgtaatcctggatagaggttttaatacatattcagcttagaaattctgattcgtgaatttctgggcgtgacagggcatcgagcggcggaggcggctcctcctcggcctctgccggcacacgcctcctccacgaccacctcgtgagcttgctgccaccgtctcctacactcggggatgctcacagccagcggcgcacggctcgtcctcggcttccgtcggcgcatggggctcctcctccggtccgtggcgtacaactcatctgtggcatctgagaggagagcggcgagcggcggagagagagagaggtgagagaggataaagatagagagaagagagatatgacatttgggcccatcgtttttttaataaaagaattgctaactggacaaccacgtaggaccataaccgcttgcaaagttgctcagcttggtacttcatctcatattgacagttgagggtaaaagatatctggttctcgggtttacggggataattcgtactcacccaatagtttaggggtgcaattcggatttttcccaaccgtatctatgagtcgtcttctattaaggattttgtagcagtgtttaggcatgaggcatcttattgtcttgtcttcgtgactaggctcgttgtcttaggtactcatcggttgcccatattccataaaaatccaaaacagcttattagccaataaaattaagttattgataaaacttttatatatgtattcttaacgaattaaaagctaatgctgaaaaaactaacttgaaaatattttaaaatcaactccaaaattaaatttaagaattcaaaatttaacttcgttttgacttattagggtaaccaacgggctcttacgtttattcgacaattcatttttgtcgttaactcactcaacgcacgtggatgcaccacgacactaattaactataattagttaattagccaacatgcatgcgtcgtgacatgagcaggctcggctaagtctttgcccagagtggtgtgatggtataatcttggatattttttttaccaagccgttttaaaccctcgagaatatatctcctcgtttttcttaaaaagtatttaaatatttatagaaaatttttgaaacaaattgataacggtggtggaaggactgagggtcgttatgatagtggatatggatgggcagaaaaaaaaaaccgaaccgaaataatcatatcgaactaaccgagaccaaaaaatttggtctgcattttcactaaccgaatttagatcggttaattctgtctttggcgtcggttaaccaaattgatcgaaatatatcattggccaaataatacagatgacatctcagcccactaagcccaataccacctcatccggaggcaaccaactccctgctgcaccaccacaagatcttttcatccccaatccccaccttatgcgcatctccgaagactgcaaattcccccaccgtgcggtgctgccattgacgacctgtgactgcgatgtgctgcccctgctgccgccgcatctcgcctctcaccccaaaaccaacaacccctgccaccgccgccacatctcggcgccctctgatgcatgccggccagccacacctcgtggaggccgtgcgcgggagctagagacctcgccgacatcggccatgagcaaagagatgggagccgcagtaacaacaacggcaggaggcgatgggatggatgggatcttggtccctggagccatctagaacaattgatggcagagatcgatggggagtatcgatttgcttctttttttttctttttcttcagaatcccatcgatctgctttttttttctcagaatcgtgctcgatttgctagtggcatcaaatagtagtgcatcatctgtgtgtttcctttaattcattgatcatgtacagattacttgccattcttttttgttgttcgaacttttgtaacggttagttcggtctatgaccgagaccgaaccgaactaaccaaagaccgaagtgctcggtcgttaaagaccgaattttcaaaaagaccgaggaaccgaaccgaatctctcggttagaccgtgttgtcgaaacgacaactatatacgtcgaaggatgtggttactcaacagtggttgggaaaatgaagtgtactaaattttgaattttccttgggatccccccattagatagccctaggggactatttatagccccattacaggtccttactaccagggtttaggttgtacaggaaaatttacatgattacccttacaaaaggggcatttacaggggtacataatgttataggggctcatgggcccctgatgggccgtctggcgatcgccggcctgatgggctggaaaggcttcctcagccctcgcgggggcgaacttgtcaaggcgaagtcatcctccttcggcagacagtcttcgccttgcacccttcgcctgagacgcctctggcctggcgctactcttcgccttgcaccgctcttgctccatagccttcgccatgggtttcggcaggtttggtcgaagagcctcatgccatccgccaacaagcccctcacgggcaagggtgagactggagcttcggccgagaccgtgcaaaccatgtggtatggtatgcggcgccccctttcgaccgatgctcctgccgaaacctacattattcctgcgaatgaagtttgttatttgtgcggctggtattattttgccgcgcttcgcctcgtgcgattgatggttatatatattcttttttcctgggccgaacggaatagtattgggccttcctatctttaggctttttactgtgccgctcggttgatgggaatttaccgtttcgcctacccttgcgacacgtggcgctttattactggtgggtaggcgaacggtcgcctgggcgggctatatattcctgctgctctttccttttcaccgccacacttgccattttaccgcgcgcgctctctttctccgtctcttcccttcacagcatctttcgacccctcaggcgttttgccgaaactcttttttcgccaccgaaaacgcaccgttcgccatggccccacgtacgccaaaccctacttcggcgaaagggccagatcccggccgagtcgatgacgacagcactgcctttctgggggtctctcttgtggacgacgtcgagctggcgaagctggtgagctccggagcgttggttaaggggcaggcttttgctccagggaaaaccgtggtgccgaaacctgtcgacaatcggacggtggtgttcgccatattttttgaggcagggctacggtttccctgcaacgtgttgttgccagagatccttcgcctcttctaggtggaacttccgcagctgagcccgtcggcgcttgttcggatcgccatctttgactgggtgtgccggacttccaggtttgagcccaacgctgagctctttggcgccatatttttcgccaccgtgaactcgaagacggtgattaccccggctggaacgaaaaaaacagtgttcgggagcgtgaacttcaacgttcgccccgagcggtccgatctctggccggtgaacgctgccatgtcgaagtgggaccgccattggatggcaaggtggttctaccacaccatccccttcgaggctagttctgaatcagcgaaagcccttcgatgccggcgcagggcgattgcgccgaaccggagacccaagatcgctgtggacggcgccatggaggcgcggtttgttctactgcggaaggtttgctcccgccttagctgccgtgacttggtggaggaattttgtatgcttcgtatttttcccctctcccagtcatggcaagtcgcggttgaacaaggcgaagaggtcgacggtttgccgaacctgatacttcctgagggggcgaacggtaagactgttcttttgctatatattgttgtgctttgttatttcgccttatttgacttttgacatagcttcacattctacttttacagtgttgaccctcgaccaggccgaagccgaagcccgcaggatgatcggcgatgtttcggtcgtcgagtatagtcaactgttaacgcgtcaagcggctgggcgggcgaaccgggtttacaatggcgaactgcctccccgggcgaatccccaaaaggccgacgacgaggcagggccttcgcgaaagcggatgcgtggacaagtgaagcttgcccccaagaagcgaagggttcctgcttcgtctgactccgacgccgacgacgaggatgatgccgaagaacgtgacggggaggaggaaggagaggaagaggaggaggtggaggctgtggctgataaggccgcgggtgaggcggtcgaagaccgcgccgacacccccgggtacactcctaccccaagtcctggtcacaacgaaaccagggtggagtcgaacagctcccccctttgtcggaaggatttggaaggggtgaaggccctagttgcgttctcttcgggcgcggcggcgaagggaggtcctgtcaaaaaggtggctaaaaagaaagggctcgtcgatgtcactcgcgtttttagcgatgacgagtcctccgacgggactccgacttcgcccgctggtcgcagcgtggatctttcagccgcccccattcctccacttggcgccgctggagtggacggtagtaccgccgcttaggcttcggcttctgcggaaaggattgtgatggccgcggcgaaagtattcggcagtcctccgcatcagccggttgactcgccgctgatggaggcgaagggaaagagagcggtcgctgagacatccacttcggaatattcgctcccagtaccccgcttcgcccttggcgacttcgagacgcgagcggacctccttccttttgtggagggggtaagcaatcttgtactgcccgccagcgccctgagcttgttcaccgaactgaatgagttcgacgaggggtgctctgctataaaaagcctagctgttcgggtacgtttcccccccgattttatctttactcttcctctatcttgtttttacaattgacacttgttctcttcgccgctcgtattctgcgcccagatcctcgcggctcactgctcaacggagcgaaccgtgcgagctcgacttgatgggttcaaaagccatcttcgggccaaggatgacgaactaggccgcaaaaatttagagatggaggcccttgcaaacacccttaaggaggcgaaggccgaaaacaagcggctccaatcgaaactagagaaagggaaggaagctagggccgaagtcgatcgcttaaaggccgaactagagaaagagaaggcccacaccgccgtgctcatagattattataacctcaccgagccgaagatggaggctcttcggcaggaggttcgcaaggccaaagcaagcgctgtagaggagtcgcggcggttttcgcaggaaatggtgaaaaccaccgagtccgcgcggacagcgtgccaaacgcttcgccttgcccttactgatatgggcgcgaaggtgcggggtgtcccctccgaagatgcctcagccttcgacttctccgaatggacctaacaggctggtggttcggtttcagactacgccaccgcatacggcgattgctgtgcacgcgtgtcagcggcctttaccatgggcctcctgcagcagttcggctacgagcacatcgccgagttccccaagtacgcgaagggggattgggaaatcagtgggcaagacatttcacctgcacttcgtgcgtggcgaaaacaattttggcagaaggacggccgctccgccgctaaggcgcgccttttggagcagctggcgaaagcggaggcggcggacatttgtgaagaggagggcgcggcggccggagggggtggaggcgatgcccaggatcacccagaggtgtgaggccctccgcccttctcttagattttcatagttttcttttggtgttcgctagatgtggcgaaccattgtatattcggcaaactgccgctaaaccttaaaaaaggcttttttgcatacttggactgtatgataattttaaccactttttaatgatcaaagtctttggcatattattatttcgctcattttgcattatgccaaaccttccccttctttcgcctattcttaccatgcaagatgtgttttgccttttctacactgtctaccagggggtctgccgaaaatcatgcattcgacccccttctgggagctggagaagtcaaaacgagaaatttgtggcattaaagggtttgccgaaggtgcgatgtccatttcggcctgtttatcgcgaaatggaaaaaaacggtcgcagctataaagttttcaaggttgccaactggctgcgggcgcaccccgggcgaaccttagaagattacgatcttgttcattcaagacgtttggaggatatggctcgcttttggcgaaaccatcagaagactaaacgccaggaatcgatctttcagcgtcgttacagtttagtctgtgtttcgccccctactcctcttaaggttgtgtataatattagtagtgatgacgaacctaattcgtccgaccattccttagggagggataatgattactggggcgaaaatgtaatttacttgtaaaatgaattgtattgggttgtaaaccttgtattcttcgattattttttcgaagctaataaagaacgtgctttatttccttttcgctatttttcgcatcgtcacactttgtgcttttgttaggtcggaacatgccggcccctttgcatatagtagcgaaataggtgtagtgacttcttttcgtcgttcgttttcgatctgtagcgttctgtgtcgagagaaacgcttttgcttttatgctgatcggtcgtaacgtcgttcggctatttattttccgagacaagctgttgcggtttcaacgttcggcgagcaatgcttcggccgattcgtttcgcccccctggtctttttcgctgatcaggcgtttgtcttggggtttttccacaaattatcaatcacacgaaaagaaataaaaagaaggcggaggacacaaagattttatactggttcgggcctccatggtggataatagccctacatccagtttttttttctttttctcttctcttttttcctttttttttcttgccgaaaggcttatatagtgccgaaaggcttacatgacagtatgtacatttttacaagttggcgatttgggtgccacccattctagacataaaagcgcttgagggaggcggcgttccaggaatggtcgaactcctcgccttcgagtgtcgctaggcgaaaagatcccgtcctggacttgtgtttgataatgtatggtccttcccactttgattcaagcttgccaaccgctaatgggttcgcctttttccttaggacaagatgaccaggcatcagctccgtgggtcggacttttttgttgtaagttgccgaagtgcttgtggcgtacttgtgcatgtgctcgagcgcttcgacccttacagcttccaagagttcgagcgatacctcgcgcccctcttcgcccccggagaacataacccttggtgagttagcccctagctccgctgggatcattgcatcatcgccataaagaagcataaatgggctaaacttggttggtcttatgggggtcgtccgaagggcccaaagaaccgataacaattcttctggccatttgcctttcgccgccccctcaagtcttttctttagtgcttctaagatcttgccatttgtacgttcggccgccccatttgactgtgggtgcgcgaccgacgcgaacctgatttctaggttaagcgcttcgcacatttctctgaacttatcagagtcaaactgcttgccgttgtcagtaatgaactcttttggcaccccgaaatggcaaataatatttttccatacaaacttctgtactgctgccgaagtgattgccccaaggggttcggcttcgatccatcgagagaaatatcccccagctacaattacgaattaatacccgtttcgcccccccgggaatggcccaataatgtccagtccccatctgccgaagggccatattggtgcaatgggctgcagatcatactggggcgcggcttggcttcggccatgacgctggcaactttcgcacttcttgatttgctcaacacagactttcatcacagtgggccaataaagtccttgtctaaatactttggaggccattgttcttgcagcctggtgcgcgccacatagcccttggtgtatttcctttgccatttcttcgccttcggcaaaagagatgcaacaaactaagggttgaagtaccccggagcggtaaagctgacccgagaccatcttatacttcgtggctctgagttgcaaacgcttcgcttctgcttcgtctaccggaagccagccagtttcaaggtgtttcacaaatggggttcgccagtcatatgagtcttcgcccagtttctcttggtcgattgtcatgacttccgagctgtccatgggcacacttggagcatgtaggacttcgaaaaagatgccaagcgaatgcgggccaccacaagcagcggatttcaccaaggcgtctgcttcatcgttttggtctctaggcaagtgttcgaccgttatgccggtgaagcatttttccatggaccgaacagcctccagatacctcttcattcccttttcttttgcctcgaaggatttgtcaacatggcctgctaccaacttggagtcagttcgaattagcaggcgccggactcccagtgctttcgcctttcttaggcccaggagaacggcttcatattctgctgcattgttggttgtgttgaactgtaatctcgctgcgtaccgaatcggcacaccattcggcaaaaagaggactgccgcaacgcctgcccccttgtgcgaccacgaaccgtcagagcacatcacccagaactggtcatcgggctcgggctcgggggcaagtactggtgtccattcagctacgaagtcagctagcacttgagacttgatagcagagcgtgcaacaaaatgcaagtcgaacggggatagctctgccgcccacttgctgagccggccagtgacttccttgcctcggagtatttcgcccaaggggtactgtgatgggactatgctttgtgggcctggaagtagtgcttaagcttgcgcgaagccattactagagcgtaagcaagcttttccatttcaatgtaccttgtcttcgctccttgcagtgcttcggagacgaagtagaccggtttctgtccggactctgtttcttggacgagtgcagcactgactgccaccggtgaagctgccaagtataacagcagttcgcttcctgggggtgggcttatcagagctggcgggctttgcaagtattgctttagctcgtcgaatgctgcttggcactctggtgtccaattaaactttcccgcgccccggagggtcttgaagaagggcaaacctctttcggccgcctttgagaggaatcgactgagtgctgcaattcggcctgtaagcttttgtacttcatgtacgcttgacggaggcttcatttgctggatggcatcgattttctcgggattcgcctcgatgcccctttcggaaacaaggaaacccaacaacttgcctgcgcggacgccaaaaacgcacttcaccggattcagctttatgcctgccgcgcgcaagctgtcgaacgtctcttgcaggtcgaacgcatggtcgaaagccttgcggctttttacgacgatgttgtcgacgtaagcttgtacgtttcgcccaagctgcttgccaaggaccttgtacaccagcctggcgaaggttcctcctgcgttccttaagccgaaaggcatcctgaggtgacaaaatgtgccgaatggagtgatgaaggatgttttggggatgtcgagcgggttcatgtggatctggtggtaaccggaatatgcatccaggaaactcatgagctcgtgtccagctgttgaatccacgagctggtcgattcgcggcaaggggaaatcgtctttcggacatgccttgttcaggtctgtgaaatcgacacacatgcgccatttgccatttgacttccgcaccagcactggattcgccaaccactccggatggtcaatctcttgaataacccccgcccagagtaatttttgtacttcggtcttcgccgcttcttggtgatcggcaaacatcttgcgcaactttttctttcttggcttaatatttggcttgactgctaagtgatgcatgatgagatccgccgggacgccccccacctcgttagggctccaggcgaagatatcgatgttctttttgagcacctctagcatgctctcaacttcttcttcgcctatgtggcccccccagtgatacgagctttgtggggtcggcatcgtcaatctgcacttttgttatcttgccgtgaggggtgggcttcggcgtgtgcttgggccgctcatgcggttcggtctcaacattgtgcactgctctgttgattatggctagatcgcgttttgaagcggccgaaggctgaagccccttgactactatcacccctgttgggccaggcatcttgagcttgagataattatggtgggaaatggcttcgaacttgttcagggttgcacggccgaagatggcgttgtagttgtatgggatgtcgacgacgtcgaacagtatttgctcttcgcgcctgttttctcctaagccgaaagctatcagcaaaagtgcttggccaagaacttgcactgcctctccgccgaacccccggagcgacgttggtgccggtgcaagagcttgggttggcaagcccatcttagcatatgcttcggcgaagatcacgtcggccgaactccccctatcgaccaggattcgtcggacttcaaaaccggctatctcagctgagattaccagtggatcttgatgcgggaataggactccttcgtcgtcttctggcccaaaagagatcagctggttcacgtactgtggcgccccctcacccgccgaagtgatgttgtggaccatacggatctgcatcttcctccgccgtttcgacaacaggcttggcggatcagctcttgtaatcacttggattacccttcgttgtgtatcttggcgttgttcggctgggggtatttgctcctgaactgcttcacggggtgcttcgacagttgttccttgctgcggccttgggtcttgcgcgttgccacgttgcctaatgtttcggcattgctccgtggtgtgcgaagagcattcgtgaaaagcgcagtagaggtcttttcggaccttcttgcgggctggctgctgatggttgcttgcttgctgggcgtcgaactccttgcgtagggcttgcacttcttcgacagccatcacagccttgcccgcccgatctgttctgaactttctccaagtcatgggggcttggccttgccttggcggctgtccctggatcgccggctaagactggcgaacagagaagggaggtggatcggcaatttgaacttgtgcttgagcttgagcagcggcgacggaggctttatcgtactcagcttgtatagcttgccgtcgcttagaatcctcctcgccccttgcgaacccgtcaatgatgcgaagtaggtgctcgagcgtctgcggctccttgttggcgatttttcttgttagttcgccctcaagcagaccggccgaagcggcgtttataaccgacgcctcggttatgtcttgaacttggcaccgggcttgcgagaagcgacgcatgtactcccttatcgactctcccggcctttggcgaatgccaagaaggtgttgctgcgtcttcggctcctcataggtgcctcaaaagttaaggacaaaaacatcgcgcaattgctcccatgagtaaatgctattggctggtaaattgaaataccaagaacgggcgatgccgtctagagcgagatgtattaccttcgccttggtattttcgtcaccatgagccgcttcgatcgctgactcgtagatggagaggaactccttcgggtcagtttcgcccgaataatgtgggacaggtgggaacttgaactggggcgggattggacgagtcttgattcccccactcagcggcagccccttttcgcctcccgccctgtttaccgcaccttgctgcgggtacggtatggcaaagggcgaaatcacggcttgtgcgtggagttgggccgcggcattcgactacccggctccaactggtggtacttgctgggccaccatggatgggtcaaagattggctgcgacgacatcatggcagcttggattggtgcttggtttgttccgaagcctagggttggaacttgctgccgaacggttgtcacctgagcagtgttgccgaagtcgaactactgtcctttactccacggcgaaggtcccgagcttggctgaatcggtggcaaccaattaggtgcaccttgacttgtattccccaccgggtgagccgatggggttgtacttgaaatgtagtggggttggttgagttgctgaaggaaagcttagagttgcgcctgcagagtcgaagccccttccgtcactgtttgtgtcacttggccaggtggttgatgctgctcggcgaagtacaccggcggctgtgcggctagtggtggagagggctgggtcaccacttgcggccggacttgaggtggggcatagcctgccgaatactgaaggattggagccgacgttgccttggtccgccttgtcgcctcgtatgcttgttgttgttcttacatttggcaaagcatgtcttggagccgtgtcatgttctgccgcatggcttccatgtcggcttcggcttgcacttcggggtccaggctgatttgggcctgtacaacggcgagcgcaatcggcgccgccggctgtgatggggcggcttgaggcaccaccagttggtttgtcgaaaggttccccgccctggtctggagtgcccttgccgccgcagccgccttcgccacatcggccgtgttcggcacttgcactgaggttgcgggggccgaagacagttgtgatggcgcgggggccgaaggcggctgtgatggcgcttgtccttctccatcttcggccacggacgccgaaggctctgctccttcctcggcggccatgtctggtccgtcgtcgctctccttccgcctgacggccttctccttcacgaccctcttcggtggcactcgctctcagtggtttcgctcggagtccccatggacggcgccagctgttgtcgaaacgacaactgcatacgtcgaaggacgtggttactcaacagcggttgggaaaatgaagtgtactaaattttgaattttccttgggatccccccattacatggccctaggggactatttatagccccattacaggtccttactaccagggtttaggttatacaggggaatttacatgattacccttacaaaagaggcatttacaggggtacataatgttataggtgctcatgggcccctgatgggccgtctggcgatcgccggcctgatgggccggaaaggcttcctcggccctcgcgggggcgaacttatcaaggcgaagtcatcctccttcggcagacagtcttcgccttgcacccttcgcctgagacgcctctggcctggcgctactcttcgccttgcgccgctcttgctccatagccttcgccataggtttcggcaggtttggtcgaagagcctcatgccatccgccaacagaccgaatgcccacccctaatggtggaggatgagcaaatggtggattaaagtacagtttaacaacgttctaaaattatctcagctcatgggataagaaagtaatgttggttggttttatcggctaataccggttagctagggaaggggtaaaatcctaccagatttcctttcctaacaggaaagaaacgaaacaataaacgaagggacaagagataaacgttaccgtgattggtgataacaaattttgagtcttatccggatcgaccccgagtctcaccagtgcaaataaaaagaaatgaaggcattgaggagaggtgacgactaattctctacgtgtaaattctgaagccctaaaaaagagcccgattgatctcaaacagtggaaagggtttatagtgcaaaccactcctgtgcaggtgaatcaagaaggacaacagaagaatcaaaagaaattagcaaaacttcaattcatctggtcagtaattatctcaattccgtatttagaattgatgatcatgtcttaagctaaaaaatagatcttgagtaaataatttcaacaagtaaacgccaccattaatgatacctctattttctaaaaaaaaaacccattaatgatacctcttgctgctctgccatcgcattggtcgcctaattacggttgcttaatttcatccaaatccgatccatcgctctcgatcgatgctgcctgctgaagatcatagcttgggatttgggaattgaagttggggcctacatatggtcatatgcccatccacgtacagttgcaaacatgctcctctgatttcctgccgggtccgtgtcacgcgtctacaggacaagcttgtgttgtgtgtggagtacacaaggacgtacaagatgctgtttatcattgtacggaacggaggtttatggcaggtaaacgtcgcgtgagtgacaggacatggagctaattcctgacgttaacagagttgattactatactacttcattttactttaactgttttaaaatataaggctcgtaagttttttaaggtagctttaacataaagttttgaatattaatatatttcttttactatcaacggctatataaatttggtatcatatgaaaaatacatttaaatgaatgtaataatgtcacatggtgcaaaacatataaattatttttataatacagcaaatgcacatgtacacacaacaccaccctcgcacaccctcgtgaacccatcttttaacacacggttaaagagacagaaaccaaccatacattcttaatttcactaaatttctattaaaacagtgtattcttgatttcataaaattcttataatcacccgtgctccctaatacatataaattattagttcaattattaattaaagtttgtaaattttgattttttttaataaaaaaacatgtggatgtcttttgcggtgggactagagtagtacagtagtgctccttcggctcctgaatggtcatttcttttttttgactcttgtgaatactctctgctgcattagcctgctgtatgattatctcctctgcagtctgcagtgtgcaccaatggcgagctggtcagtcatttacaacattggctgggtgtttcccttcaaacttcaaatttttccgttatttaaaatttttttgaaaaaatttaaaaacataagtcacgagtaaagtactattcatgttttatcatatcataacaaacaaaaaatattaattataaaaaaattttaaataagacggatgattaaaattggacgtgaaaacttatggttagactgaaatgggacagagggagtactagcaggagacagtggcaacgatgtgtttaccaatggggaaattatggtaccccgcactttgtcggtgtattctactagtaactaatagtagaatagtaaaatcaacaaaaatcaatgcaggtcatgagttaaaccgtgaacctgcagagggcagactggaacaaaccaggtacagattggattacccatgatgcttattttacgtactaatgcctccctctcaaaaataaattcattttctatcgatccaacgtatatcaatataaaaccaaaataactagaaaatccccactttatcaaatccaaatttaattatgtttctttatctaccctgatacatttatcatatacttttacaaactctgatgtactgattgcttgaaaaaagatattattttgagataaatgggagggaccaaagacttatgtagagatggagggaggagaagagagcccgtaccattttcactgtatttatgaagggcgctaattcaaaatgtaatatttaggataaacagttttgatattttagtgttggatagtactctctccgttttacaatgtaagtcattctaccatttcccacattcatattaatgttaatgaatctacacatatataatctagaagaaactcaacaggagcagtattaaacagaactggacagcatagaagatgcacacacatatatattattatttatatacactactaagtagaaaagaatgccacagacacggtaataaaaatggcagtagatacataagaaataatttaattacactagctagcagtggcacatctgaaaaaacaacgtgaaataaaagggaaaaaaagcaagcagaaagctagctcatcactttattccagaaacggtacagtgtagtgactcgctcgctcctccctctggcgaaataatgtcgtcaatgcctcaatcgtgcagcagcaagtgctcggtctccggtgatcgccgtcactggtcggtcgctggcggtatgtgcggcggcttgtgcttcttcggaggtgcttcaggttttggctcaggcttaggcttaggtttcggttcaggctttggctctgggtatggtttaggctccggttttggttcgggcttaggctctggtttaggttcaggcttcggctctggttttggctccggctgtggcttgggctctggctttggttctgggtgtggtttgggttctggtttgggatccggtttaggctctggatatggtttgggctctggttttggttcaggctttggctcaggcttcggttcaggctctggttttggctctggttttggttcaggttttggctctggctttggttctggcttgggctcaggcttaggctcaggcttagggtgtggcttgggctcaggctttggctttggctctggctttggctctggttttggttcaggttttggctccggctttggttctggctttggctcaggcttaggctcaggctttggttcaggcttaggcttaggctcagggtatggcttgggctcaggctttggctttggctctggctttggctttggttttggttcaggttttggctccggctttggttctggctttggctcaggcttaggctcaggctttggttcaggctcagggtgtggcttgggctcaggcttaggttcaggcttaggctcaggctctgggtgtggcttaggctcaggtttcggatcaggctttggttctgggtgtggtttgggctctggctttggtttgggctccggttttggttccggcttcggttccggttttggctctggcttcggctctgggtacggctttggttctggttttggttctggcttaggctcaggtttaggctccggctcaggttttggctctggcttcggctccggttttggctctgggtatggtttaggttcaggcttaggctcaggttttggttctggctttggttccggtttaggctcaggctcaggtactggttttggctccggctgtggcttgggctcaggttttggcgtgggtttaggatgaggctttggctttggtttcggctcaggctccgacacttctcgtatgtcacacgaccctgcttgctcatgaagcgggcgccatggccgagcccccggccagcagccgccgcttcatcaatgaaggcgctcgccaccgccaacgccccaagcaggagcatggcgacggcgaggcaaggagagcgcctcgccatggctggctagctaagctcctcctcttcccttgtcttcttctccctctctcacttctgctgttgtacgtggtagaactgaactgtgagcttctgtgatcttgtgccaatggatggaagggtggctggggttttatagcccgggaaagccaggcatctgtggtcacgtgtctccatggcccccagcttttgtggtctcgagctgcttgccagctctcacccagtatcctgcctggctgcttcccctttccaaatctgactttttttttttacccttcttcactttttaccaactgctaaccctactttttgctaattaatcaacacctgtgctgattaatcaatcgattatactttgctatacttcaatgtgtgactgggcaactagagctttcttggaagttggaaaaacatgaatatttcagacaacttttgttagaaacggaaataccagtagtagaagtaattcgtacgaaaaccaagagtaaaattcttgagccatcatggcaatggcgattggcggagcccgcaaggcaaacagtgtaaatagatgcagcagaagctaagcattgcaatttgcaagagcaggagatgaatggcagcaatggcgactgaacagcaagaaggggacagcagccagaaacacacattaacgtgggtgaaagcgtcccatattcccttgaaaattgcatccaactcaacacattactagattacccgcgtttcacgttgcattcgatctctctgtctctgctacaacgtcgctctctcgccgatctctcaatatacacggggtagctagctaggagctaaccggctgctgtgttcagaccggccactgtgtttaattgccgtgatgcttcaacgaagttgacgaaactggcacggggttggaaggatttgaaagctaaatttgtggtagatttgtaagacagatgggtagatagatagattatgatcgctatcgatctgcgaggtcgagtaaactgaacttaatttgctgatttttcaattctttgacgccctcggctctgcgacgacagataattcaaggtcccgtacgtcaagctattttactggtttctagtttctagaaatattactggtcctggtctgttgaaaacttgaagtacacgtacatatcaacatatgtacacggtacacctgtattgctgatgattttgttgctgtatgtgccgaccttctggaatactaccttcatttattgaattaaccaacggtcatacttcctccgtttcacaattccatatacatattgatgttaatgaatctagatatatatatatatctatctagattcattaatatcaatatgaatgtgggaaatgctagaataatttacattgtgaaatggagggagtatattattgataagggtaatatggattttaccttgagagcatgtacacgtaagggcgaacatctacacaacgtccaatgtacgagtttggtcgtcattaaaactagcaaggtaactagcctgtgtatttacgcgggtatgtatcgtagtttgtatttgaaagacttgtaagtactatttctccacaaattttcttcatgcacactgcttaaataagtttttcaaactattagtttgctctaaactataatcgtcttcattacctagaaagaaggtagacttagattatttagagaacatgtcaattaagtgtaaattaaaagtaagatattttttaattaaatgtttaggtgctctcttttttaacaatttaaaaaactattatttctaataaatgtgttttatttgtacatgcaagcctgccttctaattggttcatattgacggttacatatgaattactaaatatagaggatatatcctagaccttgttttcctatgatatgcatgatctacggtgtgtgtgcgttttcaaaaaaaaaaagctagtcagcatgagttctgtaattaaaatttaggagtaacaaatataacattaagcccactatataatgctaccttaatgtagcttatatatgcaataatgtgtggagaaactcataattccacggtacaggataagtggaagtccgtatcatatctaagcattatttaaaaatggttatggcaattaaaagccaatggttgttccaatttaagtcaaaagtaagaatcatttcttacgaatttaatagatttttctccgaatggctcaagctagtccctattgccagattgtaatttatgttttattttataccaattttaagttcaaaatataggcattacgaaacttaaattgttggtttatttatgaatagagcaacaattcgattaaaaatcagatgtgcagcttaaaatcatggtcgttttaatgttattgattgtttctcttttagtttgataagtacatagagggggagaagaatggatggtggagagcctaagtcgagaggagaggagaggagaggagagggggtgggcagtgctgtgtgtattcgaggggaagggcaaggtagaggggaaattgtttttctcattttactaaatggtttaaagtgaaaaccgatgataatatggtttttttcacaaaatttcaaagactttttataatttttatgacgtgacatatggcaacaaaagatttttctaaaagtatacctaatggttagaaataattgatctatcgatttgattagaaaccaatagtcacatgttaatttcctcataatttctgagagattttataattttttagacgcaacacatggtgacttagagagttatagaggatgtagattgatttaatatgatgtactatttattgtcaatttttttatagtgattcattgctgttgttatttggtcgccacacaacgaatagaacttgatgttccaaaaacatatgtaaatttttattcaatacaatttgagcaatattcatcttgaaatttttatttaattataaaacaacagttcaaaacaaactaaaaattgaatataacttaagaactattatcatttagcattgcattcattgattatttttatattaacatgttagttaaaaagtaggagaggaagggatatcctgatgggagaggccacatgcgcatataatggaggatggggaacatacaatagtggtatggaacgagtgaggatgagagtttgttttctttaagaatacaatggttagtaagatctaatgttataaaataatacgtccatcacattaggtgaaatttgctaaaattctattacaattatatatgttttgtgcttttgtacaaactgattgtgttttagttcctattaattactttactaactgaaattagcattaacaactctattgattgattaagatctatccttttttttttacttctgtgttcctacaatatattcagtgtagatattaaaaatatgaggacacaaaagtataaacgtagttttcatgaaaaatctgataatattattgtgacttatcataatttaagaatggggagagcaatttttaagaacaacaatcacagttttgcttattttaatgttatatagttgtagatataatttaattattatgaagttatgtacgatagtaaattctacattattagttttttcatatgttttttaatagcatgaaaaataaaaaaaacccaaaaatgacatattccttttgacggttgaaatagggtaaatatgggtctttaaatgtaagtttgttttcataatttttttaatggcatgtaaaataaaagagtaaattgcacccacaatgcaacaacttggcaggtgggtgcgatatagtgcaagaaattgagaattgaacgtctgagtacaacaacttgacaagtgggtgtgttctaatacaagaatataataatttattattttggtgtatcaacttggctaagcatatgctaggtgagttttttttaatcatatggatattaccttataatattgaatttaatttttaagaattatacagcacataatagtataatttacatccaattaccattaagaattttttgttgtcttcaccttctcaaatatcaaccgaaatataataatttttatatccaatttaattggctttcagttattagttattaggataaaaatataaatatacttttacaaatatgtgctagtatattgtcaaaattagtacttaaaaattgaatttatataaaaaatactccgaataattaagttgccgcataaccttttaatttattgtatcaaaatcatacctaccttgcaaattattgcatttatacgatcactgataaagttcttatactaaattgcacctacatgccaagttgttgcactagaacactcatttctcaagttattgcatcaaattgtacccacatgtcaagttgatgcatcgtgaatgcaatttactcaaaataaaaactataaaccaaagtgacatatttatttaaaagttaaaatatagtaaatatatataggtctttaaatgtaaattttgtcataaataatctatcaaaatatgagttacctttatgatttacatgttatagctatttaatttttttattagaaatcatgtttcctaattaatgtagcatcaatataggggagagaaacagaaagatgggcgaggtgtgtatgtccattacatattcatccacacacgggtcggccggggttgggccgtgggggttaggaggtggctatttatttttctaatcaaacataatttaaatggttaaaagtaatgggtccatcaaattaaatgaaagctaatggtttagattatttttaagaagttctctaatttattagagtgtcatgtggcatattggaaacgtttacgggggtgtcacgtgacgtcttaggaggttttataggatgtttgatgaatttttactatataatagatagatagattcataggtacaatgaaaattgattgtttttccggggagtgaagatctgcatatgaaaattaatttttgctgtgagtgtggacctgtatgtgaaaatcgattacagtcgatccacacgtgaaaattgattttgggacaatttccctacaattaacatatgttagtgcaccataatattattatgcaatagtagatgttaaaaaccaaagtcaactcttgtctctcctcccccttttaatttgtctcccattatcaaaatgttactagctagctgacagcattatgcatgggccatcatattattgattgttccaaatacccagatgcgtacgtttttttaatggaaaaatctatactccacgtactaaattattttgtactagcactagtactaatgtgctacgccgtaactacatctacatttaatttctatatgtagcagcaaactcatgtaattaggtgtgtttagttcgaaaaagaaaatttttgagtgccacatcgaatgtttgatcgaataggggaagtggttttcggatacgaataaaaaaactaatttcataactcatctggaaaccgcgagacaaatcttttgagcataattaatccatcattagtatatgtgggttactgtagcacttatatatggctaactattgactaattaggctcaaaagattcgtctcacgatttctcccctaactgtgcaattagtttttttataattttatatttaatactctatacatgtgttcaaagattcgatatgatattttttgaaaaaaaaaatttgagaactgaaccagaccttaacatcccgtgggtgtaaaattcaggctgcttggatgccaagtcgatcgagcagcagcgtaggctccaaaactgcgcatgagtactattttttttaacaaatatgtgctcggcagaacataatttcgagcgcatatcaggaattccaaggaggagaaaacttctactatctccatcttaaaatgtacttcctccgtctcaaaaaaaaaacttaacatcatactacgacgtgacacatatatcacatcctaatattatattgtttttttagcacggagaaagttactatcagtataggatgtgatattacatggtgctacgaattggtgcagggcagcagcagagggttggattgacgcaccgacgcgagcggccgatatcatctgtgctgcacggggtcgtacacgcactgaacgacacgactactagtggaccaccggactgcctgcatgccgcgccgcgggctccactccaccagtagtccactgaatgcccacaggactaacagctagctagacactgcagtacttgtgagccaagccatgtgaagtgatgatcgatgtgaacggagatgcctatgccgatgggatcgacgtaagtgtagtatagggaggtgaaaacgggtcggattcggtcggatcccatctttcttatatcctaacccatattttataatcggaatcgggttggacacggatagtgccgaataaggatacaaactcagataatgtcgagcaaaaatacagaatgaacactatcggttacgaatatttattcggatatcaagtcgaagacaacaatcttatatatcacatagacaataaccatttaacaataccatatatccataatacaattatattaagctattaggatcttagaaaataaatagggtacaatacatcgtagtagaaccaatacatagtactaaaagttacctcacaaaaacataatacgggtaatatctgtataattatccgggtaatactcggaacttttactggataatccgtatccgtcggatactacgtttccgaacccgatctcgtatccgccaaaaaaggcccgtattcggacccgatatccgaaatttcgatccgaatttatcccgaaataatgtggccgggcgggcgggagggaaatacccgtcccgttttcacccctacgtagtacgtgcacaggcgcaacagtcatcggcaccgggtcgacctcaatgtttaggccctgtttagatccctagcaaaattttacaccctgtcacatcgaatgtttggacacatgcatgaagtattaaatataaacgaaaaaaataactaattacacagattgtgtgtaaattgcgagacgaatcttttaagtcgatttgataatatggtgctacagtaaacatttgttaatgacagattaattaggcttaataaattcgtctcgcggtttacaggcggaatctctaatttgttttgttattagactacgtttaatacttcaaatgtgtgttttaatatatccaatgtgacacgccaaaactttacacccctggatctggacacagccttagggtttaatttgtttggagattttttttcatagatgtagcttcttccaaaattaaagtcatccacaaacattctatttttccgttaaaatttaaaaagttgtagaacttataaaatgtattagaaaaccacagcctaaaaagcccaggccagcttcttcatagggtgtgtttagttcacaccaaaattaaaaatttggttgaaattggaacgatgtgacggaaaagttgaaagtttgagtgtgtgggaaagttttgatgtgatgaaaaagttaaaaatttaaagaaaaattttgaaactaaacacggtcatgatcgaagaagctgggtaccaaccaggcaatagaccttagctacatgggcacgggacgaggcgcggattgatggagaagctatagctagctagcccccacactacgtaccccacagccacgcgcgacggtcggccagccgatcgatcgcaacctatctgtctatctatctcgccaaaacgcgtgcgtgcactagtgcccgctctgcagcaattgcctcatgaaccctctccaagactcgaacgatccatccatcgttctatcgcaggcagatgagggtggatgtgtgtgcaggcaggccggggcgggtggagggtcaccgcgacgtacgtatggcgaccgcttccccgcggccgcgcgcgcacgcacggcggctggcgtgtgcatgcacaagagtccatccgtaggcctaccagccgggtacctaacatgcatgcatgtaatctagttacgttccgcgtatataacatattctaatactactacgaattatgacattcggattatagtattatggctgtgtacgtttagttcacgctaaaattgaaagtttggttgaaattagaacgatgcgacggaaaagttagaagtttgtgtgtgtagaaaagtttcgatgtgatggaaaaattaaaaatttgaagaaaaactttaaaactaaacacacaaacttctaatttttccatcgtaccattccaatttcaaccaaacttccaattttaacaacacaccctcagtacgtttagtacgtgctactcagataaggccaatgagagccgcacatagcgtgacatatgtgcgatatacatccgccaaccggatacgtataaagtctgaagttgatcgatggaaatatggaatcgacgtagggataagatagaggggtacagctagtgctgcaggcagaaaatcacaaccagagaaagggaagggaaagggttcatccaaaattttgtatttcatatgtttagtcatattcagttattcagttaggtactactgtttcatttattgtattacgactctctcgagctagcctaatatatatctcgacgacggttcgcattatataagaaattaaagacgattgaaaaaaaaaaggaattgagagctatgacaactagccaaatcttaagtgaaaacaaaacacaggaatccatgtagagataagtaagagtacaaatgcagtgagaaagttacaataagagagagatggttcagccaaaatttttgtctcgaattgcatatgtttagtcatattcaatcacacaatgttttattatatcacgactctctctagatagccaaaattggtggaggatagttgtgatcggttataagagatgagaaagttggagaaattaataagagatggctgagataaggggtatatatatagaagtggttatatattgggacataattataattaatgctaaatgtagttatattatgaaagggaggtgataagaaattaattaatggctcctttcaaacacaagattgcaaaaattacagaaataggaacaataaaggaattaagcatcatatatatatagctagccgaatctcacataaaaaaaacatgtatgagaatttggtaaagaggattttggttgctccagagaaaaatgtaaaagatgggctttcatcaaatgttttgggatcgatggaaaacaaatcatgtagtgattttggaacacattcctacaatacaaatgactttacagggaatattctcataggacttcaatccttcaaaattcatgaaaaaaattctcaagtggtgtttgataaattatatatattatatgcttacaacagagcatgtatatatgtaattactactagtttgccttgctttcgtttattgtgctccaaattatttaatttgtcatgcaatgcctagattacaagtggcacacattaatttccaccaagtcttgggaaacatatcatgtagattatcgtcattatatgtgttgctgatgtcggtgtatgggtggtggttattttttcttttttgccagaatttttttccctgttccctatgtattatggatttgaggttgaaattgtacccaacttaccaagttgatatactagaaggctcatttatcaagttcttgcaccagaactattaattttaaataataagtagtatttaaatgtatgttaagttggtacatagaccacattatgatttttttttaaaaaaaagaacatagtacaaacataggcgttcaaacgtgcatgcacccatccctataaacgcacgcatgcacaccctactcctatgagcacttctgaaagactgagccgatatatcttgagattgacaaagtcatcacggatgtcttgcttttcacaagtatgtcgcgtaccagcaaaagaataattagccgtgtgcacatgtggtgggttagttacaccgcaagaaacctaatcagttgtttctaaaaagaaagaaatataatcaaatgagttacgctcacttcgcacattatgttacatttgtactcaaaagtatagggagtatatattatcaataggttaattaaattatgtaccagaatcatttagtctattattttttaaaaaaaacaaatcctccctacatagtgcccaaaattaaatgcccgaaaatgagatatacatacacataggcatcaagctataaaaatggcacgtttttcctgcgaggtgtttcagggatttattaatatcatattggtgacagtttagcagacggtactgaataatctccccattaatcccccgatgcccccacacgtcactggtcggttactaggtgtcgccacaagtaaattaaagcgcaagatcgatcgagctcatctcttcagactagatccacaaattaaaggcgagaaagagggaaaaaaaagattagagattggatcgatggatggagagatggcatctgccagccagaggccatcgttgtcgctcgctttttcacgctgtgatgaggacaatcctgcaatacctccggctttttggcttgcaaacttcgcacaaatcttccatggcctccttccgcggacacggacagcgacctcccatccgctgccctctgcatgtgtacaattcattcgcgttgcgtttcttgccaatctggatctctctctttcacctgtattctctctcgatcttgttcttgttatacatgcgtttgcgtgtggcgaccggcgagtgatgattcgatcgagctgcttgtgagctacattttgttcctatatgctgttgttgttgccatgttactccagtttaattgatttaattaattgtgattctcttttgtgtatggctgccgctaattattctggcccacatctcagggtagctataggccacgtaatgatggaattgaggtgtagcaggattaaggaaaatcttgaaaagcaatattttacataagctgttacatttgtgataggattttttttttggttggtagcatatattgcaaatttatttatttatttgtagcaaggtgatcatcttagatagatgcagggcactggattaattgaatgtagccgtgtagattgtctttctttgagatatggttcgctatcagctgttcacacatagctcatgcgtcagtgtcaaattaagagtaatcactgtactagcataaatgaaaagaaagagcaacattttctgttacaatatagtcaattaattcgtcctacatgtactcttcccgccaattgcgagcagcggagtaaaatgttctgttggcaccatattcccctctcatcctcatttccttcaaattaagtcgctctcgcgaagtcattttacgtcaaaattttatatgaattttcaaataattaaattaattcatgtaaaaattcttcaaaactcttttagttcaaaggagaccccaattggtgtggattaactctaaagttagctgagttgaagagtccagcagtttagctttttgggtttttctttggttccgtcaatattctacctgaaagtattcgctcaaaaaaaatattctgccagaaattgtttacacacatatggtgcacattcatgatttttttcatcctagatttactgttaaaccctgataagactctgaaatgttcatatagttaatatgaagatgaagagatcaacctagctagtacatacacatctttcttttgactgtaaagattacaagcatcgtcatatattctctcgggaagttattccactattgaatatattgatctgttctaaaataaaaagattattccaccattgttctattagctggatacttctcggtacaaagactggatgattgatttctattatcgaaaaaattattatcctagcccacacaagggcttccaaatcgtaggaaaactggccctgaatccatgatgagatattcggacacgcaactaaaccaaatcctatatacttatctagttcatccccactaagtgtagttatcgctatttctctcttctctcaataagccacatcacctcaattatttttaaccattggatgatagatccatagttcaaattgtctcttctttcttctctaataacaccatgcaatctcaattatttataggctcaaaattcatatgtatatcaatttgttttaattttaataatcatatttcatcatatttgtacatattatgtaatttaatttcccgcagcaacgtggcggggtattcatctagttaaaaagaagaatcatgagtgagtaggtgcaaaatgtgcagcgaagaaaatagtcgcaaagctttaattagggtaaggttgctaaataatatttcagtgataaagacatggttggggaaatatcctctagaggatatcagtactaataaaggggcctaaaagagttccaacctaattaactaaaatgaagcacaataacgaacgaaataaattaattgctttcagaaacataattggatgaggtgtaccatctcgtctctatagaaggttcaaagtgtaccatcatcagggccatactttggattttggatgagatagagagaaagataatggacaaggaaaaaccacctgcaggctgcagttgccatggaaagttgtaaaccatagttattagttaaataaaaagaatcataatcacaaccagttcgcatgtaaaccatagtaaagaggaaaataataataggcatgtagttgcagtgaaaataatagcaaaatgttccatgttactgtcatactacctaggattttcgatgagttggagagagatgataaacaagaaaccatgacctgcagttgccatgtaataacctttataaaccatagtcaaataaattaaagaataacaagcccaaccagtgcatgtaaaccatagttaaagaaaagaacaatgagagagcgtgtaggtgcaaaaagtgcggtgaaaatagtagcaaaatgttcagggtcacaggtgacagagacagaggaccgaagagctgatacaacaaatgagagggataaaagacatctaatccaattagttgaggaagggaacgtatcgaaggaaacaaatcgctctggcagagacagcagtaccaatgcaaatagatggacgcgtgaaactgaacaaaaataataagaagaactcaacagctgctgggctggggcgtgcgtaatacatacgtcatgcatttcgtcacggcagttaaattttaactggcgtaaaacatatcagcttcataattttggaccacatatggatatggaagtgtctaaacgagttagctactcaagtgccggttaatttgtttgtgataaaactgtattcattgagacggatgaattggaatgtaacagtttcaaaacgatcattgaagatatgaagtgagcgtagttcctcatcacggaagaatctaaattttacactttacacggatattcacatttacggccacattcttttagtgataaaccatcatcaacaatacacttgtagtgattttttttaatcttaagatatgattgtctagttttttagaaatgctcgcaaagatggggtatatacatttataagtgagcactctattagataaaaaagggaccctagatgatgctcaatttgctcactaatactaggaaagaaagtactggtcaattggactgctccagagaaagtcctgtacgatttggtcacgcaaaggcttcgttcgacaatgctgattgtccgggccttttcaaattcagcctaactaggactgtttttggagcaatccaaatgatcagtgactttctttcctgttaaacaaaaaatgggtacggtttcgaaaagatctgaagttatgaaccgccctacgggaaacaacacactctaggatttcaagttttcaacccataattctagaattcgaatagggaatttcagttcataaggctcaggcagataggaagcaacgacattccgcactctgcaagtccgaaacataggaatacagctacaactttgcaacgttacggtaggtaatggcacggttgacgataagacaagaacaatttaaagttggcattcttcaaaccagaacatgccatgacaagtggatgcgatagttagcacctagagtactttttagcgaggatttaactcatgtcaacaatgtatcaaaaaaggatggcacaaaaatttatcattactatccatcaccaacagcgcgtcccactgtaactcaaaggagagcttcagccctgatgatagcaggttcagtcaaattgtactttatccagctgcgtaatcatctcctcaaactgcaaagtatgacaaagaaatgatacattatatagggtataaatgagaaaactacaagtgcatccaacgaaatgatgtcgcatgtgtgaccaagtaaacatggtaagctgtaaaaagatctacaggtaccttcaaaatctgtctcaaaaagtaatcaccatggttcttggttaacttggattcaacaacatgaataatgtcctgtgtggatacaaaaagatttggtgagtcaaatagaatagtcatttgtaataagtcacatcactccatttgtaaggtaacacgtctaaagttccatactaggaagtgtgggaaaaaaaaacacggacttcatgtcattcatgcagtatttcagccactgataatcattacactagtcaaattcataaccccaggtacagaaagttttgagttcaaaagcatacacaaggaatttatattttcactaaaagcacaaatcatggagataatatttcatgaacatgtaaaacaaaaattatattctccaagcatttaatcgccatcaggaaatctaaacaataatagcgcttgaagcgcagaaggtttcaaattaaaaagcacacacaaaaaagttatcataaaaacacaaagcaaggagataatgtttcaagaatacgttaaaatgaacactattttctccaagcatttagtcatcaacaggagatctaaacagtatgggtgagtctggttccctgtatgctggatgacctgtctggacacaccaagcctgcctcagatggactggtttccaacatagattttgatttgtttggtcagctgagtttatttggccagtctaccacagaaattgtttggtttcatgcatatgtcacttctctcatggaacatcttgagaggacactgcatataggcagctctttcttgactcaagcaaccaggccaataagaaatgattctggaacttgtttcctcatggccagtgctcccactactttttgcgcacagagg

SEQ ID NO: 24290 - DNA, 18181 bp, Oryza sativa
  unsure (1)..(18181): unsure at all n locations
tagaactgaacaaaaagaatatcactgatactgcattattggattatcagaatttagtagtaatgtctgagcaagtagatacccaaagcataggcgggatctaggggggtggcccnggaccacccaaaaaaaccctancccaatgcatattacatatgtgaaaagaaacttgtggaaaaagaaaaaaaaataactccattattaatatattgtgatgtacatttaatccatttatacttctaaccttgtcatatatatatatatatatatatatatatatatatatatatatatatatatatatatatatatatatatatatatatataacttggaccacccatataaaaatactagatacgccatggacccaaagatgtgcatttcaggtgtcacataagatgctaagtaaagatactcaaagtaactgacatgcaacttccgcaaattgtaatgttaatgcataacaagggaaatagtaaaatgaacctcaacgttcagctgctcaattgtcatttcaacaatataaggcagtaaggcacaaacaaacaataattcaaaaaaataaaactcctacatcacttgagatattacagacaatttgatacacctagaatgctttggtcctagcccaattaagggtgtagtatagtttcaaaaaaagcataaaaaagaccaccccaatctttactttaagtaatacctggttgtagtttgtgtatggctctcgtagaactggaggcgacgcagtaatgaacttggggcaggcataggaaaagagttcatcataaatagcatatgcctcatcatcatacctatgcatctttgtcattttgtccccatacttttccttcagctgagtgccaacgttttcatctatgagcttgtcctgtggacacaatgagaggcagatcgccaatagtgcatacatctgctcattcttcttaagtagctggtcatactggggggaattctggtggtattgcttacacttcaggatatacaacagaattttgttgaattcacgtataccatcaatatacctgaaatccatccagaaatatggtttatcagataaaagaagtcagacaggacaattcatgatggtgaactaactagtaacatgactccattcatccattaagcattaggttctcatatgggacagaatagcatgcttcacagtaaagtttttttttttttttgggttcacagtcaacaggactacctaaatgttggaaaatccaaatttttggtaaggttgcaataagcaataacaaattttggtaacaatccaaatgaacgaatactccgttagcattatcaatattaagtaggcaattttggcatcaaagagaaatgatcctaagtacttcatcagaggtaagtaggggaagtgtcgggctaagctcaaccttggattcttggaccattattaagtagagaacagcataagcactattgactacaaaaggactgcccagaaagcttttgccatattccataagatgaaatgatgttaaacggcaatgttacatttagttcacatacgcagagcttaaaagtaggagtaatatactatataataggaccacctgcaattatggtaaacataagcaatttatatatatatatatatatatatatataggacactcatatgggggcaccatggtttcaaatgcacaaaatcactcaaatttttcaaaattttcaaattgtgagtatatacctagttataagaattcgattcatacctatacctatcaacaaaacaactcaaatttaactttattcacaatccatgattacatacctaactaattatatgtatggatgctatatacctagaatcaaaatctaacaaaaacaagttcaaattcagttcaaacttgctttcaactagttagtaaagtagttaatattaatacctaaataattgaaaaagtttcatgctcatttgaattgggtatatactcaatttcaacaatggtgcccgggcaccatggagcaccaaacaaatttactatatatatatatatatatatatatatatatatatatatatatatatatatatatatatatatatatatatatattaaaagaagagttgaaagagtcattctgaagtgattgaagaggtaccaaaaaaagttcaattatatggcacagaaagtggaccatcactggttacccaaaggggtgagggtacgcattttatatcccatcagcagaaaacaagtatagcatgatgctagacaagtacacatacaagtatcaaaagaaggataatcattcatactgtaccatactgggtaggaaagtaaaagataacccagaatttatatagctgaaatatcactagatactccatcaaatccaaaatataggtcatacttgccttctcaactcttctctctaaatgagtcatgtgaacaagtctcaattgacttatttggttagagaaagcatatgatttttttcaacaacaaaactctagatgtagaacaataaacgatagataaagaaaatagaaataaagatgggaaacagagatgctcaggcaagttagcttaacgcatacctgcgcatcatgaggctggcaaacccatagtgataaatagtggaaatgtggcttccaatcacagtggtgtagacaccctgctggcttatatctattggagccaagcacttgagcccagtatggtaatccccaagaaggcaatgcaccctgagcagcccaatcatgctgtagtaccccagcatcttcaacacattgctcccgccctcatagtcatacccatcagttgccgtgaactgttcaagccctaccttctccctctccaggatctctccaatcattgacttctccaccagtgctttcaagtaattaagaaccccataaacactccatgcctgtaaaattataaacagattaattatgacagagctatcaacagaaaactcatacataaaacaaagctaagccatccagatccaggattcatcataccgagcacccaacctgaatctaactctgataaacgacctccacagcacatgtcattgaacaaacagtgaaataaatgaggctactgctaaataaactcgtaatggaaatttaatgtcaatgcaaatctcatagcacaagcaagagcaacctcttccgccttaattacaaatcacaaagaaaattgagactatcactaacatgtgcaatcaagaaccagctctattatattacttcataataaataccatagtccaaataaataacagaattaacaagcctacccttcattaggcaacaccagcataccaatggaaactcgtcgaatcgcaacacgattcctgatttactctgaacgatggactaataaaaactaagggagattcagattatagaggacctatgccactataccagtggaaactcatactgatttactctgaatgaacgatggatataataatagtaaaaacaaaagggagattgagatggtagatgagaggacctggtcgtactgcttgaggagggcgatctcctcgtgggtcttgttcttgagcttggcgcggtactggcagaagctctggaactggtagacgaactcgtcgaccatgtcccagagccactggttggggagctgcatgttgacgacgccctggaggacgacgctgaagagggagcagtagttgtcccacgactcggcgcgctgcgccggggtgaggccctggacgcgggcgtgggcgtggcggaaccagagctcccggtagaggaggaggaaaacgtggtcgccgtcgcagtgcgccgccacggcctccgccggcggccacggcgtgtcgcggaagtggcggtcggagaggcgggtgaacccgccctcgtacatctggtgcgtctcgtacacgttgcggtcgcggatgtggcggtagaggtgcgacacgaacgtcttcaccgagtccggcacgtagctcgggtcgtacgccgccatggcgccgcctcccccggggccggacgacggcggcgccgcgtcctccctgtcgcggtagaaggcggcggcggcggaggaggccatatggcgatctagggtttcgaggtttcggggggtttttgcgtgagctggtcgaggaatggtgatgaccaagcctatctcactatctggtcggcctgaaagtgggcccatccacctaatgggccggcccaatttcgaacgggccggtccaagcccaactcgagctggctaaatttagagatttagggttaaaacgataaggctccatcctcgctagttgtggcgagccccaaaaccaactcccaatccgcatctccctccgctgcgccggcgccgccgcccgccgccgccgtggcccggccgtcggctcgcctccgcctccatcctcgggcaccggacgtcgtccccgccgcccggaggccgacccctttgcctccttaggccttctgccctagttccggcggcctggctctaaattcggccgcagccggcgcaggtcgatcaccgcccgcgcgccattggaagcggaggtaatcccccgcccagctgccaagatgaattggctctttatttattgatatgtgctcccggctgccaagatgaaatgtttatttattgataaatttgatatgctgagttgggaatttttgtatgtgcttgtgcactggatcagttgatctgattgaaactaatgctgattttaggtggagaaaggaagctggcattggtgcgtgattgaaatgctgacctgattttttttagtacattgaggatgtgcgttctctgaactttttactgaaatgactgttgcatgaaaaatatgtgctacattctatttttgtacaacactctatagactgaacatatgccattttttgttataaattcaacagtagcgatggatggagacagttgttatgttaactcactggttgttaaaatcaactcgccagagtgggatgatggcaccatgatgggggctagtccacccgaggagcaacattcaacggtcgaagaagttgttgtcgtgagacgaaaccagaaaagaacaaagaatttcagcgggaaggaagacgaagggttggtttcggcatggttgaatgttagtaaggatgtagtccaaggcatcgaacaatctcgttgtgcatactggaagagaatttacgattacttccacgcaaacaaggacttcacctcagaccgttctcaaaattccctcatgcaccgctggtctactattcaagagaatgtgaccaagttcgagggttgtctaagccggattggggatagaaagcaaagctgggtttcaagtcaagataaggtttgctcatatgtccttaaaactagttcctcatttttcatatagtgactagacatttaatatgacattttgatatgtgcagattatgcatgcatgtgctctgtacaaggccgaagatgagaaccataggccatttcacatgatgcactgttggaatctcttgagaaaccagcaaaaatggattgataggtcgtctcagctgccatctcacaaaaaacagaagataaccaacaattcaagtctaggtatgtctactactactactgatgatactgcggctgctcctcctcctcctccaggatttgagttatcgaagactccagaaagtattaatgctcctccaagatgtgagttatctgagagaccagaaagtaggaatgctcctccaagatgtgagttatctgagagaccagaaaataggaagggggagaaagaaaaactacgacgaggtggagatgtggtctttgtggaggatttagatgatttgttggcaaagaagaaagaggcagatgtggagaaagagctcaagaaagatgagagatatatacaatcacatgccctagagcaagagaaggttgcactagaacaagcgaaggttgcaaacgagacaaaaaatcttgagatgaggagcaaagaattagaattgaagaccaaggagatagatttgaaaagaatgttagaagaagagaggattatgactatggatattagtgccatgtctgggctacaacaacaatattacaagagcttgcaggaggagatcgtcactcgacgatttaatagctcgggttgacctcgtatgtctattattgttgttacggactattatgttttgcgaaccatgttgaagtcgtatagagaattatggtaaacagcaaaccttgttaaattgttcggactgttatggaatgcataccttataggcttataccttatcaagttgtatggactgtcttggtgtgtgaagctttaggccctctttgtttaggcttagtcttattggcttagatttttaagtcagcttattggcttatatgatttataagccagtgaatttaatgtcctaagtttagtggtggagtcatacatctatctcagataagccaaaaaagcttctccaacctagcttttggcttaatagtgtaagagtggcttatagcttcaaaaaagccaaacgaaaaggctgcttgtaggggtggacaggaagctcgtggctcgttaactcgctcggctcgtgacaggctcggctcggctcggctcagctcgtttgaatttcctaacaagccgatctggcatttcagctcgttagagataacgagccagctcgagctggctcgcgagccttaacgagccagagcagatgaggcccaggcgcctagcccagcccaacagcccatcacccagcccatcaccttgtgaaaaccctagagtcaatccccttctggcttgtccccatcctcaatccccacccaagccaccgccggcctcatggctgccgctcgcccgcgcctatcctccccggcgccgacgccgccgtccccgcctctcctccccggcgccgacgccggcggccgtggacgccgccgcccgcgccgctccttcccgccgccgccgccggcgccgcccgcgcctctcctccccggcgccgacgcggacggccgtggacaccggcgcacgcgccgttcctccccggcaccgacactgccgtggacgccgacgctcgcgccgctccttcccggcgctgacgcatccagtcgtggacgccggcgaccgcgccggtcctccccggcgccgacaccgtcgtggacgccgctggcgcgccgctcctccccgggcccctcgtaggctcctacacttgttcgctttctctcttgtccccaaagctcacgagcctaacgagctggctcgagctttcaaacgagccgagctgagctgggtttctagagctagctcgttatcctaacgagccagaccgagccgagccgagccgagccagctcgacatccacccctagctgcttgtttgtttaggcttagactttttggcttataaattggcttataagcctaaacaaagaggaccttattatgtttgagcttaagttattttggtataaattaggacagttcaaatatgctactccccccgtcccacaatataagggattttgcccccatctagttgtcccacgatataagggattttagtgtactacttatcacatccatcaactccaatttaaatttttacctattttaaccctcatctacccactcacctataagcaaatactccctccgtcccacaatatatgggattttaaaaaagtttttgtttgcactgtttgattactcgtcttattcaaaaaattttggaattatttttttttgacttactttattatccaaaatactttaaacacaactttttgtcttttatatttgcacaaattttttaaataagatgactggtcaaacaatacaaacaaaaactcaaaatttcttatattatgggacggatggagtatcatttaataagggcattctagtattttcttgctatccttaaacttacataaaagggaataatactttatattatgggatggagggagtaacatggtactgaccacataaatatattattccaacaatatggactacattcctaatgcatttctccatgacattcacttcaagaaaattgaagtgttcccccccaaagttttcaacattgtggcaataatttatactgttgccaaagttttagttttttggagtaattagtacaatttgttgaacaatatagtgttgtattagtacaattttttggagtaattagtcttttttttttttggaaaaaagtactttatagttttgttccaacataaatgagttatggcaacaaaaagaaaaatggctaacctttgcaacattaaaaactctaattctacaattctgattttgtgccaaatagtttaacgtattggcgtattgccatgttatacaattattgtatttcacaaaaagaaaaaagaaaaatacaaggacatagtattattcaagtagtactgctatgatttcgtatcgatgtaatcaatttctttagcttttttatatccttttagccatgaatatcaatttattcttaatagggaaatcagttgcaggaacacacgggcagttggactcttgtagccaccagccaaaccaaccaacatcgccaccaaagcaagcgttgattccgcccttggtctctcgaccatcggctacagcggtagtggccccctgctgctaccattgtgacgtagtggacttgatatagcatcttatcttacaacttagtggtcactattttggatttggcgggtcactatagaatgatcttattttatataaccactaacccatatataacaaatgacaaatttcttagttgtttttgtgtcccaaaacattgtattattatgagttgtaacgtctaatgagtagaatagcatgtttggttcttaatttaattttagttagaacaacatcttcgaatgctactaaatatttacttatgctcataggttatatgtgtattgatctatcactaatttgtttctcagttgatttcttaatgtttttgaagttattattcaagatatgtacactcaaatatgtgtgataattaaatgcggctattggaatttagcatttgctatagcaccggttatccgcgatccgctacataggcaaccttacttctcttctccattcgaagtgagatctgtctcttctcgtcttcttgagttggatacttggatttgctttaccttaatactaaatcaatttcttttgtctcttttgtgtttgtgtgcgaacatggaggtacgatggcttcacactatatccttccttgttagttgggagtatagtcaactctaatgacccaaaggtaggcaactgcattcgctgtgttgcacttggagagccactagaggagagagtagaggatagtgtcatacccatacattgggttgttttttctagccattcttgaccaaggctgagtttagttccaaaatttttcttcaaacttctaactttttcatcacattaaaactttcgtacacacacaaacttccaacttttccatcacattgttccaatttcaaaccaaacttccaattttagcgtgaactaaacacaccccaaatactagataccagccattgagttcaattctagtggagacagaatgtgtcagggcccacatgtcagataaattatgtctttggtctacatattgaagagagctgatgagtttttttaatataggtgaggcttatgataatacctatggctaattcatacactgtagcaattccagcgattcttgtacacgataggccaatgttaatgttgggttctctcacgaattcactttgattaactagaaaaggaataagtttacttgaggttcctcacaattcgtcaagtctgaaattcatccctaaaccgaaaaacatgacagaatgcgtctctcaactcccaaaaccactgcaaataagctcccaggatggtttggactgcggtttcagctgacttgacacctacgttgatggtttgacttgatccttgtcccacgtgacattaaaaaaataaaaaattaaaatgaaatatatgggcctatttgtcaataaaataaaaacataaaaaatatagttggacccatacttcctcgacctcactgcttctctcctctctatctccttcccatccatggagctgcatctcgccgccctctgcttcccccgcctccacttcccctgcctactttcctaaggccacctccaccaccaccgcctctgctgcctcctcctcctcgttgtcgtcggcggcagaagccctcaagccttacatgcatctctcgcggctgatggaggagcagcccgttgtaaaccaccataggctgcgaaaggagctgggtcccgccgcgctctcctccctctgcacgggcatcgagacactagtcaccgaggggcggcaccacaaggcgcgtgatgtgtttcgcggggcctaggctagggtgccgttcatgtcgctttcgagttcaccggatagaaatggagcaaaattcacgagatttaattcgagatttctagggctttttttggggaaagaaggggagatcgagggaattccatattcaatcaattttgagggagagaaaacgcgtggctggatcgagcgaagcaggcggcgtcggtctcaggtgtgcacaggacttccattcggaggagcaagacaatgactagcagtggggctgaagctgtcagcgagatgggaaggatgagatagagaggagagagaatgggtgaggtggaggaagtggacacactatttttgtatgtttttatttgactaacatatgggcccatatatttatttaaatttttaaattttgattctaataccacattaacgctacatgggatgaggatcaagtcaaaccattcacatagacgctatgttagctaaaactgccgtttaaaccatcttgagaccttatttgtaatggttttccgagttgagagacagaccttatttcagttaagggatgaactgcaaactcggcgacaaattgagggacttgttccactagaaaatccagttcgagttcatcctttccccaggtttccagcctgttgcagctcagctatttggcccactccggcccatggacacgagggtttggaaacctgggtcgcaggccgcagctgtcttctggtagattggcctggtcactgcttgtgtattgtccggagcctgtcttgcttggtcaacaggacatgtcaggcaccgtggtctatgcaacgaaaatacattcaaaaatttcactgtaaactttgcataaggcagggcaaatacattttgatttaactgtttcttttttaaaaaatgtgtcaataatataaagtttaatcagaacaataacgtctatcgtgaacaacacacgaggtaacacttctaattaattaccattatagggttatcattctcaaccttcatcgacgatggttaagacagcttcttagcttaagagcgatatgaacttgacggcgacggccaccgcgttctgcgccgccagcgccgcgaacacgccggcctcgttggactccgcggagccgccgccggcgaggtcggagagcgaccgtatggcgatgaacggcgccccctgctgcgccgccaccagcgcgacggcggccgactccatgtcgatcggcgtcacgcccagcctggaccgcaggaactgcctgtacgccgcgttgtccacgaacacgctggcgctgcacccgcgctccacgcgcgccaccgccggcgcccgcgccaggcacgtcgccggcgacgtcgccgtcccggtgcggttgacgcagcgctccagcggcatcgcctccagcttctgggcgagctggtagtaccggccgtcgacggggacccagaactcgtggcggcgagactccggcgtgccgtccgccgggaacacctcctccggctggtaccacacgccgttcagcaggttgccgccgccgccgccggcgacgccgtagtcggagaagttgagcgccccgtacttcctcgtgtagtcgccattggactccagcgcgagctccttctccggcccatcgccgtaccgctgtgtccgaattaattaatgaacaccgatcaaatcaccaaaaccaatttgttcttgatttggatgaaatttgatgaaattaattaatcaatcattcacctgccagttccagagtccggtgtgcgcccagtagcgggggacggtgacgtcgccgatgtggaggtcggggtcggcgttgccggcgatgccgaagtggacgatgccctcgacgtcgaagagggtgaggaggagctgggtggtcacgccggagttgagctgcgttcgtatgaagccgcggcagttgatcaggttggcacaatggaattaataattaaggtaattgacacaatctactctatgatagttatgacgccgttaaattctatcatgtcttattaaaagttttatgtaaatatataagatataattcgtacttaaagtactttaagagataaaataatttacaataaaatacattataattacgtgaatttttttaataaaacaaatgataaaaattgataaaaaattagcagtgtcatctattaaaagacagaggtagtataagtatacggcttaattaggtaatgaaattaatgaaggtgtacaagtatttaccatgccgaggcctgtcatgacgatgatcaccttcttctctcctatcgatccgaagcgaaatctccttcctacatggaaagacatgtggttttggtgagaaaaatatttaaccgaacttgattgatgtcgttttttttttttctactacagaaagaacaacttgatgggtattggtttgggggtgctaatgggcctgagtttgaggcagcccagctggcagtcttggtttgggctataaattaagctcaagcctggtgcataattcaaaatcttggcaaaaaaaaggagagaaaatctgtaatgtggaaatttatgatccacttgaaattcttcaattcaaattgggattttgatgaaaatttaaaaataaaatttaattttcgtggattttgatgcaaatttgttcaaagtttaaataaaagtttaatttcgctggtctgtgtaatcttttgagtttaggttgaaggggcatttgcagctctgtgcgtgttagcatatatacagccatgctgcaggtgcgtcgactcatgtactactcgtagaaaaagatcgatactactactactaattgatggtgatgaaccactaattttattttgtaaatctggcgatcaatttattcatcaagattgtgagagagtcgcaaacaagcagttgtgactacttgcatttatatacgtacgtacacagcttatcataatctgtttgatcttcaagctggtcaatggtatgcgttcgtacacgccatgcatggcctaaacgagttgaaattaaacccgacgattagtagaggaaacgaagtagaagagtagtactgtagtagtaaaagcttagcaacttggccacatggctagctaggtaggtacacgtcgtcaacttctcatcttttgacatataaaagtctatacaaatactcctccgtctaaaaaaaagtcaaaccatgtatttccgtgtacaactttaactgtccgtcttaataaaatttttttataattcgtattttcattagtgttagatgataaaacatgattaatattttatgtgtggcttgtctttttaatttttttcatatttttttcaaataagacggacagtcaaacgttgggcacggaaattagggtttgtctttttttttttttggttgtagagagtaatctagatactgttgtaacgtgtttctttagttctaagttaacatatattttgaagtggatatactaattaacacatacttccttcgtctaaaaaataatttaaaactggatgtgacatcttagtataacgaatctaaacacatgtatgtttaaatttattgcattagaatatgtcatatccagtattatgctggtttttttttatgctacaagtattaatgattgagctgatcctgacgacgtcgcccacagtaatcaatcatttaaataatcctaccgtacgttacatgcatgtgtagcaagttgaatatggtagagaataaatcacaactgaccgatcgaatgaggggtgtttttttttccttaatgtatgtgttaattgtgcatgcgcaagtatgggatgactaatatacatgcacatccctatatgcatccattggtttggattaaataaacatacgtattcaacccatttttaacaatagtataatttttatttgccttgtaacttgcgtgttagatatatcttctcaaaaaattgaattgaaatattcaaagagaaattaatggtaaaatttttaaatatgttgactacacgtattattataaaacatcgttacttatttgtggagtattatcttcttgaaaattaaatatagtacgatctcaaatcccactggttctgactcatattgtataagcatatatatgcagcagtgatatcacgtgcaattcttttagtagtagttcatttgcagaagatttgtttgaacaacatggaattaattcgtaaagcgattgtttggaaaaggaaatgcgtgaagaaatctacaacacgtatgtccgcagaccgcagttttaatccaacataaaaaatcgtacatgctacgtgtttgttcgatatagagtacagaagagtcgttccctacacgattatccaatcaagaacaatacgacatacttttccgatgtgtttgttgtataattaggttgctctcgagagaactattgaaaagtctatgttttttcgcacaaccttcccaaaaccgtgaaatggtacgttatacgaaagttatttttttaaaaaatattaatctatatttttaagtttaaaataattaatactcaatttgtcatgtgttagctaatgactcatctcgttttacgtatgttctcaatattccactttcctctctcaaacacgacgttaattaaggtttatttatcagacattcgcatttggcaacctgttaattcttgcataaatatatggttctatctctcactttttaaacgaaatctgatcgggtgaaaaaatttacaggattatatatgagatattccgggacctataatatcgacatgtatatccgttttttatagtgaatgtttcagtctacctatgttttccattcctccaaacatcaagcggctaactgtggttctcaaaaaaaaaaaagaagcggctaactgtctaggtacaaacattcaggctcctgtgccagaatgatggtggtcatgcaagttttcaccaattttaagatggagatatatagtaataggattaagtgttgaataataatgtcttttcaccatatatatagtaatagggttaagtgttgatgcaactcaaacatctacaggtttcattcacgcaaatatttgagttgcaaactttttaattggttatagcttctaccaaaacaaacgctgagtttttgggggagtactcccaaaaaagcaagcatctacactaaaggaattacataatcaaacaagggtatggtaataccttcgtcccgataggtatgtctagattcctcaataggtatgttcagatttgtagtttacaatgtgtctaattttattttagttactatacattttgcgtaattccaagaaacagagtacaaattaattagtttatgcgtgtatgcgtacacgagtgtgtgcctataggcatgcatgcaagtgggtagtcccactatcaaaaaaaaaacccgcttgcatgctagtctatttttttttgcatgatatatagtacgaagaaaaaataaactagaagtgggataagcggggaaaaagcgcgcttgtccgcccctcttgtatccctatgtgcctactcatcgtttactaactaatgtaggcgtgatgtatatagttcgtatgtatacctgcgacgtcgaggtatggcagcttcttggccggcgagaaggccggcgagcggaggagcggctccatctcgaacccgttgggcaccaccacgcccaggtacgggccccgccggttcacttgccggacgccccgcgccgcgtccgccgccacggccgccgcctccgccgccacagcagcggccgccgccgcgaccaccaacagcaaagccagcgtcgtcgtcgtcttcgccggcgacgacgacgaccgagcagccatgtcgttaattaattaaccttgagctaatgaactaagctaataacgcgtatgcgtataacgtgacgaatcgaaatagctctagcaatcgatcatacaagtctcacacaagatgtgtgtgtgcgcgcgtgtgtgggaagaacgagatgaagagagacaggagaatggtagggtttatatatagagctaggaaacaggaagaggatttgatttgagtcagagctcaaaaagaacaatcgtgctggccatctccaattaaatactcctatttagcttccaggacaagattacatgaatggaatcaatgcaattacactaaaagaaataacagaggggtttctatagatatatatatccggtagcgtatcctgtgcacatgctcaccttggtgcactcatgcactcacgcgacatgggaccttcgatctccatcggacggatataagatgagagagtcttctttttacaaaataacccttcgattcatcttcttgtctcccgttcaacccctttccccaaatctatcccctctgtgaggcgtccatggcagctttgaatctctgaaaaataaaacaatgctcgacggagatggccgctagaaattaagattaatcaagattccagcatgcagccgtcaaatccttgctcaacgatatgtatgatctcaacctcaggatcttttgcatgatatatatggcatgccaaaatttcgaatcaaacaagaaattccgatcggatatgccatcgatgcacacatctgcaacccccgggcaaagactcatccattccatcccatgggcaagaactcttctctctacagagtcaggtacactgcgccgcagctgctccatcggccgaacaccatggccgtcgccctggacacgctcgcccgcgcatcgtccctctccaacaagctggacaaccacacgcaccttgaggcgtgacatgccactggccgcgccgccgcgctctggatgtgatatctctgtcgccaaacatggcttaatttgagccgccattgacgtcagatagagattttggggaatacatcttggtaaggacccaacacgggaagacaaaaggaatcaagggtctatttacaaatttacccgtgtatgtgcgggtggttttatgaaaaaacgtccctttgcattacatccgtccgatggagattgaaggtcccatgtcgcgtgagtgcacgaatgcaccaaggtgagtgggtacacaggatacgatgtctatatatccccaatcaacaaatatagaaaatacttcatccgtcctaatatatagtaatatagaacgtgtcattatgaatttaaacatgtatccatgtatctatatgaagatattgctgaaacgaaggtaataggaacgtaggatatatgttatagtatttgacatataggcctgcagcgttgtcaagtggcaatgcaattactatatgattcagcgctgagcaatatgaaccaattaaccagatggcccgtccacgtacgtaagcgtaactacagctaacgtgccagtttgattaacgattatatttgctgaccaatacattgtgcgggagagggcgcacgtttttgtacacacgtcaaaaatgggcgcatggttttagactgacttggaatagtatccatcatatcgcgtgctgcttgccacttgagatgtgtgtggtcatgaacttgactggactttaatttgcatggaccaaattaagctacagtacttgatcgagtacggaaaattaaggaaagcttcttatcttgttcttatttttttttcctttgagacaagagacttgtatccttacttgaacgagagtacaagacgaaatgggcaaggatccaacttgtattatttgattgagagtacacggcgaaatgggccttcaaagtttgcacgtggtgagagccgggtgcacgtggtatgtctgtgtgtgcactagccataggcttaaaacgagagggctgcagtgcgcagtattgt

SEQ ID NO: 24291 - DNA, 1078 bp, Oryza sativa
cggttggtgctaccaaccgggactaaagatcttaactttagtcccggttggtaataccaaccgggactaatgatcccggtgatctttagccccggttggtgctaccaaccgggactaaagtcccacccctatatatatgtcttcttcctcctccagctgcccgagcaagcttcaaaattacttcaaaaaagaggggaggtcatgccaaaatttctattgaatttattttggtgattacatacaaatcggaggtgccgtaaaaggtttgcaacttcatcctccaatgttttttttgtcatactacatttgcacctatgttttgcacacttttttttgtctccaaaatttagttgtaagttgatgagagagaaaatgtgtgtggggaagaaagaatattaaaatttagttcatttgctaaacaaggtttttataaaatagttgaaaaggaaaactctagtgaaagttaatcttaaataatagaaaacaaattaaaatgaaaattaaaagaagtaaaacacattaaaattagtttaaaactttacaaatagtttttaagaattatttggtgtaatattttatgatttttgtatgaataaagatatcttataattattgtatgactgtcattattgtaagaataattatttgtgtgcggttttttttgactcatgtagatggatcggcaatggatgtacgctgaccggcggtccaaagagtttattgacggcgtgcactattttttgagagtggccgaagctaacaggcaaaggggttttatttgttgtccatgcaataagtgtaagaatcagaaggagtattctgcatccaggactattcatttccacttgtttgagtcggggttcatgccaagctataattgttggacatcccacggagagcaaggtgttgaaatggaagaagatgaagtggaagacgacaatattccggactttgctcagtatattggatttgaaggaaatcaaacgggcgaggaggaaatagctgctgatggtaacgacgttgcggatgatcttggtcagatgttgcaggacgccagggaggactgcgaaagtgaaaa

SEQ ID NO: 24292 - DNA, 2133 bp, Oryza sativa
  unsure (1)..(2133): unsure at all n locations
agcgaaagtcatactcaaagtcaaaaccagaaccagaatccaagccagaagcaaaagcagaacgacagccagagtctaagcccgagccaaaacccgagtcagccccaaagaaggaaacgccttcgtcggcctacccatgatggagatccatggagatcgagggcatcttgcttgctgcacgatttagctactgatgagattattttgctgaaggtcggagcactaggaaatggccattggccatttctggaataaataagtgacgacctagctttattctttgctttatttccctcattctttcatgtttttttccggatgtgccactgcgccagctggtgtaattcacttatttcttatgtatctatatctatgccattttttttctaataatacatacatatatatatatatatatatatatatatatatatatatatatatatatgtgcatttttttctgcccagtactacctttataattatccctcctgttgtttattctagattatattgtggctgcctaacaaagttccatcaggaaaagggtgtaacactgtaactatctaacactgaactatcaaaattgttcgtagttactattacattttcgattagtctttgtaaatacagtgctaatggcacggcttacttatatatgtaaaacaatcatcaagcgcaatccaatctgtacctggtttgatcgagtctgcaggttcacggttaacaagctcctgacctccattaattntagtaattntactatcttaaggcgacgacgagcggtaccgcaatttcgaatntaattacacttaattattttggtgtcttttaataaccgtaaaatttctccattggtaaacctatcgttggaactgatccgcactatattggttaattaatacaagttcctactcccttcttctgacgccgtagacttgtttaaacttgttacacacattcgtcttattggaaaaattaaaataaatatgaaggctttccatatcattggattcattattaaatatacttttacatatacatatagtttacatattcacaacagtttttcaatgagatgaacagtcaaacatatttaaaaaatcaacggcgtcaaatatttagagacagagggggtacttcctcgaaaaattttatcagctggtgagaacaaatattatttgtcagtattataacaacatttggcttccctgatctaataatagctactacctttcctaaaaatatattaaacgaacctatgtgctatcagatcgtgtccaatatgaatgcaggaaactaaatttctacataaattattttcacaaattccttaaaaaatttccagtctctgattgggttgagctacgacttatttgctgtgaataacgaaaaaaatattatgggtaaacttttatctgtattattcatggttttagaagacaatattaattagaaaatggactacaataaaaaaaacccttaaaagccattgagcaaacaactagaatgcgagttccaaaagaaacctgtaggcctagagccttatcgtttttgccatacaacgaaaatgagtcattgctaaaatttaaattttaaaacattattttaaagctaattttagagtatatttaacgtagtgtatgttttacaatgtgttttaagttactaaggataagtataaatgtaaaaatttacatgcaaatcatttttttagttgtttataaactgattgacataagtaaccagctcttggtcaaccaggtgtgcctgctaattactgtagtaactccgtatggacagcattgtcatgagtttaccctctgcacaaacgagaaaatcaatacggtcagaactgtgcattcatgtaactgtgcatccatctttatgagtaatcagctctgttaacatcagtgattagctccaagtcctatcactcacgcgatgtttacctgccattaaccatgttccgtacaatggtaagggcaagtttaattaatactccctccgtcccacaaaggtggtcgctttaccctgttgaaattgtcccaaaaagcttgatgcctaaactgcctcgttagaaaagtactcgtacaaataaaacgcactgaagtgggtccatctaataccatc

SEQ ID NO: 24293 - DNA, 3898 bp, Oryza sativa
  unsure (1)..(3898): unsure at all n locations
ttgttctggatacacaagatgggtacaacgacgaccagttctcctcagaccaggagcttgtgcccgagactgagttccaggattgtggggaagtggaggagaagggtggtaggattcaagactatggcgaagtggaggagaagggtggggtttcaagattgtagggaaacagaggagaatgtcggtgggattcaagattgtagggaagtggagaagggtggtgtgatcagtggcagcagcagcatggtgcactcacatcatggagggatatggcctactgcccggagatgcgggcaacagcttcgagacaagtgatttgatcgtaaatccggccacttattagaagaaggcaagaatataatctatacgcaagatgggtttgatttggatgagtacgagttttggcctgatttggatatgaaggcaacgacttgatagtttattggttcaatgattttgtgcgcaagaaaatggtgcaagttggtgttgcactgcaggggaagggaggcgatgaaattggcgagctgatgagctgcgatgtggctcttggcatgggacgagctaactcctccgttaccacggtgtcctctttgtgcgggttcttgttagtcttgatgtactaataggaatccgcacaaaggagcaaccgtagtggagaaagaggaacactatcaaggttcatagataaactatgagatctttcatgttctttaaagttttcctagctattagagcatgttggcaccaagaagatgcaagaagaacaatatttattcagcaagataatgctagaacgcttgtccgaatcgatgatgaacagtttggtgttgcagtagctcaaatgggtcttgctattcgtctcgtgaatcaacctccaaatttccctgatatgaattggcttctttggctcacttcagtccttaacatctactcgggtctctacaaacatggaggagctagcaaagagagaatgttcataaggaatacaatgactacgatccaaacactcttaatagggtgttcgtgggagtacaaagctgctatatggaggtaatgaaaactagtagagggaataagtacaagatccctcacatgaacaaagagaagctagaggcacttagcattcttcttaaagcgctttgttgtgatcatctgaaagatcaagttctctaattttgtgttaggaggagttttggtgattaataacaatggttgttggaactaacctttgctataagtttgtgatgacagattatgttctggcctcaagcaaaaaaagaaggttgatggctcaaatgtgagaatcaagtgataggattgtggattaatgacaaaaaggatgatacctcacatattgggaatcaacaagagtcaaatgttgatgatgagaatacttgatgacatcccatcatgaggtgatggacatgttgaataatatacaccatggttcaagattgttagaaataaagatggtgtgagaagctagaagatggattttaccgatggatgagaattgaagtcaagaagttgaagatgcgaggtatgaagtgactacctatggcaagacggtgaagcgcaagcgatgctcagctgcgatggaccatgcagtagtgaggacaagcaaggggcttgacgccgacgaaccgaaactggtggtgaagagcgagtgaagactttgtcgtgatggaccatgcgagaccatttgaagccatggattatccgcatcaaccttttgagaaatgaaagatgaaatgtcaaagatcaagaagatgagattttcccaatgatcaaatgaccttgacgttggtaaccctccaagtgaagaaagaaaatggtgtgatggtattcctgctggtataactttcctttttacatttgagtttaggatgtcgtactattaagagggataccacatgcatataataggtcaagtactagtgctcaaaatgtttcatctttgtgtgaattgaaaacgtcaaccaaaattctaactccgggttgtttcacatgtcacaacaattacatcagcttcctttacaatttttttcaacatctcttgaagattttggaccatgttttatgttggggttgatagcccataaaactagctttccataaatattatagaaattatttaaatcacggaagcattcacaatacattacattccagaaacaattttgcatgtacagttctatttaattacccatcaaatcttattcacaatgggcgtagagcctcgcgaaacgtttccaaatgaattatctatcacataatggaaatatactgtagtatacacgcccataaatttaccgtagccttatgtcccataaaatccatttattaataaacattgagaatatataccaatcttacttccttatagataaaattttattttaaaaaaattgacacatagggtgtaatgtagtcattatttatcatatcataaatttgaactaaaaataatatttgtatgaaataaaaaaaagaaaaatgtcaatagagtgtaaacgaacaaattgtagaaaatcttataatttattagaatcactgtggttcttaattttcccttaaattgaggcaaccatacataaccattgcatcatttttaagtgaccacatattaatagacttccctctattctatgccatagcagttgattgatggttttaaatattatattccttactattaaatttgagtttaaaaactcaggtcgactaaatgtatttaaaaaatatatatcacacatattataggaagtgaggtctagaatatatctactctatttttgttgattcatatgtaagtacatacaactaattgtgtcaaatgtgaactantaaaaaaaaggaataaaacacatttattgagcataaccttttgagatttgtaaaataagagcccacacattcaattaaaaagaaaacaacaccttactttgtaatttagactganaagacctatgtcttcttaaatgatgaagaagaaataatgtatagataggtgcttatatagattaattaaatatttcatattataaactaacaaatatcttaaaagaaatatttaagcaatgattcatgaatgcccgcgcgaacgcgtgggctacctcttctagttaaaataacacgtaactaatgaattgattaatgaggagaggtgctgactgattagcagaaagtaattatggttaccagttagtgtaaagacaaattcgagaaaggaagcatgcatgcggaacactcgatgagaggttggcagaggcggcttgctagagaccgaccatatcgattgggtggccgggtgtcatggagtggagccacgtgacaacacctgcttgcctttcgccagcaatgaatcccccagccatccttccatccagttcccaggctataaatcccagccacccttccatccattgccacatcgctcagagaaacacgcacacaagaaacacaggagtgagggagaagaagataagggaagagagagcgagagagagagagagaggggggtagcaaagcaacttagctagctttgctagccatggcgaggagctctccttgcctcgccgtcgctgtgctcctccttggagtggtggtggcggcgattggagcctttgctgatgaagaagcggcgagcggttggggactagggcatggcgcccgtttcctcagcaagcgaggccgtgctgcgtatgagaagtcgtcggaaccagaggcaaaacctgcgtcgcagcaagaaccgaagtcggattcttactcgcaggcaaagcctgggccaaaagatgagcccaagccggaaccagaggcaatgtctgcgtcgcaaccggagtccaagccggcaacttactcggagtctaaacccgaatcaaaggcagagcctgaatca

SEQ ID NO: 24294 - DNA, 5989 bp, Oryza sativa
cattagctattttgtgtcaagtctcctgaatgtgtaacacatctgatcaccgccatcgagtggtttgacaggcacatctcgggctgaagttaactggcaggctaaaggcccagcaattaccaaatttggttgttaacaggtctcatatatctttctctcgcagcgtcgaatgccttattatgtttgatggaagaattgatttattctattcatccttcaaatataataaggggttcggagtacttccgacacgaaccaattgtagaaaatcttataatttattagaatcattgtggttcttaattttccctcaaattgacacaaccatacataaccattgcatcatttttaagtgaccacatatcaatagacttccctctattctatgccatagcagtacatagatggttttaaatattatattccttactattaaatttgagttttaacactcgggtcgacaaaatgtatttaaaaaatatatatcacacatattataggatgcgaggtctagaatatatctactctatttttattgattgatatgtaagtacatacaacaaattgtgtcaaatgtgaactaattaaaaaaaggaataaaacacatttattagcaataacctttttgagatttgttaaaataagagcccaacacattcaattaaaaagaaaaacaacaccttactttttaatttagacttaaaagacctatgtcttcttaaatgatgaagaagattaactttatagataggtgcttatatagattaattaaatatttcatattataaactaacaaaatatcttaaaagaaatatttaagcaatgattcatgaatgcccgcgcgaatgtgcgggctaccttcctagttaaaataacatgtaactaatgaattgattaatgaggagaggtgctgattgattagcggaaagtaattacggttaccagttagtgtaaaggcagatttgagaaaggaagcatgcatgcaggatactcgatgagaggttggcagaggcggcttgctagagaccgaccatatcgattggctggcccggtgtcatggagtggagccacgtgacaacacctgcttgcatttcgccagcaatgaatcccccagccatccttcgctccagttcctaggctataaatcccagccacccttccatccattggcacatcgctcagagaaacacacacacaaggcacacaggattgagggagaagaagataaggagagagagagagagagggggagggagggaggggtagcaaagcaacttagctagctttgccagccatggcgaggagctctccttgccttgccgtcgctgtgctcctccttggagtggtggtggcggcgattggagcctttgctgatgaaggggcggcgagcggttggggactagggcatggcgcccgtttcctcagcaggcgaggccgtgctgcgtatgagaagtcgtcggagccagaggcaaagcctgcgtcgcagcaggagccgaagtcggattcttactcgcaggcaaagcctgggccaaaagatgagcccaagccggagccagaggcaatgtctgcgtcgcagccggagtcgaagccggcaacttactcggagtctaagcccgaatcaaaggcagagcctgaatcaaaaccagagccaaaggcagagtccacgccacaaccagaagcaaagtcagagcctaagtctgagccaaagccaaagtccgagctatacgcagaaccaaaatcagagcccaagtccgagccacagtcagaaccaaatcccgagactaaggcggagccaaagtctgaacccaagtctgaacctaaatcagagcctaccccacagactgaaccaaaggcagaatcgcaaccagaaccaaagacagagccaaagtctgagtcgaaggctgaaccgaagccagagcgaaagtcatactcaaagtcaaaaccagaaccagaatccaagccagaagcaaaaacagaaccacagccagagtctaagcccgagccaaaacccgagtcagccccaaagaaggaaacgccttcgtcggcctacccatgatggagatccatggagatcgagggcatcttgcttgctgcacgatttagctactgatgagattattttgctgagggtcggagcactaggaaatggccattggccatttctggaataaataagtgacgacctagctttattctttgctttatttccctcattctttcatgtttttttccggatgtgccactgcgccagctggtgtaattcacttatttcttatgtatctatatctatgccattttttttctaataatacatacatatatatatatatatatatatgtgcatttttttctgcccagtactacctttataattatccctcctgttgtttattctagattatattgtggctgcctaacaaagttccatcaggaaaagggtgtaacactgtaactatctaacactgaactatcaaaattgttcgtagttactattacattttcgattagtctttgtaaatacagtgctaatggcacggcttacttatatatgtaaaacaatcatcaagcgcaatccaatctgtacctggtttgatcgagtctgcaggttcacggttaacaagctcctgacctccattaattttagtaattttactatcttaaggcgacgacgagcggtaccgcaatttcgaatttaattacacttaattattttggtgtcttttaataaccgtaaaatttctccattggtaaacctatcgttggaactgatccgcactatattggttaattaatacaagttcctactcccttcttctgacgccgttgacttttttaaacttgttttaccattcgtcttatttgaaaaatttaaataaatattaatgctttccatatcatttgattcattattaaatatacttttacatatacatatagttttacatatttcacaacagtttttcaatgagatgaacagtcaaacatatttaaaaaatcaacggcgtcaaatatttagagacagagggggtacttcctcgaaaaattttatcagctggtgagaacaaatattatttgtcagtattataacaacatttggcttccctgatctaataatagctactacctttcctaaaaatatattaaacgaacctatgtgctatcagatcgtgtccaatatgaattcaggaaactaaatttctacataaattattttcacaaattccttaaaaaattaccagtctctgattgggttgagctacgacttatttgatgtgaataacgaaaaaaatattatgggtaaacttttatctgtattattcatggttttagaagccaatattaattagaaaatggactacaatagaaaaaaacccttaaaagccattgagcaaacaacgagaatgcgagttccaaaagacacctgtaggccttgagccttatcatttttggcatacaacaaaaatgagttattgctaaaatttaaattttaaaacataattttaaagctaattttagagtatatttaacgttgtttcttttttcatttagttttaagttgctaagcataagtatacatgtaaaattttacatgcaaattatttttttagtcgtttataaactaattgacatatataagcagctcttggtcaaccaggtgtgcgtgcttattactgtagtaactccgtatcagtatcctgtatcctccaagcgttacattatcctctctcttgttttctcctcttccccatcatgttctgttcttcctccatgaagcttctcccacctaacaccacgccacaccaacccccatccagttccccacaagcaagccacatccagcgtgcgacaacatgtccaacggcggtggcggaaaccctctgggcgctggtgacgaaaaccctaggggcggcggtggtgaaaacactatgggtaccagtggcggaaaccctaggggctacggtggcagaggccctaggggttgcagtggtgaaagccctagaggctacagcaacagcaagcctacggggacggtggagggttgggttgcggcgcggtgatgacggcgaaggagggttgggttgtggcagcggcgataacaacgaaggcagtggagggttgggttctggtggcggcagcttaggcaagtgggtggcttgtggcggtgatgacggcggtgggtttgcaaagtgcctcctagatgcagtaagcaacaccgttgagacaagtagtactcgcgaccacttattggaagaaggcaagaattttgttttgaatacacaagatgggtacgacgacgaccagttctcctcggactaggagtttgtgcccaagactgagttccaggaatgtgggggagtggaggagaagggtgataggattcaagactgtggaaaagtggaggagaagggtggtgggattcatgattgtgaggggagaatgtcggtgagattcaagattgtagggaagtggagaagggtggtgtgatatgtggcaacagtagcatggtgcactcacatcatggggggatatggcctcctagccggaggtgcgggcaatagctttgaggcaagtggtttgatcataaatctggccactttttagaagaaggcaataatgtaatctatacacaggatgggtttgatttggatgagtacgagttctggtctgatttggatgatgaaggcgacgacttgatagttgattgcttcaatgattttgtgccctagaaaatggtgcactatggtgttgtacttgttggaaatttggtcatatttcggcatattttaatccaaaatgacaagataataaacatgacatttacaatggaatttgatccaatgatagttgtgaatgtaatcaacatgagcatgcttaacgtagaataagcatcaacaatcacataataacgcaatgttgacattgcgatgaacagtaaaacttctaattgaaataatgtaagaaggttagaccccaagaatggtcctccgctagagtttgaggcagtattgcctccgttggtgttgacgggaacctccttctccttgtctccagtgttgccgttgtctccagtgttcgacatattggtgaagacgaagtagacgttgactaacagtgagtgcgccttgcgctcccaagaaacctgatcgcccgcccgtccgtgcaaacgtcgcagcagtgcgtggtttcggaggcctattctcccaatgcgtgtgcacacactcgtcaggatgggattatcgtagcagcaatagccttggaaatggatgaaagtgtctcacttctacttaggcagatcaaatccattctcattttatatgaggaatggaagatgaagagtaagagtcatggaataagaagaaaaatagagtaactaattctcatcaattagccatgaaccatcctccactacacaaccatcaaccaaccatcaattaggagtaattgatgtaggttaccaatggaataggaagaggaatagagcaactaattgtcatcaactggccatgaaccatcctccactacacaaccatcaaccatgcatcaattaggagtaattgatataagttaccaattccctaatcaaatggattaattctcaaaactcctcatcccattgatatctcataagagaatgaatacacatgaattcctagcgtaatgagccttggaatttatttgatttaattgatttaaatggatcaattacccaattaaatctaacagtactactagggaagggaggcaatgaaattggcgagctgatgagctgcgatgtggctcttggcatgggacaagctaactcgaccgttaccaaggtgtcctcttcgtcagatgcttctttgtgcgggttcttgttagtcttcatgtactaataggaatccgcacaaaggagcagctgtaatggagaaagaggaatactattaaggttggtagagaaactatgagatctttcatgatctctaaagttcttccagctattagaccatgt

SEQ ID NO: 24295 - DNA, 17231 bp, Oryza sativa
atatactagctaataccctctatccgatgccctcctggtacttcgagaagccacccctgactgtcgagttccttacgacagcctgtcatgaccatacaaccggtgctaaatacggaggaataccctccctagggaattaacttaggattatataccggcgcggaggaatacccgtactaagttgtcaccatcagcggcccacctcttatccgcaatatataactccaaatatagatatctcgtaatctagacaccacatctaaactaccagatactactctaatatcatcgtcatgacatagagtaattgcataagcaaacactatacccgtactaaagcatctcccagataagctagccgtatattcagtataacatgaacataatgtaaagtagttactcatatactcggaaagtatttcaataccataaatgtatttagaagagtattctaataaaagtacaaagcttacaaaagagaagagaaaagttactagagccatacccgaactcttccgaaggcttccggactcctgatttctactctattcctattccaccagctagatactactaaactaaacttgagagaaatgagagagctattgcttgatgtgtgtgtgtgaagtgagaaaaggaactccttttatagcttaactatgatggttgtgacggttggagtggtctgtaataccctccaaccgtcattggggcttcgtctcaaccgtccagccaagacctggatacaacggaggcgagggaggtcggccgaaccccctggttcggccaaacatagggccagcccaaccaacccatggtttggctggcggcctcctctgttgttctactccgaagacttgtgaattttggcccagtttgtcgtgtcaattcttagttcttggcccattcatacataagtctggttctcgacatcgtccgattgatttattgtctgagttgatgtcgattctcctccactttattgttattctcttcaaaaggttagtagacctaatactagtggaatattattattctaacatatttatgcattgcaagcatcaatagttctcctttattttggtaatattgacggtcaaaactgatcgataatgaccgtcaacaatattcgtctcgtgaatcaacctccaaattcccgatatgaatagtttaaaccttggcttcttcgcctcacttcagtccttaacatctactagggtctctacaaacatcaaggagctaagagagaatattcacaaggaatataatgactacaatccaaacactcttaatagagtgtttgtgacactacgaagctgctacatggacgtaatgaagactagtggagggaataagtagaagatccctcacatgaacaaagagaagctagaggcatgtagcattcttcctaaagcactttgttgtgatcatcaactctatgagagagccatacagcttatagttgactaattgtgcacttgtgtcatctgtgtgtctatgtaattgtggaaactaaatatataagttgtttggttgtattaatgtttcatccaaggttatattaacaagttgactattcatatgcacaatcacaaaaaaaagaattagtacaaattaagagatgcatggaatttcattaaaatgttttcataactatagtgctaaaagatgccaccaaaacagaaccacatgacgtataacatcataggatgaactatgcagctcattcattatgagttcatactttggactaataacaagttgtaggtagatcgcacataattcatgtcacataatcagcacactacttttttttggatggaaacactaggtgtaacctgggattagtagacaaagcatttccaacttgatgtcatcaatgggctcgtattcttcctcctatgaataaccccaaaggtctataccaccaaactgatcaccacctttttctttgtctctacgcatctcctcgccatgtatctcctcctcgttgggcatgaattggatagacacctcctcaacatatataaaaacaaactaaaactgaaagtaacaacaataaaatagcagtgggcagtacactctatgtccagtgcttgcacaacatcatttatttattacagttgatttttctctagcgtaacctggacatattcaagtttaaatgacccaaattttcatatcaacaattacatcagtctgaacgggttttctaatgtcaactttgtttttaccagcaccatgctgctcaatttaaatgaaatttttatttggctagataggtggttttgcttcattaactgtaggaaaaaatagaatcattagtgcttacttatattggggtggttatcttttgctttgtagcttaattaggtttgaacccataaccatatcttaaccttgaactagacacacagcattggcacatactgccaactggtatagtggtgtgggccattatggatcattgtaaatttcacagaaaggataagcaaaacatacttaaatgatgcgtctgtgaatgtcatttctaattaagcctcatgaaagaacaaaaagtgatacgattatctatggaaatctattataagaacataatgttacacttttgcatttatagtttaaattcaatattttcaaggacagtagatcttttaatatttgaaccttatagtttatttagaggggtatttctgacttgggacatggaagaatagaagcagcattctaaggtctttagatttttcccatttttcagtcaactaaatctctaattgattaactatcttaggccctgttcgtttcttctacgagcagaggataaaattttggatactcgtggtatgcttttcaaactgctaaacggtgtgtttcgtgtgaaaatctatagaaagtctctaaaatatcggattaatccaattttcaagtttgtaataattaaaacttaactaatcgcacgttattaccacctcgtttaccacctcgttttgcatgaaacacttaatctttatcttcatcttcatattcaggagattcaaacaccactttaatatgttcaaaaactagcattttataatccactacagcccaattttcaagtcaaaacttcatgattaaaagcatgcaccttgctttgctcgttgatatggaggactccaccctgatgtgcttgcttagtccagcaccgtgattggccattgtccctcgccgcaggtcacctctatgtgggtaagaagcatccaatgaagaggacgccttggtaatggtggagttggctcatcccataccaagagccacatcatagctcatcagctcgcaattttcaccgcctccctacccgtgcagtgcaaaaccatcgtgcaccattttcatgggcacaaaatcatcgaaccaatcaactatcaagtcaccgctttcatcatccaaatcaggctagaactcatactcatccaaatcaggcctatcctggatatccaagattatattcttgccttcttatactaagtgatcagatttacaatcaaaccacttgactcgaagctgctgcccacacctctgggtagcaggccatatccttccaagatgtgagtgcaccatgttgctgccgccacagatcacactacccttctcctccatttccctacaatcctgaatcccactaacattctcctccgtttccccacattcttgaattccaccacccttctccgccactttgccatagtcttaattctatcacccttctcctccacttccacacaatcctagaactcagtctcgggcacaaactcctggtccagggagaaccggtggtcgtcgacttcattattggaatcgggggtgaacttgaactggtcatcgtcagacccatcttatatatccagaacaaaattcttgccttcttccaataagtggtcgtatctacgcgatttccatatgcctcaacaacattgcttattgcgcatctaggaggcactttgcaacctgccgccatcgacatcgtcacaacccaaccttttgtgtatgtcaccgctaccaaaacccaacccttccccaccatcgtggccgctgctgccaccacatcccaatccaacgtcgtcgtgttcgccgcgaccgcaacccaaccctccgccacacccctaggcttgttgccactgtagcccctagggcctctgttcccgctgccctagggtttatgccgccgtcgcccctagggtttccgtcgccgccgcccatagggtttccactaccaccgctggacatgttgtcgcacgctggatgtggcttgcttgtggggaactggatgggggttggtgcggcatggtgatgggagggagaagtgatgcactgctacagaaaacattttcctggacgctgggcctgtttgtttccagatgggccgtaagtggcgccgtctggaaaaatcggacgactggcatcggactgtcgcccgcacgggaaaatagattatcccgtgcgggcgtcttaacccgaccgcaccggaaaatcctcattatcctgtgcggtcgacttaagtggaccgcactggaaaatacctctctctcttttccctctcacccatttcaaacttcacacactctctctttatttttcctttttattctctctctctgcctttactcctccccatccctctctctctgcctttactcgactcccctccccccctccctccccaccgagcggcgcggcggtgcggctgcggcggcggcggcgaagtgacagcgcgccgcctgagtggtggaccgcggagctcgcggccctctcgctggcatcctgaatgtcgacaccgtgcgccgcatcatcaccgccttcgtggagcgagactcggcatcttcgggcggcgcgaacggctggagccgaggcactacaaggcggtggtggcgcgatgcagacaatggcgaagaccatggacgaggtcgcggcagagatcgcgacggaggcagcaagtagcagcatgcatgcatgagcaaatgaagctacgcccaggaaatgcagtagcagcatgcatgcatgagcggctgcggcggggagcggcggctatgcgacgacagcgatgacgacgagagcggcggcgtgacgacggcgatgacgaccgtggcgcgacgacggcgacgacgacggcgactgctggcagaggcagagcggcggcggggggacaagcggctgcgcaaccaccatgcggatcggaatcgggatcgggatacggcggctgcgggatcgggatattttttgtttttttgggttttttttcttttgtttccgtgcggttggtataatttgaccgcacgggataatcgattgttccgtgcgattacgtcgcccgcacgcgaaaatgttgattttcgcagacacctgggtgtagacgggcgctacttctgtatagaaaaatagatttggaccgcacagaaaaatgaatcttgtagtagtacgcgatgggagaagagaaaatgagagaggataaggtagcgcttgggtggaaaattcgtatggagcagaaacattcgacggtgctagatggacccaatgtgtgttcttatttttacgagttcttttgctgatgggggagttcagagcgtgtcttcagggtaaagcgaccacgagggagagagtatgaaacttctctgacaacatctcgtgtacgataagctcctctgttgacgagtgacagatacccccttcgtttcacaatgtaagtcattctaacattttctacatttatatagttgttaatgaatgtagacgtttagattcattaccaactatatgaatgtgagaaatgctagaatgacttacattgtgaaacggaggaagtaccattaatcccggctggaaatcaagagagcatttgtgcaactgggcataggtacgcctaacttaaattcccaaatcttgagttgcagagttgagagcgatcgatgggatcaaatttggttgcagttagcagccgtaattaggcagccaatgcgatggtacaacaaggggaggccctaatgggcgatcaagcgatcatatccgcccccctcccctatactcgatacattcctccctcatctcccccctttctcctccccttattctcttcctactacagtacatcacaaaaaaaatttaaaaaaaataaaaaagttaaaaaatttatgtatagaaatactatatataaaaaatttgaattcaaattcaaatttgaatcgggtatgtaaacttttgacttataaactttgggtctataaagtttaggtgtataaactttagatgtatagaaatactatatatagaaaatatttgaatttaaattcaaatttgaatcggatataattcaaatttaaatttgaatcgggtatgtaaacttttgacttataaactttaggtctataaactttaggtgtataaactttagatgcataaaaatactatatatagaaaatatttgaattcaaattcaaatttgaatcagatataattcaaattctaatttgaattgggtatgtaaacttttgacttataaactttgggtctataaactttagatataaactttagatgtatagaaatactatatataaaaaatattgaattcaaattcaaatttgaatcggatatataaacttttggtctctaactttagatgtgtaactttgggtctctagatgtgtaaatttgaggtgtataaactttaggtgcataaatttactaaaataggaaagtaatgcggtgccaaaaaaaaaggaaaccagtggagagagggaggggggaggggaattgatcgctacccccatcctaggcgatcgatcgccgattaggatttccgacaacaaggtcgatcactacagtttagtcctacctgcagcggatttaatttggaaactactctatcctaatttaatcatccactaaatagaaaacaccaaaatatccatattattgcaaaattaatcatcatcgatcaatgtcctatatccaacagaaattaattcgcactttaaatgttgcatgggttaaaccaacataaattaatcttgattggctacatacatgcagaacattccatgatgaacatttactctctgcacaaataaagaaaaagatattttgtcagatgatattcattttgagaaaacctagataatgatcaaactaggatagatggtgtttttgtactgatgaaactattgatagataagtaactccacttgtccatgacagaactcgcacagtatagacggcatgcatgtagtctcgtagactcgtatacatgcaattgcaagcggacgacactagtatacatctcattcctttttaagcaatatatacttccttcttttctgtatttaacgttgttgactttttttttttgcttgcattgaactattaatcttatttaaacttctttcaaatatatatatatatatatacatatatatatatatatatatatatatatatatatatatatcatgtttaaagggcatgtaatgataatataaatcacaacaatgtaaatgataattatataattaattatgctataagacgaatgatcaaactcatataaaaaataagtggcatcaaacatttaaacataaaccgagggaatacaatatatacatctcagtgtgtttcttgagtgttctcagtggtctctatagtaccagtcacgggtggagaagtggtttactctcctaaaggtctctatagtaccagtcactggtggagaagtggtttacactcttaaagatagatatttttagtctcggttaaaataatcgggactaaagatgatctttcaccaaccgtaactaaagatggtaatgccaggtatctttaaggtgttaccaaccgggactagagttttttttcttttttttcattgttttttttgcttcttgcatctattggtttttgctcccaaattctcaaatctaattgaaatccccaaagtcccaaatcaaattaacatcacagatctaattgacattacagatccaattcataacatcctcaacaacaaaattattcacaaaaacataacaaaaatatacaatggagagggattcacaaaaacatcacgaaaaaaatctgccgccatcaatacctccgcagcccgcctcgtgcatcgcccgctgcccacatcgcccgccgccgcctaatgcctcccctcccatcacatccagtggaggagagggctctgccgctgcctcctctcccacaacggtcgtcgttgcctgccgcccccctcgtgcctcatgggcgcccgccgcccacatcgcccaccgccgcttgacggggctctgccgccgcctcccctcccacaacggtcaccgccgcctgccgcctcccctcctgctagatccggcggaggggacgccggatccgacggagggggcgcccgccacatcccctcccacaacagccgctgccgcccgccaccgccttgtgcgccgcagctgccacctccgagccgccgggccaccgccaactccgagcctcccatcgccgtcgccgggcgcgggggagggagaggcctcgagagatagagctgagagagggagagagagagagagagagagctgtgagaggaaagaaagtgcggtggaaggagagggagcgagagaaaatattgacgcatttggcgagagagagttcgggaatattatagacgcgcagttgatttttttagtcccagttgaacttaccaaccgggaggggtcctgacaccgcctgtcatgttttaaccaggactaaaatgatctttactcccggttgatgttaaaaaagtaccaccggcttttggaccgggactaatgatattctttagtctcaattccttattaaactgggactattatagattttggccaacccaccaaagatggtttctctagtagtgagtaaacattataacaacaagcagtttattgtcttttagaattttaattcaatggatacttagtttttttttttactcacatatcgcccgaccaaaaaatttgataatttagctttttttttctttgcccaattactttaattgacacttgtgaggataagatttgggaacatctgagtgaatgaaagtggatgatatcgaataattgaaaaggagtgttaaattatcaaatctctctccgccgaccagtcagtcaccaccccttcaaccgctgcagtccttctctcccatcttctcccttctgaccaacagcgaggttcatgaattgcagtatatgtcagccaccaattttctgtacccgcaatcgccacgcccaattcgttccaccatcgccgtacgttgtcatcatctctccgctgctgccgatctgctcatccccatcattaactgctgtcattgccttccccaatcgtccctttaaccaccgcccttgtctctcgtcgctcttgatcatctcctgctatatcccctgttcattctcactaccatcatatgatcctctggtcacctcttctttgatccttcttcccacaactgcagggagcatcaagaagaagactctacgctccgaagcgaaatctttcctaagtctgctccttggtttcctgattaagaacggacaacgccgccaacgtctcgagaaatttaggattataccatcacaaaaagaatgatttcactggaatatcattgcttcaaacgggttcgctacaatgccatcctaaactgtggtatgcgttctttttgttaatataaatgtttttgctttattttattttttttctccggaaccaaaatacccctgcctctatctctttctcccaggatatcgcacccgtcgccttccaagagccacgaccgccgtcgttgaccctccttctgtgtcggctccagggccagcgccggtgccgacccacacaaacaaatccagtgagtgccaaatgggcactgagttcagttatagataaatgggagaagctaacttgggggcaccactacttctttgccgtttagtccatggatgttggtactggtcatcgctgtttgggttgagcgggcggcggtggcgcgaatggagtgaaggatggcggcggtgcgggaggagggagaggaggtggagaaggtaggggagggaaggcaccggcgcctacaaggaggaaggggaaatggcggtcgcagcttgaggaagaatggggcggcggcacaaatttagtgagggacgttggaggcgcggggaggagggaggaaaagcgacggtgcgatatccagggagaaagagataggggtgttttggtcttagaaaaaaaataaaattgagcaaaaacatttctgtcaaccaaagagaacgaaaatggcattttggtgaacacctctcagtttaaaatggcattgtagcaaacccgtttgaagtgatggtatttcaacgaaaccactcttttttacaatctccggttgtctatggtacgctgtttaattaagaaggaaggaagctcgttccaaaaggttaaattgtagggttatgaaaatatagtagttctcatcttactatatggtgtccgaaagagacattacatttttttctaccatatattaccaatatatagtcacctcattaatcgaaattgaaggacaggaagaaaaacctttggttttcgcatatgaaccatatatagccttgccctctatttaatgtaataaactatatatgaaccagtggtggacacaactttaaaataaagatgtgacggagaacgaagatgttcactcgataagaacaatcaaacacaacgcatatcgtatttatagtttaatcgcataactgcctcgatcattgcttgcggcatgattgcgttgtgaagagacgaactaatctgttaggcgttacctaattttgatgatccatgactactataagggggtagggtaatcttggaggtgtggagcgacacgggtcgtagctggatcaatcgacccaccctgtataatgggtacgtagatccgccctgtatatatcattggcaaatgaaatctctcaacttcattttaggatgatggcattttgcgaaattcatctcttcggtgagatggcacgatcaatcatatgtactttttcagaactaaaaggtcaggtgtagttcactttaggtagctactcctacctagtatatgtaagttacacagaaagcagaaaaggttctatcctgaaacgcgtgtttgaaattaatttgagacactacagttcgatctaacccccatccaatttaactcttgttcgttcgctatcaaacacagacgaggcacgagagaattgaaatacacacctgctgctgctcattagtccaagtcgatgatcatatatgtctctaacgtctaaagtgcatcctcgatctgcacacggcatctacaaattttttttttcttagggcctgtttggcacagctccagctatacctcttctggagttgctccaccaaaaatagaagtagagctggatggagctctcttacaaaataaactagagaggtggagctgagtttagccagctccacaacctactccaaacccaactcctaaaggtaaatttaggagttggagctcaaccaaacatgtcttaattaatttgtcgatccttctcatctttttcacctaacaagaccgaccgccttaatttttctcgtctagaatcagatgcgatatttgacatatcccgtcatgctagctaaataacctggaggaccccatgattgttgggacgcgtacataatggcgtgtaacatcacttagcctattcggtttggaggagcttcacaggaattctgaagaaattgaactgtattatatgaaaatcctataaaatttctattttctgaaggagcccttatgttatatatactctttttagcttgtcgatcggacatccaacttcatacaacagtttcgaatgcatcgatctgttttatctttaccttttgtaattatgtatttatacaaaataatatactgaattaaatttcaattatcagaataataataaatttttatagtggttattgaaaaataaagttatatattttttcagtaatataagatttatttactgaagttattgaaaaaaaatatttttataatggttgttcaaacaagaggaagaaactatatttttcaatgattggccaaaacccaaaagtaaaggaagatgagatgagagagggcaaggaggaagaagagaaagggactgacagtgagccctcaacaagggtatttcactgtcatttctattttttctaaaagacttacatatgggtttacttttctctttttttttctgactgtagcccatttaatcaccatgtaggcacctcgtcaaatgaagatttgctaattaatgtcccacgcatgacaaaaccgcatcaagcttgaagagcaagatgaatcggttttgagggaggtaacataactttttctccttaatgaaaatattataataaggtttgaaatagggaagaataaaacaagcccgttaatgtggcctatgagcccaacaaacagtcaaatgcttacaagacaaaggaataagttcactttgactccctcaaatataactccaatctaattcaacaccccccccccaactattaaaaccaatacaatttgactcccttagtgattttggagggcgctttcactcgtggcgctttgaattggtccaacctactgagtcatcttatggggcccacccatcactgacccttatctttcttctcttccttctcttttctctcgtaactttcctctccggtggaaacaacagggcacgacggtgatgaggggaagccgtcgtcatgcacatcgctacatgagcttgaacagagacggtggtcaacaacagtggcaacgcgacgacggcctcccctctcaccgacgctagcaagcaggcatgcaaaggtgtcgcgccatgctagtcttctcttctcttctccagttcagcgggcaagcaaccctaaggagggaggcaaagatggcgtgcgtttcacatcccaggaagcgtattgctccctccaaatccaagaccacatcagagaacacctaccagccaccttcgccgctgccgctgcctgagacggagcatgaatatcgatcgccatgtccccgtctacaccgacagcaccttcgatctcttccactttggccacgcccacaccttcgagcaggccaagatgcagtccatcattttatcctcttctcttcctctacctctcttagacagatcaatactacataagtggatccataacttagagtgatccctaaattcgctcgattgtattcaatcgcgggcaccatggatgagcttggcaaaatcggccacgatgggcggcagcagaggggaggtggaggcggtggcgggaaggagggatgagcggcgcgaggaggtagtgcacgatgagacggagtagggtggccgtcggggttgcgacggcaacgtcgctggaggagcaggtctggcagctttccccatgcgcagttgagggtggcagcggaagggaggcgaaggcggtggcgggagggacggcggtgcaacgatggccttccctctcaccaccgccaccatccttactcgtgctccctcctaggggtgggcagaaaaataccaaaccgaaaagactgagaccgagaccgagaaattcggtcctaggcagttaaaggccgaattttgttcggtcaattcggttagtttcctcgggtaaccgaatagaccgaaaagaccgaattaacaaaaaaatgtctaaatgcaacctacaatccactaagttcaataggattaaactctaatgttcacatccctacttcttataggaatgcaacctaataagagtctttactcataattacttatgaattttttttgtgatttttgtattgaaatttccattatttctttgcatatatgaaaatgttgctgaatttcagtcaggaccgagactgaatttatcagtcctgatatttttgtgttgaaattcggtcttcacttttcaaagcccgaaaagaccgaagaccgagaccgaaattttcggtcagaccgaatatccacccctactccctcctccacgacggaggtgagcggaaggggaatgagggggcggcgtcacgatgatggcctcctctcgtcactatcgcgccctgcttcttccgtcggagacgaaagcgagtagaggaaagggaagacagagaagaaagataagggtcactggtaggtgggccccacaggaggactcatcaagttgaaccagtcaaagcaccgtatcagtgaaaccgacctccaaaaccgctgataaagtcaaattatactggttttaatagtttttagggtcaagatatccggtattacggtttagagatataaactaggttggaactatatttgagagagtcaaagtggactcattccgtagagaaaataaggcaggaaactcagtgggccgagagtcatatgggcttgcctccaggtgacaaataaacggaggacaagcaatgaagcaatggttgggagaaaggatgggaaaagcaacgggaggaaatgaaggacatttttttttgttaatttcaaccatactaaaattttgatgatataaaatttagcgaggtaataaactaacatagccttatcgataccatcctatcaaattttaatattttccgaagttttctctcacaaaaactccactaatatttggcaaagcttcaaaccaaacaattcaatgcttccaaaaattggtaatatcaaaatgtgctaaaattacgtagaatttgaccacgaaataaacaagctcaaaatcttgagtcaagtgtagatttctatgctgggcatggatgtactggtgctaaacattgttgcattgctacttaaccagatataaatagtggtaatggttttgagctttctataggctctatggccctttctctatgctagaattttggctcatgtgaattttatattctcatcaccaccagagtaattggcccaggccccaggaggttcttttctttggacatgctataacatatattttaaagagtaaattacacttatggtacaacaacttaatctgtgagcgcattccgatgcaacaacttaaaaattaaatatattggttcaatggcaagatcggtgcatctttgatccaaagggctccacataggaatattttccacgtcactcatccatctcagtaattttgcaaaagcgcctctctcttgttcacattttgtttcttttctcccaacaaatcagtcagcttgaggagttgaggtcgagggtgaggcaaagtggttgcctgcctgacgaatcatcaacgaagtgaggggcgagggagacttggcagtggccggcggaagtgtggctccaactagcaatgtcggcgtggtcaacatacgggtggtaataagccccaatattttagcctacaaaatgtgagggctaggcccaaaacaattggtctaagatttaatagatattttagctaaaactattttaagggctgagattagttatgaaagggcccaggctccctatcccattatcacccctagggcaacgtagtggtgttgcatggagcctacaagcggtcaggaggcgcatgggtggggactagcaggaggccggtggggaggtgccaagtagatagaagcgaccaggtcgctgcgtgcggcatgcctcggtgcctgctttgccaagctagagtccggactatcggagccgaggagctgatcgagtaggcaagctctgaatcttcttttgatttgtgaagtacacattggcccattgggcatgcttacaatataccagaactttacaatttcaattacgcttttagtcggtggcaggtctgtttaagggacaagtggatccttcttatctctcttcctctctctcagcaaacctttccgcttggtccagatgacctcatgttttagctagttggaggcattggtgggcggttcagtggtggcttcatgtctaggcttggcggcatcagatcctgcttagcggcggtcgatgcggtgctaggtctttggtttgtgcaggtattgctggtgtttgatagtggttctgttattttccctgattgtagcctttcaagactgcagtcttgtaattttttcctgctatatcgatttgaaacatcgcacttttttgtgatgttcgtttaaaaaattactctatttggatgattgagattcgcttgtttgtcagatctgaattacagtcagtactaacacacatgatattaatctagaacattacgtgtaaactactgaatttcacctaataatttttttttaagaattagtgttgtttgcctgcagggatcttatatagtgaaagcagcaggttttcttgcacgagaacgtgccttcagaaataaggaaaactagccaaatcctccaaggcatgttcccaagaaaattgacgtccgatatggtgccttctcaaaccaatttcttagattattcttcagataattaatcgaagaaagactctaacactaaccctaacagtgaacaatttatcatctaattaaaataatggaaaagatggtgttcgcgaaaaataaaataatagaaaatagttgaggcattcacaagtaatccttgccttgtgctgtggcctgagactggcacagtggcaggggcgttggtgtctcgcgacgagagggtcgagccaaagtagagatgcggggggccggagacgctgaatccaccggcggcgatggccagatgcgtaagtgcagaggctgccaactgccaagtatcagaggtcgcggacgacagacaaggagacgccgccaatggcagcggacgcgcgttggcgcacggcggctgaggggcagggcctccgtcgccgtcgcggtattgcccgccaccaaaaggacctacggttccctcttaatcggatctgatcggagacccctgctctaaaaaggaggaaacaaaaaaaaatcgacacacctgcagtatattgagtaacttaactttccaacaagttcctcttctagatcacttggttaagctggtaatgttgtgtgcgttaggttgagagctcgagtcctgttttttttgcattgttattttttctcttttaccccatctataaaatatcttataattcctccttttatactacgttgcttttattttttaaagaatatattatattcttccatagaaatgagacatccataagacgtctcaacat

SEQ ID NO: 24296 - DNA, 506 bp, Oryza sativa
cctttccgaacactactttaagatctttaaccatagcaaacactgttttcccgctgcgatgtttaggcttcgtacggtggtccgccttatgttcgaagtgcttgcctttcttccgtaccgggtggtttgctgcaaggaatcgacgatgacccatgtatacaaccttcctacagtgcttaagatacgtactttctgtttcatccatacagtgagtgcaagccttgtaccccttgttggactgtccggataggttgctaagtgcaggccaatcgttgatggttacgaacagcagcgctcgtaggttaaactcctcctgtttgtcctcgtcccacacggggacacttccttcttcccaactgtttaaggaatccctttttttttttccccccggacaaaccccccccaaaagggctttggtcttaggtacacgttgatgtcgttaccaggttgctaggggccttgaataataatcagcatcattatgtacttcctcttcatgcatagcc

SEQ ID NO: 24297 - DNA, 820 bp, Oryza sativa
ccggggaaaaggaatcccctgaatttctatagggacggcagggctataatactttgctgtcataacccctccaggggtggtgatgagcagagggtttctaagcctttctacccccactgatttttccccacgaatggcacagatataaacgagtgggaagctccagagtcgaacaaaattgtagcagggatggaatggacgaggaacgtaccaacggtgacgtcgggagttgtcagcacgtcctcggccgtcacatgattcacacggccccgaatgacatccttcccgccgttgttggagcggggaggcgcttggccttgctgacgccttggctttgggcatttatccgcaaagtgtccgggctcgaagcagttgaagcacagccgctgcggacctgaagcgtccctgcggccttgaacgggctgcacagctggcgtaggaggacgggatgcacgagtcccttgctgattctgctgctgcggctgtgggacgcgcaccacgaattgaggtcggggcgctgggcgaggttgctgctgctgttgttgctgttgcgaggaggatccccctggatagggattggtgtagcggaccctctggttagcaccctgctgattgcggaagttcgccaagcggcgcttgtgcgattccagctccttgtgcttggcctccaagcggatgctcttgtccaccagtcgttgaaaatccggatagtccccagagactagacgaacagacagctcggggtccattcctgccaagaacttctcttgcttctcctcatcttcccgcacatcctcaggggcgtaacgggccaagttgt

SEQ ID NO: 24298 - DNA, 667 bp, Oryza sativa
gcaggttctcctgacgcagctccaggatcttcaggttgttctccaccatgccacgacgcaccatctggtggaagtcgatacgagccgcgtcgtacgcctccaccatgcgtgccagatgcacgacggtagcgtcatcctccgagctggcgtctcggaaggtggcgtggtcgcgggctcctccgcgacgagggtggtagcggtagggcgagtgctgcaactcgtccgggtagcgctggtgaagggtgccgatggcgaggagagcggcgttctggcaagcggcggggaaggagtctccgcccgcggtgactgccagcgaagtccgctcgggagagccggagaggatcactgctgtgacctcccacgcagcgtggggctctgcgtcgtctccctcctgatccggaagcggcctggcctggtaatccactccatgtggataccccaagaccacgcacatgcctcgcagctccaagacgaagccagtcatgtccaaaccacgacgggtaacgctgccggccatctacaaacaaaaacaaaagaaaagcaacattttcgaaggtcagattttgacgataaatgaagcagcaagacaaagagagaatagcgggttttcacaaataataaaggatttttatttttaaaaatatagctaaggcttgggatctacggc

SEQ ID NO: 24299 - DNA, 1067 bp, Oryza sativa
attcctgcagcccagacgctcttagcaggaaaggctattgcaatgctacggagggacgacagttgccattggagttatgcaaggaatttgaaagaataaatttgggaatggtcagaagaggtttcgttgcagccttagaagcaaagcccactctaattgatcaagttagagaagcccaaattaatgatcctgatattcaagaaatcaagaagaatatgagaagaggaaaagctatcggtttcttggaggatgagcaaggaactgtatggttgggtgagagaatctgcgtccccgacaacaaagatttaaaagatgcaattctgaaagaagctcatgatactttatactccattcaccctggtagtaccaaaatgtaccaggatcttaaggaaagattttggtgggcaagtatgaagcgtgaaatcgcggaacacgtagcagtatgtgatgtttgtcagcgagtcaaggcagaacatcagaaacccgccggtttgctgcagcctttgaagattcccgaatggaagtgggaggaaatcggtatggatttcatcactggtctacccagaacgtcatcaggtcatgactctatttgggtgatagtcgacagacttaccaaagtggctcatttcatcccagtaaagacaacttattctggaagtcggttggcggaattgtatatggcaaggattgtgtgtttgcatggcgtccctaagaaaatagtgtctgatcgaggcagtcagtttacttgaaaattttggaagaagcttcaggaagagatgggttctaagctgaactttagtactgcttatcatccgcagacagacggacaaaccaaaagggtaaatcagattttggaagacatgttgagagcttgtgctttagacttcggtggaagttgggataagaatctaccttatgcagaattttcgtacaacaacagttatcaagctagtcttcagatggctccttacgaagtactgtatggtcggaagtgccgcactccgcttttgtgggatcaaacgggagaacgtcaggttttcgggatggatatcctgagggaagcagaa

SEQ ID NO: 24300 - DNA, 725 bp, Oryza sativa
ttcaaaagtacaaaatttgtgacctcgtttccaactgtttcaacttatcttgcaagcttggtttactttatttacttaccttttactttgattttctaactttattcaaattaatccaaaaacttgtgctattaattggataaatgtcttaactccctcctttcacttgtctttagatgccgcgctacaagcctgagtacttgtttggtgttgagggatttgtccaagagttgcgtacgatgtcctttgccataggatttgggactgcccctttttatgcccagattcctcatgatcgtcacgaagagaagtgccgagtcaaagtcaccttgaacagtaatagtgaagatatcccctcagtgatgttcgaagctggaggaagaaactacatccatacatgtcaggaggtggcaaggatcgccataggggagctccgcgatcgctacagtgatcagttggccgacactgagtatcgctaccatcctcgtcaaccactgggaagtgaccgtggcagctaccttgagactaagggaattaagaatgatgctaccacaaggcatttggttaagatgctgtgggtatggatgaaacccgtgcggagactgtgttagcggctcaagatcgtgaagaccggaatcgtggcaagatttgcaagttagaggacaaagtggatcgtttggagaaggaactagctgcattgaagggagaagcaccaccgcagaagg

SEQ ID NO: 24301 - DNA, 1307 bp, Oryza sativa
gctcacggaaacgaacgaccgagatcgatcctatccaaaacggacggctgagatcgaacggtccatgaccggccacggcaaacggccacgatgacgtcagcggtgacgtcacctccggcggcggctcgggcgcgcatgctcgccggcgaacgacggcgcgaggacgcgaacggagggcaccagcacgtagagagcgacgcggcgaactcaccgatgaccaaaacagcggcggaagatgaacggacggcggcggcatcgaggaaaaggcggcaaagtccttcggcttgacgacgacggcgatgctccggcggtcttcagcgacagcgaaggggcggacgaggacggcgacgcgacggcgaccacgatggcgaccttcccgagcgacggcgacgactggaacaacggcgaagcacggctggagcgacggcgacgactgcggcacaaggtctcacgagactaggactctaccggcgacgagagacgaaggcgagggtggcgacgggtagcggcgggcttggggatccttttataggggttggaaggctgcggcgaaggcccacggcgaccggcgacgagaaggaaagttaaggctcagaggaaagagaccaatccgaatcgaactcgaatccacggatttccaaaccgatttagaggatgattccaaaagagaaaaggtagaggagatctcggggaacatttcccctcaattgatttcaccggagaaggaaaggcgcggccgaatttggaagtagacgacggcgcggttcggctagggttcgggcggcggcggccggaggaagacgacgagtccgacaggtgggacccacctgtcaacgacagcgagcgctcgcgcgggcggctgcggctgcggactgggccgacttgggccggggagagagagagaaggttttgggcagactttcgccccaaagccaaaagagacttttaaaaaaaactttttcaattaaattattcatgaaatgcaattccatttattaaaaatacttccttagctcaaataaatcccagaaaaatctaggaattatagaattaagcaaagtatttaatgaaattttatatggccccattttatattggaatttattaattaaaattagatcttctcttctagacttttaaaataaattctaataattccaattagacaacaatttatatatttaggattcttagggtgtgacaaacctaccccccttaaacagaatctcgtcctcgagattcagaagtactggcgaacagatgcggatgagctgacttcaattcatcttctcgttcgggctgcagga

SEQ ID NO: 24302 - DNA, 1229 bp, Oryza sativa
acatgtctttatttcatattactctatctatccggccaaatagatattgcatctatttgcatctaccatacaagtttatgcatagtggttgttatcagggttataggtaaggtataccctctacccttcgatatacgtcacatatcgatattgtatgcttgcgcgaatacggacggttccggcatacgttaagaaaattcatcacggagttcacagatggaaggagtcatactcggacagaactgggtcgtcattgtatcgtgtcgggttcgatgtctccgagtcctacttggagaccggttgacctgcgatataaaagggacccccgggaggacctaaggcatcgaatctcatagccaacacatccaccacagcctacggagttgaagcctacagaagccaagtcgccgtgagatctaattgaacctgttcgattacaatctcgtcggtatcatcgagttccgcaattccctttctaatctgtggtttccatcatataatctcatatcaactggattagggctattacctatcaaggggcttgaaccagtataatctttgtttttttatctgcttgatgtcgtactacatagatcctcgtaccagcataccctagtaccctctatatccggtctacgggtattccccatcgatagtggcgcgccaggtagggggacttggtgctcagggttctacaactatgtcatccagcttcgtcgacaacagcgtcaacaccaacctcaaccaaggagttcctgcttcaacaatgctggtgtggaatcaagtcggcgaaatcgtcttcccggtttacgccacgatgccgatctcggctggtccatcaatgatcgaaagcgagaacgcagtggctacaacccaggacgactccatgtcgaaggatcctcccgccaaagcggagaactgaacgtcgacaacatccgagcccgagaaggatcctagtgcggccaaaccttgtctttctgacaagaatcacgagccgacgaggatcacttccgaggtgacaaggtcctggtgtcctatccacaaaaccagaaaacacaccttgcaagcctgctgggtctttctcaatgtccacgctgaaattcgtgcctgcaaagagcgtggaattcagcatacttctccaactcgtgatgtctactgtcctattcactagacaaagaatcacgacctctcaagctgcaaggtctttctcagcgccgtgaagacgtcac

SEQ ID NO: 24303 - DNA, 2891 bp, Oryza sativa
agaaatacaatccccgaaatcaccgacgcttctgtaatctgcgccttcaagtccggtgtcagagatcgctatactacccaggagttggcaacgaggtgtgtcacgactactcggagattattcgaaattgtcgatcgatgtgctcacgcggacgacgcactgagacgcaagaacgacaaaccaaagaccggaggagagaagaaaccagccaaggacgcacctgagtcaagcaagaagaaaaatcgcaagagtgggaaaaggaaagctcaagcggaagttctcgcaacagaatacgcggaccctcccaagcgcccagacccacaaagcagcgacacgaagaaaacatggtgccctatacacaagtcggacagacactctctagaagattgcctcatcttcaaaaagtcgctcgcaaaacacatggcattggaaaaaggcaagcgagtacgtgtggccgagaaggacgctaaggcggctactcaggaatcggactcagcatacccagactctgatctccatgtctcgcacatcttcggaggttccacagcatactcctcaaagcgagaatacaagaaagtggaacgtgaagtctgttcaacatggcagggagctgcgcccaagataaagtggtctgagcagaagatagaattctcagaagaggaccaccccaagactgctgtcatcccagggcgatatccgatcgtggtcgaacccactattcggaatatcaaggtcgcgcgagttctgatcgacggcggcagctcaatcaaccttctcttcgctagcactttggacgcgatggggatcccacgaagcgagttgacacccaccgatcaacctttccatggaatcactcctcagtcatcgtccaaaccattgggcaaaattacgttgcctatgacttttggccaagcaaataacttccgaacggagcagatcacctttgatgtcgctgaattcgatacagcatacaatgctatcattgggagaattgcacttgcgaagttcatggccgcatctcactacgcgtatcaagtgctcaagatgccgggaccgaagggaacaatcactattcaagggaatgctaagctggcagtgcaatgcgacaagcggagcctcgacatggtcgagcacacgcccagcccacccaccacagctgagccacccaagaaagtgagcaaaacaaacaagacggcgaaaccggacggtgcaatcaaaacgttccactctccagtgccaaccctgacaagaccgtcaagatcggggcatcactaggcgagaaataggaactcgcgatcatcaccttcctccgcgacaatgctgatgtgttcgcttggcagccgtccgacatgctgggggtatccagggaggtgattgagcacaaactcatggtgcgaccggacgccaagccagtaaagcaaaaactgcgtgagatttgcaccagatcgaaaacaagccatacgagaagaactcgacaagcttctcaaagctggttttatcagagaggtactccatccagagtggctagccaacccagtcatggtgcggaaggtcaacgggaaatggagaatgtgtgtctattttaccgacctcaacaaggcgtgtcccaagaatcacttccctcttcctcgaatagaccaactggtggactgaacagccggttgtgagttgctgagctttctcgacgcttactccggctaccaccaaatcagcatggcgaaagaggacgaggagaagacggcactcattacgccgttcggggtattctgctacgttaagatgccgttcggactaataaccgcaggaaacactttccagtgcacggtccagggcgcacttagcgaccaactcggaaacaatgtcgaggccaacgtcgatgacattgttgtcaagaccaggacaagtgactcattgattgacgatctgcaggaaacgttcgacaacctcggacgatatcgcctcatgctcaatccagagaagtgcacgttcggagtaccatcgggcaagctgctcggtttcctcgtctctggcagaggaatagaagcaaatcccgagaagatcaaggcaatcgagaacatgaagtcgcctacaagactcaaggaagtacagaaactaaccggatgcatggcggcaccaagcaggttcgtcgctaggatgggagagcgaggacaacctttcttcgctctgctgaagaagcaagacaaatttgtatggacacaggaagccgaagaggcattcattgcactcaagcgctacctatcaaatccccctgtacttgttgccccccaacctaatgaagaattattcctctatattgccgccacgccatattccgttagcactgtcattgttgtcgagagagagaaggtgcaacgatcagtctactacgtcagcgaagccctccacgacgcaaacacaagatatccatagatccaaaaactgctctacgcggtaatcatgacatcaagaaagttacgccactacttccaagcccacagggtcacagttgtatcctccttccctctcggtgaagtcgtgagaaacaaagacgttgttggccgcattgcgaaatgggtagtcgagctaagccagtttgatgtccactttgtgccacgaacagccatcaagtcccaggtactcgctgacttcgtagctgattggactatgcctgataacaggtcagacaaccaaatcgacaacgaaacgtggataatggcgttcgacggcgcgctcaacagccaaggagcaggggcatgattcatcttgacatcaccttcggaagatcaattcaagcatgcaattcacctcaacttcagggcgactaataacacagccgagtacgaaggactactcgccgggataagagctgcagctgcacttggagtcaagcg

SEQ ID NO: 24304 - DNA, 2239 bp, Oryza sativa
acctcgcaagaaaaaaacaccgtctattaaaaaaacaaatcgctttgaaaatactattagaaaaacgctaaattgatggacgcttgagtcggatagaatccatcaatccagcagcagccgccgccacgctcacccgccaccaccgcgctcgcctgccaccaccgcgctcgcccgccgcccctgcctgcttcgcccgccgcgcgctcgctcgacggggcggcgatggctttatggagacgtgacggcagcaggacggaatgtggggaggcgccgagcgagacggtgttcacagactccgtcgacgggagcagctccagctctggcgccgcatccaccgacgagtggccggtgacgatgtcaccgcccaggcgcccatgaagacggtcagcagcgccgctgcgggttcatcagccactgcgtccttctgcaactggcgtccctagaaacgacgctggcgaggctcgaccgacaagtgatccaagcgagaacatcttgagctgaaggaatggccacccgaaccgtccacgtgggaatggctccggaacggtggggacgtagagcgtgagctcctcggtgaggttggacaggctcgtcatctcgttgacggcgtcgccggatttcctcggatagctcagcagcgaattggcgatgacaatgccgtagttgaaccgcttcgctggaggaactcgccgaccagcttgaccttggtgtagcggacgccaagctcagctgctcaccgccggagacgccgaaccagctccacagctcgatggggtgcaccgtccattggaatgtcagcggcggaaagcggcgctgccgccatcgccgtggggtgatctggcccatcatgatgctgccgtggtgccggggaaggtggtatgtgttaaataaatgaacttctgtcagttgggatttgatcttatactcttatttactttctgttagtttgttagctattttccctcctcccatggttttctgctcgctctgttttgagtcagcgtggccgcgatttgttcggtcaagtggtggagcttgacgagcgggagagtatcgagctgagaaaacgagcagcaccatgaactagcgtcggtgagcaccacctcccttctgctcgagctcggttgagggctgggagcttgacctccgtgcccaccgcccaccgcccaccgccggccgccgtcgcgccgccgtcctcctcctttcccgcctcgccccgtcgatgcccgcgttgttcgcgccttccagctgcccgcgacgcctgcacacgcccgcgcctccctgtcgacgcctgcgcaaggtcgctgcacgcccgcgtcgtggagctccgccgggctaccgtcgggcatccccactgtggccgccgccggcggccgccattgcggcgccgcgctcctcctttcccccctcgctccgccgaccgacctacaggcgcagagagagaggaggaaccaaggaagagaagaaggggaagatagatgactcagcggactcagcctgacatgtaggacccacgtgggtcccatgctaaatcagccgtcacgtaggacaaaactggtgtcaaaaccaccgaaggacctattgtaaccggtttttattagttaagagacgctgaatatctggtttatggttggaggacgattttgtaactccatcacaagttggggaaccttctgtgtactttttcctctttgcaatcaataggtgtcaaagtgtcaactgattttacgtgctgtttcaaaaaggttaggatcactttcattacttcattcatagtacatctctagtacggattattattaattattagattagtagattgaatcgggtgctgccaaataaaatggccgccgcaccattgccactgttcgccaaagctcaagagcatcggttcctctttcctcctggttagttcttctctctaccgcttcttccgtcctgattcttgctcgacatccccgttttgagatggccacgccgcatcagttgaacggcccaacaaaccgcgtggggtgccgctggcattggctgcgagccgtcgataggcaagcttcaacgctcttggagcgcgcgtgcagcgggcgacaatttagtcactggctcaccctctctcttccagtctggctttttagggcccatttgaatagcaggaatggaaaaacgaaggaatatgaccctctctcttctagtctggctttttagggcccatttgaatagcaggaatggaaaaacggaggaa

SEQ ID NO: 24305 - DNA, 2843 bp, Oryza sativa
  unsure (1)..(2843): unsure at all n locations
ctgcgggaaattcggatttgttttgttttggaaacattccgaaaaatccggtgcgtgaaaacggcgtggagttcagataagtttgcgacttatctggttcggttacgcggagtggagatcgtgcgggcgccctgatcaagcgacctatctctatataaaccgagccgccgccttcacgcaacacacgcgaaatcaatctagggtttgcctcctactctgtgctgctccgtcgctcgtagactacttcgaaacctctgccttcgacgtcctgcaccgggagaaggtagcaataaggtttttgggacctctccctgttcgtcgcgacggcttgccttcctctccgctcgcgtgctgcgtgccttcgtcaacgcccgcaactgcgagtagttcctgccgagcaaccggtctttccgccacctcggtacgtgttcgacatattgcgaatatttgatatgttcatgttttactgcttagtttacatgtgtagatctaatgatgcgttcatgctagtttacatttacaatgtcatgatttatttatggaataaattaaatcattatgtgcttataacttcaacaattcaaaaaccttactataggcgctgtgattttactatggctggttttgccgatgtactgaggccggataaattcaccggtgtgcactttaagagatggcagatcagggtcactctgtggctggcagcgatgaaatgcttctgggtgagtactggcaaacctgaaggaattcttactgctgatcagcagaagcaattcgagacagccactactctctttgtgggatacattcttagcattcttggcgatcgtctggtcaaggtgtatacatgaccgacgctaaggagttatgggatgcactgaatactaaattcggtgctactgatgctagcaatgatctgtacatcatggagcagtttcatgactacaggatggctgacaaccgttctgtagtcgaacaagctcatgagatacaaaccatggctaaggaactcgaactccttaagtgtgtcgtacccgacaaatttgtggccgggtgcattattgcaaaactacctccatcttggagaagtttcggtactgcactcaaacacaagagacaggaatactctgttgaggggttgatagcgtctcttgatgttgagaagaaagctcgggaaaaagatgctgcgtctaagggcgatggtgggcaatccagtgccaatgttgtgcacaaggcccataacaagagcaaagggaaatacaaagctcaacagaccaccaacttcaagaagcagaagaagaagaagaacaatcctaatcaggatgagaggacttgctttgtgtgtggccaacctggtcatctggccaggaagtgtccacaacgcaacgggatgaaggcacctgcagggcagacttctaagtctgctaatgtgaccattggcaacactagagatggaagcgggtatggtaatttacctaatgtttttttagttaatcagtctactaattggtgggttgatactggggccaatgtacatgtttgtgctgacatctcattgtttnttttttatcaagtcgcacggggttccaccgtcctaatggggaatgggtcacatgcttctgttcatggtgttggcacggtagatctgaagtttacttcgggaaagatcgtgcagctgaagaacgtgcagcatgtccctactatagacatgaatcttgttagtggctcccgtctgactagagacggatttaagttggtttttgagtctaataaagtagtcgtgtcaaaacatggatattttattggtaaaggttatgagtgcggaggcctgttctgtttttccctttctgatttctgcaataagtctgtgaaccatatttgtggcagtgtggataggggtgggaaaaataagaccgaaccgaagaaccgaaccgaaaagaccgagaccgagaccgaaaagaccgagatcgagaccgaaaagaccgagaccgagaaattcgggtagtaattcggtctcagcatgtcaaagaccgaaatttgttcgggtaattcggttattgggctcggttaaccgaattaaccgagaaaaccgaattgtggcccaataggtccaggaggcccaataagctcaatacaccactaaaccctagagggccaccctcatccatccaggctgcatccccatcccatccctctcgcgccgccctcccttccatcgcgccgcactaccgccgctgcctccatcgcgccgcactaccgccgcctccacatcgccggcgccgtctctgccctccgcctccactccacctcgccggatccatcgcgccgggctgccggccgccggatccatcacgccacaacaccacctccgccctccgccctccacatcgccagtgccgtctccgcctccatgccgcctcgccggtcgcgcgggccgccggccgccgggtccatcgtgccgcaccgccacctccgccctccgcctctacgccgcctcgccggtcgcgtgggccgccggccgccggatccatcgggccgcacctccacctccgcccttcgcctccacatcgccggcgtcgtctccgccctccgcctccacgccgcctcgccggtcgcgcgggccaccggccgccggatccatcgcgccgcgccgccgcctccaccctccgcctccacatctcgccggcatcatctccgcactacgcctcggctcctccaaattcggtctaaccgagaccgagaccgaaaaaaccgagactgaattcctcggtcctgatttttttgggatgaaactcggtcctgacttttcaaaaaccgaaatgaccgaaaaacgggctgcagga

SEQ ID NO: 24306 - DNA, 738 bp, Oryza sativa
gaaggagtaagagacaaaggacggctaagtcctttggcgatgatttcactgtgtacctcgtggatgatactcctaagtcaatttcagaagcatatgcatctcctgatgcagactactggaaggaggctgtccgtagtgaaatggattccattatcgctaacgggacttgggaggtgacagagtgaccctatgggtgtaaacctgtggggtgcaagtgggtgttcaaaaagaagcttaggcctaacggtactattgaaaagtacaaggctcggcttgttgctaagggctacactcagaaagaaggcgaagatttctttgacacttactcacctgttgctagattgaccacaatttgtgtgctactttccttagcagcctcacatggtcttctcgttcatcaaatggacattaagacaacttttcttaatggagagctggatgagatctatatggatcaacctgatgggtttgtagttgaaggtcaagaaggcaaagtgtgcaagttgatgaagtctttgtatggtctgaaacaagctcctaagcaatagcatgagaaatttgacaaaacattgacatctgcaggctttgcagtcaatgaggtagataaatgtgtgtactatcgccatggtgggggtgagggagttattctgtgcttgtatgttgatgacatactaatatttgggacaaaccttgaggtgataaataaggttaaatcattcttgtctcaaaattttgata

SEQ ID NO: 24307 - DNA, 758 bp, Oryza sativa
ccggatagcagagaacttaaacagctgatacttcaggaagctcacgaaagtccttattccattcacccgggcagtaccaagatgtacttagacttgaaggagaaatactggtgggtcagcatgaagcgggaaattgcagagtttgtggctctatgtgatgtgtgccagcgtgtcaaggcagagcaccagcgaccggccggacttctccaacctctccaagtgccggaatggaaatgggatgaaattgggatggatttcatcaccggccttccaaaaacccaaggtggatatgattctatatgggtaattgtggaccgattaaccaaggtagctcgattcattcctgtgaagaccacctatggagggaataaactagcggagctctacttcgctaggatcgtgagtctccatggcattcccaagaaaatcgtatctgataggggaagccaattcacctctcacttttggaagaagctccaagaagagctgggtactcgattgaatttcagcaccgcctatcacccgcagacagatggacagaccgagcgtctaaatcagatcctagaagatatgctccgcgcatgtctagatttcgggaagacttgggataagagtctcccctatgccgagttctcctacaataacagctaccaagccagcatacaaatggcaccctatgaagcgttgtacgggcgcaaatgccggacaccgctactctgggaccaagtcggagaaagtcaagtgttcgggactgatag

SEQ ID NO: 24308 - DNA, 2260 bp, Oryza sativa
atgggttctccggaaagcggcggtgaagcgagcccaagttatcggttgcccctctggctgcgtagcctggaagtggtcccaccatagagatgcgggtccctgcagctggtgggcggcgaagacgactttctcttcgtcgctgcactgcaccgtgtctagcttcttccccacggcatgcaaccaatccaacgcatctacgggattgttggagctagagaaggtgggtgggcggatgcggaggaattcggcgagtttggagtgttggggaggtggtggtggagcattctgttgtggcgggttttggaggtggtggaggaaagcattcatcatgttggcttgttgggcgaggatttgggtgagaatggcgttggtgtctggcggtggtggtggaggtggattgccttgggggttggggttgctgctcttgggttggctgccttcaccggtgttaacatttctcctggtcgtcaccatctgaaaactccacacagaaccagcaagcagagaaggagagctgacgattaaaactaaccacccacgactactattattcttaaatttatcactgctattaaattggttcattaaggttcaagttgcttaggcaaacaaataaagacaggctccgacatagttacaccacacaccggcgtaaccatgccccacacaactcaagaagataaacgaggaaaaacacacgcgcaagcctactaactgctcgtctaccgctgcgacgggccagggcggaaggtgagcaacagcgcaccctccgagctaccaacgccggaggcttccccctcctggggaaccacgggcgcaggctcggcacgaggggtctcgacgaagcaagtccacgccagggactgacgaacaagctcgggccgggaggtgctcttgcgggcggtgatcttctggctgcggcagacgcggcgacgcttgggacggctgatctctccctgggcgaccttgagctggtgcagctgcgcctccagcgcgtcgaggtccttcttgagctgcaggttctcctgacgcagctccaggatcttcatgttgttctccaccatgccacgacgcaccatttggtggaagtcgatacgagccgcgtcgtacgcctccaccatgcgtgccagatgcacgacggtagcgtcatcctccgagctagcgtctcggaaggtggcgtagtcgcgggctcctccgcgacgagggtggtagcggtagggcgagtgctgcaactcgtccgggtagcgctggtgcagggtgccgatggcgaggagagcggcgttctggcaagcggctgggaaggagtccccacccgctgtgactgccagcgaagtccgctcgggagagccggagaggatcaccgcagtgacctcccaaccagcgtgaggctctgcatcctcaccctcctgatccgggagcggcctggcctggtaatccactccgtgtggataccccaagaccacgcacatgcctcgcagctccaagacgaagccagtcatgtgcaaaccacgacgggtaacgctgccggccatctacaagcaaaaacaaaaagaaaagcaacattttcaaaggatcagattttgacgataaatgaagcagcaagacagagagagaatagcggttttcacaaataacaaaggatttttatttttgaaaatattgctaaggcttgggatctacggctcgtcctagggtcaagggaggctctgataccaacttgtcacgaccggaaatcacccaacgggcgttcctgacgtgcgtgtattattccttgtcccaggaggcaaggtacaccaaaagttgatacattacagagtttaacaagcggaagcgtatataaaattattacatgggcgacgaaggcccagcacactcaaagacaacgaaaaacagcggaagactagggcgacgaccacaggcacttgacggcaggcacgagctagacaccgaagccttcatcttcaaggaactcctcatctgggcttgggaaaattaagcaagactgagtacaaccaccgtactcaacaagacacacccacaaatgcagaataaatgcaagggagtacaagggaattataatataaagggttaggtttgcagtacacatttaaagacatttagttgctcaagggtattttggtaacccggttttaagaattacccaatattattaatcaaggccgtgaaccggcacgaacctgccttaacccaaggcctacgatgattcggaccgaactggcaacccgagggctgcaggaat

SEQ ID NO: 24309 - DNA, 12930 bp, Oryza sativa
ctaaaggagttgctgtggaccccgagacagtgaccgccgtcaccgattggaagcaacccaagacagtcactcagattcgcagtttcttgggtttggcaggatactgtcgcgtcccaaatcgactctaaaatctatcctcgaaattgtccaaagaataattaaaaatcaatgtgaaagcctccaacaattaaaatgtgcaaagataaaagtcaaatgaggcttggaggatttttgtatatttcctaaaagcctaaaatgcttaaataaattttagtggaattttcagagcacaaataataatagaaaagaaataaacaaagttaaaaaggtttataaaaagaaaatcctaaaagaagtctgttttcccccccccttccctcttgggccggctcggcccattccctccctctctctctcttcccccgcggcccatcggctccccgcgcgcgcgtgccgctgacaggcgggcccgcccgccactctcgctgacgtgggacccacctgtcatccccctcctctcgccgcgcccgccgccaacgcccgtgccctagcgccgccgccgccgcgaatcccgccgctcccgtccgccccgcgtgcattcaagaggggggaattattccccgtaatcccctcccccgtttccccctcttttccctctctctctccctcggattcgttcgaatcaagcccgtaatcgtcgccggcgaaatcaatggagtccgaatcctccgcgcgcgattcctctctctccggccgctctttccttcccccggcgctatttaaaccctccccgagctccgctctttcgtttccgccgctcgccgctcactctcgccgtcgaaatcgtgctcgcgccgtgctccttctccccgccgtcgccgccgtgcttcggttagccgccgccgtcgctccgctcttcctcccgactcggcgacccctccgtcggcttcgccgcatcgtcgccgaccccgtccgccgctccgcttcgcccgtcgaccgccggagcaccgtcgtcatcgtcatcccgaaccgcgccgccgccttcttcctctccgtccgccgttctcgtcgtcgccgttgtctcggggtgagccgaagaccgtcccgttcgtttccccctttcctcctctctctcgggtgccactccgccgcgccgttggtcgccggcggcgaccatcggggcgcgggtgcgcgcttttcccgtcggccgcgccggcgaggccgccctcgggcgcgccctcgcggctgccaagtgggcccggccgtcagccgcccgcgcccgcgggtgaggctgacgcgcgggacccacggcgccgaccgccgccagccgcgtgcgcccggtccaccgtggaccgtggggctgacgcgtgggccccacttcccgtggacccggtccgcgcgcccgctccctcggctgacgcaataaataggatttttaattgaaaattaaatgaagaaattcgcaaatatccatttaaagagcatataaacttcaaatggccatatcttggccatttgaactcggaattggaccgttcaagtctctaatttttccttaagatgtaaagaacccatttttgtgctttgtttctgctgttatgtggagttatttagtgttaaagcctttttcttttccgttggtcgtgtagacgctgcagcttcggaagatccgctcttcgtggaagtcgaagccgtcgagtgggaaaacgagcaaggcaagacacatcatcttgatcatattgaatcccagtttataaaattatgttgatttaaattattgcattatcgctttatttaaattcccgcgttatcactgttttacttagccatgcctatttacctttgttatgaccatattattattgttattgttattattattaccttgttcaccctagacaaacaaaacctcaactagtggacactctactcatggtatccctagtatgattttaggtagatgcttcgcaatctaattaggtaaccctaggtggttttacaactttagacttgggaaattctcatatcacctggatactttggaattgttggtttattgtggaattggcttcacaccgccccctctattcaaaatcccctaaaatggttttaggctgggctcggggtgcatggttttgatggtagcacctcggccgtataaggaccggtcttcgggcctctgttgcaaagcactaccgtacttccacatgtctagtgggtaaggcttagtttgtggctcagtctagtcataaacaaaagtacacggattggagatggatgaagtcggggtcggtggacattctccaggacaaatgaaggctacacgagctgcggcccggtagtcgagatgtcatacggcggagggttggtgcccaatgctaggggctcagttctgcctgcctgtcccgggtatcccggccgtaggtaggattgggtcggtactcttgtctaaggctaggatgggttagaaactatgtcacgtcttccgtccgtataccgtggtggtatgtggcacgtggcaacacgtgaggaagatgtgtcttgtgggtaaagatgtacacctctgatcagagtataatctattcgaatagccgagccctcggatatgggcaagccgagcaatgtacccaagttagtgttttaattcttaaaacctgcttaacaactaaaatatggaatggttggcctgggttggcttgggacgagctgggacccaggtcgggttgccagttcggtccgaatcatcgtaggccttgggttaaggcaggttcgtgagggttcacggccttgattaataatattgtgtagttctaagatcgtgtttacaaaatagccctgagcaactaaatgtctttaaatgctgtttactgcaaccctaaccctttatgttataattcccttgtactcccttgcatttattctgcattcgtgggtgtgtcttgttgagtacggtggttgtactcagtcttgcttaattttcccaagcccagatgaggagttcctggaagatgaaggctttggtgtctagctcgtgcctgccgtcaagcgcctgtggtcgtcgccctagtcttccgctgtttttcgttgtctttgagtgtgctgggccttcgttgcccatgtaataattttatttacgcttccgcttgttaaactctgaattgtatcaacttttggtgtaccttgcctcctgggacaaggaataatacacgcacgtcaggaacgcctgttgggtgatttccggtcgtgacaagttggtatcagagccttccttgaccctaggacgagccgtagatcccaagccttagcaatattttcaaaaataaaaatcctttattatttgtgaaaacccgctattctctctttgtcttgctgcttcatttatcgtcaaaatctgatcttttaaatgttgcttttcttttgtttttgtttgtagatggccggcagcattacccgtcgtggtttggacatgactggcttcgtcttggagctgcgaggcatgtgcgtggtcttggggtatccacatggagtggattaccaggccaggccgcttccggatcaggagggagacgacgcagagccccacgctgcgtgggaggtcacagcagtgatcctctccggctctcccgagcggacttcgctggcagtcaccgcgggcggagactccttccccgccgcttgccagaacgccgctctcctcgccatcggcacccttcaccagcgctacccggacgagttgcagcactcgccctaccgctaccaccctcgtcgcggaggagcccgcgaccacgccaccttccgagacgccagctcggaggatgacgctaccgtcgtgcatctggcacgcatggtggaggcgtacgacgcggctcgtatcgacttccaccagatggtgcgtcgtggcatggtggagaacaacctgaagatcctggagctgcgtcaggagaacctgcagctcaagaaggacctcgacgcgttggaggcgcagctgcaccagctcaagatcgcccagggagaggacagccgtcccaagcgtcgccgcgtctgccgcagccagaagatcaccgcccgcaagagcacctccaggcccgagcttgtccgtcagtccctggcgtggacttgcttcgtcgagacccctcgtgccgagcctgcgcccgtggttccccaggagggggaagcctccggcgttggtagctcggagggtgcgctgttgctcaccttccgtcctggcccgtcgcagcagtagacgagcagttagtaggcttgcgcgtgtgtttttcctcgtttgtcttttttgagttgtgtggggcatggttacgccggtgtgtggtgtaactatgtcggagcctgtcttattttgtttgcctaagcaacttgaacattaatgaaccaatttaatagcagtgataaatttaagaataatagtagtcgtgggtggttagttttaatcgtcagctccttctctgtttgctggttctgtgtggggttttcagatggtgacgaccaggagaaatgttaacaccggtgaaggcaaccaacccgagggcagcaaccccaacccccaaggcaacccacctccaccaccaccaccagacaccaacgccattctcacccaaatcctcgctcagcaagccaacatgatgactgctttcctccaccacctccaaaatccgccacaacagaatgctccaccaccccctccccaacactccaaactcgccgaattcctccgcatccgcccacccaccttctctagctccaacaatcccgtagatgcgttggattggttgcatgccgtggggaagaagctagacacggtgcagtgcagcgacgaagagaaagtcatcttcgccgcccaccagctgcaggggcccgcatctctatggtgggaccacttccaggctacgcagccagaggggcaaccgatcacttgggctcgcttcaccgccgctttccggagaacccatgtgcccgccggagtcgtggctctcaagaagagggaattccgggagttgaagcaaggcaaccgctccgtgatggagtatttgcatgagttcaacaatctagcccgttatgccccggaggatgtgcgggaagatgaggagaagcaggagaagttcttggcaggaatggaccccgagctgtccgttcgtctagtctctggagactacccggacttccaacgtctggtggacaagagcatccgcttggaagccaagcacaaggagctggaatcgcacaagcgccgcttggcgaacttccgcaatcagcagggtgctaaccagagggtccgctacaccaatccctacccagggggatcctcctcgcagcagcagcagcagcaacctcgctccgcgcctcgacctcaattcgtggtgcgcgtcccacagccgcagcagcagcagaatcaacaagggactcgtgcgccccgtcctcctacgccagctgtgcagcccgttcaaggccgcagggacgcttcaggtccgcagcgtctgtgtttcaactgcttcgagcccgggcactttgcggataaatgcccgaagccaaggcgtcagcaaggccaagcgcctccccgctccaacaacggtggcaaggacgtcatccgtggtcgtgtgaatcacgtgacggccgaggacgtgctgacaactcccgacgtcatcgttggtacgttcctcgtccattccatccctgctacaattttgttcgactctggagcttcccactcgtttatatctgtgccattcgtggggaaaaatcagttgggggtagaaaggcttagaaaccctctgctcatcaccacccctggaggggttatgacagcaaagtactatagcccagccgtccctatagaaattcaggggattccttttccctcggatctgattctgctagacaccaagaacttggatgtgatccttgggatgaattggttggcccaattccaaggagtagtggattgcgcgagacgcactgtcactctgtaccgaggaccagaacaaccggttgttttctttgcacccccaacctctgtcagaagttcagaactgcatcagataggtctgtcagaaatccccatagtcagagagttcggagacgtgtttccggaagaactacctggtatgccgcccaagcgagagattgagttccggatagatcttgctccaggaaccactcctctgtacaagcgaccctaccgtatggcagcaaatgaactggccgaagtaaagaaacagttggaagagttgaaagaaaaggggtacatacgtccgagtacttccccatggggtgctcctgtgatttttgtagagaagaaagacaagacgaagaggatgtgcgtcgactacagagctctcaatgaagtcaccatcaaaaacaagtaccctcttccccggatcgatgatctgttcgatcaactcaaaggtgccactgtattctccaagattgatctccgttccggatatcaccaattacgtattcgtgaagaagatattccgaagaccgcattcactacgcgatatggactgtatgaattcacggtgatgtcgttcggcttgaccaatgctcctgccttcttcatgaacttaatgaacaaagcgttcatggaatacttggataagttcgttgtggttttcatcgatgacattctgatatactcacaatcagaggaagaccatcagcaccatctccgtctggtgttgggaaagttgcgggaacatcaattgtatgccaagcttagcaagtgtgagttctggttgtccgaagtcaaattcttggggcacgtgatatctgctaaaggagttgctgtggaccccgaaacagtgaccgccgtcaccgattggaagcaacccaagacagtcactcagattcgcagtttcttgggtttggcaggatactatcggagattcatcgagaacttctccaaaatcgctcgacccatgacgcagttgttgaagaaagaagagaagtttgtgtggagcccgcaatgcgagaaggcgttccaaactctcaaagaaaagctggtttcctcgccagtgttaatcttgccggatactcgcaaggacttcatggtgtattgtgatgcttcgcgccaaggattggggtgcgtgctcatgcaggacggtcatgtggtagcctatgcttcacgccagctacgtcctcatgaaggcaactaccctacgcatgacttggagttagcagcagtggttcatgctctaaaaatctggcggcactatctcattgggaaccgctgtgaaatatataccgatcataagagtttgaaatacatcttcacacagtcagatctgaatcttcggcaaaggagatggttagaactcatcaaggactatgatgtgggaatacactatcatcctggtaaggccaacgtggttgccgacgctctaagtcgaaagagccattgcaacactttcaacgtccgtagcattccgcccgagcttagtcaacagatggaagccctgaacctaaacatagttggtcgcggatttttggccgcgttggaagccaagcccaccttgctcgatcaaatccgcgaggctcagaagaatgatccggacatgcatggactcctcaagaatatgaaacagggtaaagccgctggtttcacagaggatgaacacggaaccttatggaacggaaaacgagtatgcgtaccagatagcagagaacttaaacagctgatacttcaggaagctcacgaaagtccttattccattcacccgggcagtaccaagatgtacttagacttgaaggagaaatactggtgggtcagcatgaagcgggaaattgcagagtttgtggctctatgtgatgtgtgccagcgtgtcaaggcagaacaccaacgaccggccggacttctccaacctcttcaagtaccagaatggaagtgggatgaaattgggatggatttcatcaccggacttccaaaaacccaaggcggatatgattctatatgggtaattgtggatcgactaacaaaggtagctcgatttattcctgtgaagaccacttatggagggaacaaactagcggagctctacttcgctaggatcgtgagtctccatggtattcccaagaaaatcgtatctgataggggaagccaattcacctctcacttttggaagaagctccaagaagagctgggtactcgattgaacttcagcaccgcgtatcacccgcagacagatggacagaccgagcgtctaaatcagatcttagaagatatgcttcgcgcatgtgtcctagatttcgggaagacctgggataagagtctcccctatgccgagttctcctacaataacagctaccaagccagcatacaaatggcaccatatgaagcattgtatgggcgcaaatgccggacaccgctattgtgggaccaagttggagaaagccaagtgttcgggactgatatcctgagagaagctgaagctaaagtcagaatcattcgggataatctaaaggtggcacagtcccggcagaaaagttatgcagataaccgtcgtcgtgacctggaattcgcagtggatgactttgtgtatcttcgggtcacgccattgcgaggtgtgcacaggtttcagacaaaagggaagctcgcacctcggtatgtgggtcccttccgtatcatcgctcgacgtggagaagttgcttaccagctggagttgcccgcctccttgggcaacgtgcatgatgtgttccatgtgtcgcaactcaagaaatgtctccgagtgccatccgagcaggccaactcagagcaaattgaagttcgcgaagacctgacctacgtggagaggccagtgaaaatcctggacaccatggagcgcaggaccaggaaccgagtaatccgtttttgcaaggtccagtggagcaaccacgccgaagaagaagctacttgggagcgcgaaaacgagctgaaggcagcccatcccgatctcttcgccaattcttccgaatctcggggtcgagattccgtttaaggggggtaggtttgtcgcgtcccaaatcgactctaaaattcatcctcgaaattgtgcaaaagaataattaaaattcatgtgaaagcctccaacaattaaaatgtgcaaagataaaagtcaaatgaggcttggaggatttttgtatatttcctaaaagcctaaaatgcttaaacaaattttagtggaattttcagagcacaaataataattgaaaagaaacaaacaaagttaaaaaggttttataaaaagaaaaccctaaaagaagtcctctttcccccccccccttccttcttgggccggctcggcccagtccctccctctctctctctcttcccccgcggcccatcggcctccccgcgcgcgcgcgccgctgacaggcgggcccgcccgccgctctcgctgacgggtgggacccacctgtcatcgccttcctcccgccgcgtcctccgccgcgcccgtgccctagcgccgccgccgccgcggattgcgccgcatcccgccgtccccgcgcgcattaaagagaggggaatcattccccgcgatcccctctcccgtttcccccgatttcccctctctctctccctcggatccgtccggattcatcccgtaatcctcgccggcgacatctatggagcccgagatccccgcgcccgtttccttcctctccggccgcgttctccccctctcggtgctatataattgctccccgagctccgctcttccgtttccgccgctcgccgctcgctctcgccgtcggcatcgtgctcgcgccgtgctcctctctctccgccgtcgctgccgagctccgttccgccgccgccgccgctccggtcttcctccttactcggcgacacctccatccgcttcgccgagtggttgccgaccccgtccgccgctccgcttcgcccgccgaccgccggagcaccgtcgtcatcgtcatcccgagccacgccgccgctttcctccactccggccgccgttctcgtcgtcgtcgttgtcccggggtgagccgaggaccgccgttcgccttcccccttccctcctctctctcgggcgccgctccgccgcgccggtggtcgccggcggtgaccatcggggcgcgggcgcgccgctcccgtcggccgcgccggcgaggccgccctcgggcgcgccctcgcggctgccaagtggacccggccgtcagccgcccgcgcccgcgggtgcggctgacgcgcgggacccacggcgccgaccgccgccagccgcgtgcgcccggtccaccgtggaccgtggggctgacgcgtgggccccacttcccgtggacccggtccgcgcgcccgctccctcggctgacgcaataaataggatttttaattgaaaattaaatgaagaaattcgcaaatatccatttaaagagcatataaacttcaaatggccatatcttggccatttgaactcggaattggaccgttcaagtctctaatttttccttaagatgtaaagaacccatttttgtgctttgtttctgctgttatgtggagttatttagtgttaaagcctttttcttttccgttggtcgtgtagacgctgcagcttcggaagacccgctcttcgtggaagtcgaagccgtcgagtgggaaaacgagcaaggcaagacacatcatcttgatcatattgaatcccagtttataaaattatgttgatttaaattattgcattatcgctttatttaaattcccgcgttatcactgttttacttagccatgcctatttacctttgttatgaccatattattattgttattgttattattactaccttgttcaccctagtcaaacaaaacctcaactagtggacactctactcatggtatccctagtataattttaggtagatgcttcgcaatctaattaggtaaccttaggtggttttacaactctagacttgggaaattctcatatcacctggatactttggaattgttggtttattgtggaattggcctcacaccgccccctctattcaaaatccccctaaaatggttttaggctgggctcggggtgcatggttttgatggtagcacctcggccgtttaaggaccggtcttcgggcctctgttgcaaagcactaccgtacttccacatgtctaatgggtaaggcttagtttgtggctcagtctagtcataaacaaaagtacacggattggagatggatgaagtcgggcgtcgatggacattctccagggcaaatgaagactacacgagctgcggcccggtagtcgagatgtcatacggcagagggttggtgccctgctgctaggggctcagttctgcctgcctgtcccgggtatcccggccgtaggtgggattgggtcggtactcttgtctaaggctaggatgggttggaaactatgtcacgtcttccgcccgtataccgtggtggtatgtggcacgtggtaacacgtgaggaagatgtgtcttgtgggtaaagatgtacacctctgatcagagtaaatctattcgaatagccgagccctcggatatgggcaagccgagcaatgtacccaagttagcgttttaattcttaaaacctgcttaacaactaaaatgcggaatggttggcctgggttggcttaggacgagctgggacccagggtcgggttgccagttcggtctgaatcatcataggccttgggttaaggcaggttcgtgtgggttcacggccttgattaataactttgtagcgttctaggatcgcgtttacaaagtagctttgagcaactaaatgtctttaaatgctgtttactgcaaccctaaccctttatattataattcccttgtactcccttgcatttattctgcatttgtgggtgtgtcttgttgagtacggtggttgtactcagtcttgcttaattttcccaagcccagatgaggagttcctggaagatgaaggctttggtgtctagctcgtgcctgccgtcaagcgcctgtggtcgtcgccctagtcttccgctgtttttcgttgtctttgagtgtgctgggccttcgttgcccatgtaataagttaactatttacgcttccgcttgttaaactctgatttgtatcaacttttggtgtaccttgcctcctgggacaaggattaatgcacgcacgtcaggaaagcccgttgggttatttccggtcgtgacactatatcacttccaaaatgtgaatcaaaatatttgaagacgttgatgaccaaagtttaagcacgttgattgcatgtatttccaaacatcactattttttactggacgggtagttaatcttcttcaatgcgataagtagcctaatgccacatgcgacagctaatacgcgcgcgcgcgttgccggcgcgcgttttagcccatgaggcccatgcaagcgcgcgcttctctcttttttctttttttggacgctgctgtttttttcttcttcttctatctgttgttcctgccgtacggataggataattagtttaaattagtttccaatttttactaatgattagtttactagtaatttttaaatcttaactttaaaattttcatatttggatatgaaaattttcaaatctcgagttgaaaattttcaaatcttaagttgaaagttttcaatattttcaaatctggacttgaaagttttcgaatcgagtcgaaagtttttaaatctcgagttgaaaatgttcaaatctcaagttgaaagttttcaaaattttcaaatcttgacttgaaagtttttaaatacgagttgaaagttttccaatctcaagttgaaagttttcaaaattttcaaatctggacttaaagtttttgactctgagttgaaagttttcaaatctcgagttgaaagttttcaaatctgagttgaatgttttcaaaatttgacttcaaaatttaaatattaaatcgaaagtttctaaatctaacttaaaatttttttcaa

SEQ ID NO: 24310 - DNA, 10079 bp, Oryza sativa
aagcgctctgggccgttcacttggacggaggaagctgaacatgcccttactcagttaaaggcatatctcagctctcccccggttctagtcgccccggagccaaatgagcccctgctactttacttagcggcgaccccccaagtagttagtgcagcgttggttgtggagcgcgatgaagacaatcctcattccgcgcacccccaccctgtgccgacttggcccgggagcaagcagggaggaaaggtccccgagtcgaacggtggcctaaggcccctgacgaccggagtcggccctctgcccgcttgtcaaacggtgctgggtgcccccgaccctcaggaaggccccgaggccactgagggaaggccgcacttatcgccctttggccccgaggctaaccctgtgctgactcgacccgggagagagcagggagaagaggcccccgagccgaaaggaggcctgaggcccctgacgaccggagctggccctttgcccgcttgtccgatgacgccaggagcccccgacccccaggacggccccgaggccactgtgggaaggccgctcctgtcgtcctccgaccccgaggtcatcggcacagaagacgagtgcgccccgaggggccacctggacgaagaacgccccgggggtacggcccctagcgaagaggatcggccccgccgaaaggtacagcggcctgtctactttgttagtgaggccctccgggacgccaagacccgatacccacaggcccagaagatgctttacgctattctgatggcctcgaagatactgcgccattatttccaggcgcatcgggtcactgtggttacgtcttaccccctcggtcaaatcttgcataatcgagagggtacaggacgagtggtaaaatggcaatcgagctttctgagttcgatctgcactttgaaccacgccacgctatcaagagccaggccctcgccgattttgtggcagagtggaccccggctccagagaccgtctcaatacccgaggccagcacgaacccctctcagctgcctcacaccgcccactgggtgatgcagttcgacggttctctgtctctccagggcgccggtgcgggggtcatgttgacctctccaaacggagacgtcctcagatacttggtccgtctcgactttcgagcgactaataatatggcagagtacgagggactccttgccggactcagggtggcagctggactggggatccgccgcctcttggtgttaggcgactcccagctggtcgttaaccaggtctgtaaggaataccggtgctctgacccacagatgaacgcttatgtacgccaagtgcggcgtatggagcgccattttgacgggatagagcttcggcatgtacccagacgggataacatggttgccgacgaactctcacggctcgcgtcctcgcgagcccagaccccaccgggcgcctttgaagaaaggcttacccagccgtcggcgcgacccaatcccttaggggagacggatgcgcctgaccggcccccgaggcccgtcggagtccaggcctcgggacccgaagggagcgctccaagctcccttagattgattgcttggatctctgagatccaaacatacctcacagataagactctacctgaggaccgcgaagggagtgaacgcgtacaacgcatttccaaacgctacgtgttggtagaagggaccctctatcggcgcgcggctaacggaatcctcctgaagtgcattcctcaggaacaaggagttgagcttcttgctgacatccatgagggcgagtgcggagcccattccgcctcgcgcaccctggttggcaaggcctttcgtcaaggattttattggccgacagctctcaatgatgcagtcgatctggtccggcgatgcagagcgtgtcagttccacgccaggcaaatccatcagccggcccaggccctgcagatcataccactatcatggccatttgctgtctgggggcttgatatcctgggaccgttcaaacgggccccgggcgggtttgagtatctgtatgttgcgatcgacaagttcactaagtggcccgaggcttatccggttatcaagatcgataagcactctgctcttaaattcattaagggcatcacggcccgttttggagtgcctaaccgtattattacggataatggcacccaattcactagtgaactcttcggcgactactgcgaagacatgggcatcaagctctgcttcgcctcacctgcccaccccagaagcaatggccaagtggagcgtgccaatgcagaaatcctcaaaggccttaaaaccaagaccttcaatattctcaagaagcacggcgattcatggatcgaggagttgccagcggtgctctgggcaaaccgaaccacaccaagccgagcgaccggggaaacgcctttcttcctcgtctacggcgcagaagcggttctcccatccgagctcaccctgaggtctcctcgggccaccatgtactgcgaggctgatcaagatcagcttcgcagagatgacctcgactacttagaagagcgaaggcggcgcgcggccctccgagccgcgcgctaccagcagagcttgcggcgctaccatcagcgccacgtccgggcccgatcactctgcgtcgacgacctcgtcctacgccgcgtccaaacgcgtgctggattgagcaaactctcaccaatgtgggagggtccgtatcgagtgatcggtgtcccccggccgggctcggtacggctggccacgggcgacggcacggagctgcctaacccatggaacatcgaacaccttcgtcgcttctacccctgaggaggggggggtcgggtgtcaggttttggctcaggccaaccccgcacccccctcgggtgtgcagggttggccgggggctaccacacatgcattacattcttatttctcttttttcaacatttcaatagaagcagtttcaatttcctaaaggttgtgtctgtgctgttctttccttttgaagaatcttgacttaaaataaggtcactcgtactcaaccttgccctcgggggttcggttcggtcagctaaaatcgccaaacggggcccagaaccgagccgtgccccggggcgtggtgaactccgggggggaatcggcaaaaacccacaatcgggtcacccatacccctcggtcaccacgttcccggcctggccagtctcgacatgtggatctccccaggcactagccccgacccgagccattcgaggactgggacttgggcacgagcccttatttcaagctaaggcgcaaaaggaccatggcacagatcatcctcatcgcgtatgtatagcaaaataaaactaacacaaaaattttttcatcatttctgattgcagattaagttaatttgtacaaaaaagaggcatgaaggccttagaagaaagaaaaagaaaaaagttaagattggcgggggcctgggggctcattctgacgcgcccagttcgccggcctcgttgccaccgtcgcttgcactgctggcgttccccccctcgtcggagtcgggggcgaacgcgagccgaggggccgagccctcgaagccgttgacaatgtggtcggcagcatccccgacccgcgcgcgcgcgtcgtcctcggtcccgggagggaactcctccagcgccatccatggagagaagttggggtcccgggcctggtaactcgccagcacgagttcgaccgctccccgcgcgaggtccctcgaggatgacttgatggtcttctcaagctcctcggggagttgttcgagaacccaggccatcctgttgaggtgcggagcgaggccttccagattggtggggggcaccgtcgtctggcctttccagaggcccgcttgccgaccggcgcgcttcaggcgggagaccgcatcccaaagcatgtcgggcccaatctcgcccgccaagcgaagggcctcggcctccccggtggaggagtctagcgctcgctgcatatcggcgacggtgtgttcggcagctgcgaggcgggcggctaagtcgctttcgcccgcggccgccccaccgatatgcgccctcgcgtccagctccttttcccgcgcctcgaggtcagcagcccgctgctccagtgcggctctctcggcgcggacgcattcaagattgcggcgcgcctgctcctcctgcgccgcctcgcgaagggacaggctgtccgccagccgtttggtcgtggcctcagcctcctcgagagctcgctcccgctcagcgagtgcgtcctcgcggaggcggagcgcgcactcctcctcggcacaggcggcctcgtgcgccgccagcgtcgcctcccggagagtagcggcggcctcgcggcccgtcaagcctttctccacggcgccggcgtgttcttccagcgccatagcacgggcctcaagggactcctcgcgccgccgggacgccgcctcagtctctgttacccgccgctctcaagcagcggcggagtcaaggactccctgggcggcgtcgagcttttctttcagctccgcctcccggctggcgttttgaaggcggagggcgtcttgcgcctcaatcatcgtggtggtagcgatgagggcggccgctcgctcctcctccacctcacgagcgatctccgtcagcgccgccttccgggcttcaagctccgagacgtgacggcggtgggctttacggcccacctccaccatggcgtccaccgagcgccgcccctcctcaacgcgtgcccatgcggcctcgagctccgctcgttccgcgcgcagggcctccacttgggcgctaaacccatccagcaccgcggtgtttgcggcggccaaggcctgcagaatgggctcggcgctcagcggggcgacggaagatgaggagaagagccgccttggagagaaggcgatgcggctcggccccccggaggacgtgctgggctcggggatgtcccccggacccgtttgatcctgggcgtcgcccggggaggtgggcccaggcgatgtgcccgcggcctcgtcgcgagcctccccggaggctgtcgcctgagggttgcccgaaggagtgggcccagttgacgcgccagcagcagctgttgcctcagcctggcgagcccgggcggcctcctccttagcggcttcctcagcccgggcggcctcctcccgagcagcttcctccgcttggcgaatccgggcggcctcccgggcggcctcttcagcttcccgaaggcggtctgcggcttcacgccggtcagattctcgcctccgctcctctgcggccgctggatcttcggcctcggactggccggacttggggtggcgggaggaatgcgacgggacatcgctgaagcagaagaaaaaaccagaagacgaacaaaatgagtaagaaaaaacttccttttgggagaaagatggttgcaatgagagtgagacgaacctgcgagggggtcggttgaatgaccaccttggaggggaaatcaggtttccccggcatggttccgtctcccccgtcttgcggagccgtttcttcttgcgctccccctcgggctgcgacgtcggcgcggccccctccgggcgccgactgctggcacgcgccgccccgccccctcggggaggagatgggggaggtgttcctcccagcttcctcttcccctgggcgtcggcagggcggctgctccccgagcccccgacgcggggcccagaagcacgaccccctcctggggcagattgttccccccggcggcgctcgcccgcgccgtcgtggcccttaggggctctctcctctgaggccccgacccccatcataatggttagaatggaggcgcggtcgggatcgctgcagagggggaggatctcctgaggaatgcgagacgcctccacggagctaagattcagcaccctttggaccacgatcttgaagtcctcgggagcccaatcccatctggctccctggtgggtccgcatgtagtcttcaggcccagtgtactcccaggcgctccgggcgcgctgttggagcggcgcaatccggcgacggaggtaatcgccgtacaccatggccccggtgagcccctgggatcgcaggcccgccaggcggtcgaggacggcgtcgtagtcctcccccagatctaccggcgcccgccagctggagacctgcgccgggggctgacttggaagtcggaggcgcgcttcgttggcgaggggggtgtagaaccagtcgctcttccagtcgtcccacttcttgcggaggacgcaggggatgtagcggttcaacaccggcccccgcggctggaagtagcagccgccaaccaccgacggcggtgacaccgactgcacggtgaagaaccaccggaacagctgaagagaggggcgcaccccaatgaacatctcgcacaggtgcgcgaagatggccaatgtcatcaccgcattgggggtgaggtgcgccatctggagatcgtagaactccaggacatccatgaagaaagaagaaaatggcgggaccagcccagccattgcgaaggggaggaagaagatggaccgccccgggtagtctggtgccgggcgcccctcgcctagcatcactatctcccgaccggtggcggactccggcatgaagcggcgcggcagtccggcgtgcctctcgctcacgatgcgggaaggcggtagtacactgccatcgagcagagcagagccccgtgccatggcggtggaggaagagatgattgagaacgagcgcgtgtggcgaaagtagggcgtagcagagaaagagttagagctcaggcggcgaaggcaagaggaacaatggcgaaaggaaggaagcaaatccttttctcgatgcttttatacccttgccatcgctgggcctggctcctcgtttctcgcgcccactacctcgctccctcgtatctcgctatctcgctccctcgtttcccgtgcccacgcttccactaatcccattcgcccgcttacggcgcatgaagtggatatgcggttgtggcaatcgaaatggattgtatcgtgcgcgcgttaattacgctcgccgaccgaagcggcgttaccgtatctccgggcgagacaaatctgctcacccagattcgcgcgctgctcaagtggtgtggcagtcttgaatagaccgcccattatggacaaccaaagttaccaataccaatgtgcatggattgagaccgttgggtattttgcccaactacggagaccggtcccacctgtcaccaggctttaggggtggcgtcacacctgaccgcttcccttgggaagggaaattgctctggcataacaccgggggctactgtcggtgatatgggaccgggagtatcatgactagaggcttgaggcagacacaatcgcccacgtggcctggcaccttcggggacgtcgggcccgagggtgaggtgtccgccctcctcctgatttcccccgagggggggtcgggttgcgcttgccccggccccgagggccgaggcaccccgaccccttaaggaagtctgcgccacatatatgggataagtgagcacagctgtgctcacctaacagcatttattgcagtctggtcaagcgtgtcacgctgcatgcaacgcagtacagcgcgttcctttatccggtctgtgaccagtcacagaccggtcagatcacgggttaggtggcgactggcggtctgacgcacgccttgccccatcccgtcaagacgaaagcctctaggcactcgtctcaagccggagctagcgtgttatctcttagagatggcacgttagccctggtcagatttataccaggcttcatcctaaccattacaggcaaggtgttacacgaagaagggcaaacatgcacgttgttaagctgacgcgtggtggacaagaatgaccggtctggcaccggtcgcgtcatcgacagacagccacggtcccgcgtcatctctgtcttcgggggaggtgggggtaggtgtgggctgtcccatcagaagggctcccggatggaaaccgtaccgatctccgcccattaaagagaaaaagaacagtccagtttggaaagagaaaggtgcatgtggtatccccttgagatataaaaggaggaccttgcccatttagaagggactttttccctagaacaagggaggggaaaggaagtgaatcctttgtaacttgtccatacacaaatccacaaaaacacaggagtagggtattacgcttcgcagcggcctgaacctgtatacatcgccgtgtctcgtgtgtcttgcgggcgggtgatctttccacatacagagagagagagagcttgggattgcaccctaagcccctggtcgaaccggcaaaggggggcttgcgcagtctcccggtgaggggccacgagctccgtcaaacataaatatggtattttttacgtttagttgttcttattgagacgagcatcttcgccccatctttattttaattctgcatccgccactgcaccgtggcacaacacaaggagcagaggcgcgcaagaaaattgctgagaaaagtcacatgacatcatgaattttggcgagacctagaccatccaaagtgaataaaacttattggtacttttagaagcctgaaaactagatacaattaaaattaatatagttgtgtaccactgtatcccgatggatttgaactagttcggcatcaacctagagatccagacttgcggtaagttctatttgttaaacaaattttcaaaaatgtctaaaatgtaaaaaaaaaatcttgccacgctgcatatgtgctgaatattggcttgctaaacacgacgcttccatggacgcgggtgacgcggcttcctcgccaactgtaccggatgcgttcggtcgcggcacgttggctttgcgtgttgtcgagttcccacatgctatcgcccaataaaacccacctcgtcctcgtgtccattcgtcctcatcccacaaacccctgagcgagcgacccaccacaccagtaaccataattaacctcttcctcactgactgcacctgctctgtcacaccattcatgcccgtgatatcctggctccacgagctctgctcccccacctgctgcctcggcgcgccgtcgtcccctcctcatccccccgccgactccgacgccaagaaagacgacgcgatggccgccgccgccgataacgaggtggccgtcatcacccaccgcaccgtcgacgccaacggcctgcggatgcacgtcgcggaggccggcccgcccggcgcgcccccggtgctgctcctccacgggttcccgcaggtgtggtacgcctggcgccaccagatgcgcgcgctcgccgacgcagggtaccgcgccgtggcgcccgacctgcgcgggtacggcgactccgacgcgcccgccgccgagctgcagtacacggcgatgcacgtcgtgggcgacctggtggcgctcctcgacgccgtggtcggcgcggggaagccggtgttcgtggtggcgcacgactggggcgcgctcacggcgtggaacctgtgcctgttccgccccgacagggtgagggcgctcgtctccctcagtgtcgcgttcaccccacggagccccgcgaggaggcccgtcgacggcctgagggcgctctacggcgacgactactacatctgccggatccaggtacacaatacaacaaacaccttgcgatctttccataaatcgcagatagcttgaccgatcgattgatttcaggagcctggagcgatcgaagctgagttcgcacggctcggcacggagctggtgctgaggaagttcttggcttaccggatctcttggcccgctgatgatgccaaaaagcgggtgggggtcgccggacgaagaggtgcctttcccaagttggataacaaggagggccttcaggttatcgcgagccagttcgacaagactaatttctaccggagggtttactactaccgcgccctcaacaagtaagccatatcccctactacttgttggaaatatattatcaggctttgttcaaaagatgttcgatttggctgtgtcgtagggcagaggctagggatataaacgctttgatttggagtcaatttttccccaagtaaaattttagtc

SEQ ID NO: 24311 - DNA, 710 bp, Oryza sativa
attcctgcagccctgattctcaactggtgatatcctgatcgaagatctatcttggagaaaacggtggcacctttaagctgatcaaacaaatcatcaattctgggcaacggatacttattcttgatagtcacatcatttagtgcacgatagtccacacacatcctctgggtatggtctttcttttccacaaaaataactggagctccccatggagatgaactcggtctgatgtatcctttctgaagcaaatcgtctacttgcctcttgacttctgccaactcattggctgccattctataaggtctcttatggatcggagttgttcctggtaccaaatctattctgaactctatatcccttttaggcggcataccaggtaaatcgtctgggaacacatcgggatactcccggactacaggaatctcttccaaagttatttggttcagtcttgaccttaaagactcagaagacaatgcatgaacagttacaactcgaccatcattgctggtgagagttacttttctgttggcacagtctatcacacctttatatctggctaaccagtctatccctaagatgacatcaatgtctttggattctaacaggataagattggccagaaatggtactccctgaatttctattctgacagaggggctacgttgcaaagagagtgcctgattacttggggtactaaccatcaaaggatg

SEQ ID NO: 24312 - DNA, 732 bp, Oryza sativa
attcctgcagccctgatgttcccgcaactttcccaacaccagacggagatggtgctgatggtcttcctctgtttgtgagtatatcagaatgtcgtcgatgaaaaccacaacgaacttatccaagtattccatgaacactttgttcattaagttcatgaagaaggcaggagcattggttaaaccgaacgacatcaccgtgaattcatacagtccgtatcgcgtggtgaatgcggtcttcgggatatcttcttcacgaatacgtaattggtgatatccggaacgaagatcaatcttggagaatacagtggcatctttaagctggtcgaacagatcatcgatccggggaagagggtacttgtttttgatggtgacttcattgagagctctgtagtcaacgcacatcctcttcgttttgtctttcttctccacaaaaatcacaggagcaccccaaggggaagtactcggacgtatataccccttttctttcaactcttccaactgtttcttaacttcggccagttcatttgctgccatacggtagggtcgcttgtacagaggagtggttcctggagcaagatctatccggaactcaatctctcgcttgggcggcataccaggtagttcttccggaaacacgtctccgaactctctgactatggggatttctgacagacctatctgatgcagttctgaacttctgacagaggttgggggtgcaaagaaaccaaccgg

SEQ ID NO: 24313 - DNA, 1375 bp, Oryza sativa
gaatcagatccgagggaaaaggaatcccctggatttctataggaacggcagggctataatactttgctgtcataaccccgccaggggtggtgatgagcagagggtttctaagcctttctacccccaactgatttctccccacgaatggcacagatataaacgagtgggaagctccagagtcgaacaaaattgtagcagggatggaatggacgaggaacgtaccaacgatgacgtcgggagttgtcagcacgtcctcggccgtcacgtgattcacacgaccacggatgacgtccttgccaccgttgttggagcggggaggcgcttggccttgctgacgccttggctttgggcatttatccgcaaagtgcccgggctcgaagcagttgaagcacagacgctgctgaccttgagcgtccctgcggccttgaacgggctgcacagctggcgtaggaggacggggtgcacgagtcccttgttgattctgctgctgctgcggctgtgggacgcgcaccacaaattgaggtcggggcgctgggcgaggttgctgctgctgttgctgctgctgcgaggaggatccccctggatagggattggtgtagcggaccctctggttagcaccctgttgattgcggaaattcgccaagcggcgcttgtgcgattccagctccttgtgcttggcttccaagcggatgctcttgtccaccagacgttggaagtccgggtagtctccagagactagacgaacagacagctcggggtccattcctgccaagaacttctcttgcttctcctcatcctcccgcacatcctccggagcgtaacgggccaggttgttgaactcatgcaagtactccatcacggagcggttgccttgcttcaactcccgaaattcccttttcttaagagccacgactccggcgggcacatgggttttccggaaagcggcggtgaagcgagtccaagtaataggttgcccttctggctgcgtggcctggaaatggtcccaccatagagatgcgggcccctgcagctggtgggcggcgaagatgactttctcctcatcactgcactgcaccgtgtctaacttcttccccacggcatgcaaccaatccaacgcatccacggggttgttggagctagagaaggtaggtggacggatgcggaggaattcggcgagtttggagtgttggggaggtggtggtggagcattctgttgtggcggattttggaggtggtggaggaaagcattcatcatgttggcttgctgggcgaggatttgggtgagaatggcgttggtgtctggtggtggtggtggaggtgggtttcccttgggggttggggttgctgccctcgggttggttgccttcaccggtgc

SEQ ID NO: 24314 - DNA, 5566 bp, Oryza sativa
gaaaagaaaaaggctttaacactaaataactccacataacagcagaaacaaagcacaaaaatgggttctttacatcttgaggaaaaattagagacttgaacggtccaattccgagttcaaatggccaagatatggccatttgaagtttatatgctctttaaatggatatttgcgaatttcttcatttaattttcaattaaaaattcggattattgcgtcagccgagggggcgggcgcgcggaccgggtccacgggaagtggggcccacgcgtcagccgctcggtccacggtggaccgggcgcacgcggctggcggcggtcggcgccgtgggtcccgcgcgtcagccgcacccgcgggcgcgggcggctgacggccgggcccacttggcagccgcgagggcgcgcccgagggcggcctcgccggcgcggccgacgggagcggcgcgcacccgcgccccgatggtcgccgccggcgaccaacggcgcggcggagtggcacccgagagagaggaggaaagggggaaacgaacgggacggtcttcggctcaccccgagacggcgaaggcggtggaaacggcggacggagcggaggaagacggcggcgcggctcgggatgacgagggcgacggtgctccggcggtcggcgggcgaagcggagcggcggacggggtcggcgacaacacggcgaagcggacggaggggtcgccgagtaaggaggaagtccggagcggcggcggcggcgaaccgaaggtcgacggcgacggcggagagagaggagcacggcgctagcacgattccgacggcgagagcgagcggtgagcggcggaaacggaagagcggagctcgggcaacgaatatatagcaacgggagggggagagcgcggccggggaggaaggaaaccggccgcgaagatctcggccgccattgattgcgccggcgactaatgcggtcacaattcgaacaactccgaaggagagagagaggggaaatcgggggaaacgggagagggaatgacggggaatgattcccccttctttaatgcgcgcggcgacagcggaatgcggctcattccgcggctgcggcggcgttaggtcacgggcccagcggcgggcgctgcaggatgaggagaatgacaggtgggccccacccttcagcgagagtggcgggcgggcccgcctgtcaacggcacgcgcgcgctcggtgagccgatgggccgcgggggaagagagagatagggagggaatgggccgagccggccccaagaaggaaaaagggggggggaaacagcagttcttttagggttttctttttataaaccttttcaactttgttcatttcttttcaattattatttgggctctgaaaattccactaaaatttgtttaagcattttaggcttttaggaaatatacaaaaatcctccaagcctcatttgacttttatctttgcacattttaattgttggaggctttcacatgaattttaattattcttttgcacaatttcgaggatgaattttagagtcgatttgggacgcgacacgccttctctcccagccttgatatgaaacgacttagggcggccatgcaaccggtgacgcattgcacatccctaagtttgctgggggggcgcatccgctcaatagctcgaatcttctcggggttggcctcaatgcctcgggcagagaccaagaacccgagaagcttgcccgcaggtacaccaaacacacacttatcggggttcagctttatgcaggcggagcggaggttctcaaaagtttccgctagatctaaaagtaaagtttcttggttgcgcgtttttacaaccaagtcatcgacataagcctcaacattacgtcctatttggctacccaaagaaattcgagtagtacgttgaaaagtaggacctgcattctttaacccgaagggcattgatgtataacaataggttcctacgggggtaatgaacgcagttttttcctcatcctccctagccatgcgaatctgatggtaaccagagtatgcatctagaaaacacaaaaggtcgcaccccgcagtggagtcgacgatctgatctatgcgaggcagggggtaaggatccttaggacatgccttgttaaggtcggtgtagtcgatgcacatccgaagcttgccgttcgccttgggaacgaccaccgggttcgccagccactccggatggatgacttcacggatgaatccggcctcgagaagcctcgccacctcctcgcggatgaaggcttgacgttccggggcctgccgccgcactttctgccggaccggccttgcgcccggccgcacagcgagacggtgctcaatcacctccctggggaccccgggcatgtccgctggtctccatgcgaagacgtcagcgtttgcccgcaggaaggagacgagcgcgtcttcctatttgccatccagaagaccaccgatccgtgtggtcttggatgggccgtcgcccaaggcaacctccttgaccgggacctcgtcgcatgtggcaatccgctgcctcggggcggtgggggcggaggtgccgagcctctcgtcaccaccctcgggcttggtcgcagcagcgaggtggtccgcgcgctgctccatgcaagcgagcgcgactttaaggtcgccacggacagagatggggccactggggcccggcatcttcatctggaggtaggcgtagtggaccgccgccataaacttcaccaacgcgggccttcccagaaccgcgttgtagggcagactaaggtccgccacatcgaagttcacccgctccgtgcggaagttggctgatccaccaaaggtgaccggtaggtcgatgtgacctaacggccatgtgtgccccggcgtcacaccaatgatcggttgagacggctggagcaccatccccggggccttgatagcatcaaaggccgcgggggaaaggatgttgagagccgctcctccatctatgaggacacgccccaacttcacattgcagatggtgggggaaaccaccatcgcaacctgccctccccgggcaacgcacggtgggtggtcggtctggtcaaaggtgagggccacctccgaccaccgcgcccgacgcgtcgcctcatgagtaggggccgcggcgagaagctctcgcctcatggccttgaaactccggcgagaaacgtgagcacacgctcccccgtcgacagtggcaatggtggccccaggttcttggaaacctaggtcatcatcaccatcatcgatgccaacggcgggggccttctgtctggcctcacttcgccgtttaccggagggaactgccgcagacttgccctcacggcgttcctgcctcctgtcctcctcccacttcctcgttcgctcagccaaatttttgactgcgcgacagtccgcgagatcgtggagggaggtgttgtggacggagcaccacttgctggccgggcgctccctgctgggagtaccagcctctttctttttgtcgctcgcaggcctcccctttcgggtggcccgcggagcgccctcgacggcgaggacgtgaccctcgtcgccggaatgggccgaccttttcttcctcctcctgtcacgccgccctgtctgagcggcggatccgggggcggccgaagctgccacaccggaaccggaggggttccaggtccaggcctcctccttgcgagccactcggtccgcgagctgaaaaagctccgcggtagtctggggctctttggaagcgatcttttcgagcatgcggttgtgccgcacgccccccctgaacgcgtagatcaccgcgtgtgcagggatgcatggtatagtattgcggacttggcaaaaccgctgaatgtacgagcgaagcgactcatcatcacctcgctgtactgcatgcaagtccgcttcttcgcctgggcgcggatatgtgccttggaagttcatggtgaactgttggcacaaatcttcccaggagtggaccgacgcgggtggcaggttcattagccaaccccgcgcctgtcccttcagggccatgggaaagaaattagccatgaccctgtcgtctcccccagcggcctcgatcccggtcgtatagatctggagaaactcggtggggttgacgctcccatcatacttctcggtgatggtgggccggaaccttgggggccaacggacattccgaagactcgccacaaaggctctacagccaacaccaccaaccgggggcacggagggctggtcctcacgtccatgtcgaggtgacactctggacgaggaggcgccctccgttgcacggggagtacgccggctattacgccggcgctcgatgttgaggcgggcatccggctccccatgctgatcctcccgagtcgaaggtgtcgacgagggagtggcagccgaatgccgtgcagccgccgccgctcgccgcgccctccgccttgatgacacggaaccggtggtggcggcgccggaggtcttggtagtggcggaccgtccaccagcacccaggcgctgctgggccatcatgaccaagttggccacgtcgtccagccatcgctgagctggagactcagggtcatggacgacgggcgggtgacgtaggagcgcgccagcagcctgaagcgcgccctgaggcgtgctgccgtcgccgtagacgaggaggcgacgctccccatctcgccgttcccctgcatcacccgcaatcggtgatgctgcggatttatcaactctctcgagcgcctccccctgcttaggactttggagtggaggtgggggagtacgagctcgacggcgtgggttcggctccccgtcgtcgccgctcacactcggagagaggtcgtgcacctttgcttgctcggccattaggctgaacaaaggaaacttggcacacacggaagagtatgagagctcagaaaacacacgctgagccccctacctggcgcgccagatgacggagctcgtggcccctcaccgggagactgcgcaagcccccctttgccggttcgaccaggggcttagggtgcaatcccaagctctctctctctctctctgtatgtggaaagatcacccgcccgcaagacacacgagacacggcgatgtatacaggttcaggccgctgcgaagcgtaataccctactcctgtgtttttgtggatttgtgtatggacaagttacaaaggattcacttcctttcccctcccttgttctagggaaaaagtcccttctaaatgggcaaggtcctccttttatatctcaaggggataccacatgcacctttctctttccaaactggactgttctttttctctttaatgggcggagatcggtacggtttccatccgggagcccttctgatgggacagcccacacctacccccacctcccccgaagacagagatgacgcgggaccgtggctgtctgtcgatgacgcgaccggtgccagaccggtcattcttgtccaccacgcgtcagcttaacaacgtgcatgtttgcccttcttcgtgtaacaccttgcctgtaatggttaggatgaagcctggtataaatctgaccagggctaacgtgccatctctacgagatagg

SEQ ID NO: 24315 - DNA, 2916 bp, Oryza sativa
  unsure (1)..(2916): unsure at all n locations
cagcgtgacacgcttgaccagactgcaataaatgctggtaggtgagcacagctgtgctcacttatcccatatatgtggcgcagacttccttaaggggtcggggtgcctcggccctcggggccggggcaagcgcaacccgaccccccctcgggggaaatcaggaggagggcggacacctcaccctcgggcccgacgtccccgaaggtgccaggccacgtgggcgattgtgtctgcctcaagcctctagtcatgatactcccggtcccatatcaccgacaatgttgtaatcatataaatatatagtataatcaataaattaaggcaaacaaaaaaaataatattaaaataaagtaataatttttgcaccatacataattcatcatacataaaaagatactagtaaacatatcaatttcaatttgcaaatatgagtcaattcataaagcatggttgatatatatcttttaaaaaataaatatatgagaagatatcgcatacccaaaataagatgattattattttgcttagaagggagagagaaaaaattaggcacctaactatagtaggagacgggggtgagcagtgtcgaggaattgactcaggaaagcatcacatacgcaggattaaaattgaacacttggactgcttatttatgggtcaattgtgaattggatatggtggtaggtggcccaaaaaggatatggagggttggggcggcncggnccgtanctgggccagccgcccaaccccgcctaatgggtggtatcgcccctgccaccgtgctactcctatcctacgcggtacttccctacttgtcgctaatgtcaacagaacttaccatagcagctttcactctaccccaaccccatttccccggccactccttgtggtgagtggtgacaaggtgtcctgaaacgccaccgtcctctacctcctaaccactcgtgatcatacacctcccatcactgacccctcctactgccttcctccaacctacggctttggtggcattgccatcgcctcactgttcacctgtatctgtcatccaccacggtccatcatcttgcgaccatcccttcgaacccagagaaaccacctcttcctcctttccttcgttcctcctaccccccccaaccctaatccaactcactactaccattggtgaccatacttgcctgtgtcagagaaaaggaagagccccccccccccccccccaaccacatatcctgagcttgaagacaatgtcattgaattgaaatttcttccattttcagacacttgaaacctagtgatcacattaattttaatagcaaattgaactttgtacatggtaaaatgtaacatatttcgctttgcaccagatttagcatatgttttcactttacaccaggttaaattgaaataagttttatttaacacctggatatatcatcaaacctattaaatttcatgagtttttataaaatctaaatgaaactttgtgaacacagtagagtcaagaagtttaataagttatactcatattttaacaaaatctcctttcatttatatgataatacctccaataaaaaatataagcatttctggcggtttttacgggaattaaggaagtagattggatgaaatagtgaaaggttatgattggttgagaagacaaggtaagtgaaaaaattaaatgcaagagggttgtgattggttgagatggggtggtaggtaaagaaatagctatattttgagagaaatttgaactctagacaacttcattttaaaacgaagggaatacaatttagtgcaaagtgaaacttattggatatagacatgtataaattaagtgaaagtaaactggatgttgaaggcaagaatgtacactctacccgatgccaatttactctaattttaattgcaaaaatatgacaaacaaattacaaaagcatgttttgaagataaatttttatatgatttttatgcatcaaatctaaatatttagaaagtgttagtacccacagctttgaatatctaatttcatacttgtacaaaatctcattgtggacaaaacgagtatgctgttattttttttctgtagtgcattgatgcttttcctcgatagaacaagcatgatgatgagtattagtatggccaagcagatcagctgcaactttaaccatcatgttgcgcatatcggcatatgtttatgtttgctacatatgcgttgcctattcatgtgaacttggaataagtcatcgcttcgtggatgcgctatgcacgtggataacttaacttttatggctttgtggcaagaaggttcacatgtgcaacaaattctctctccgtttttttaatgtatgacgtcgttgactttttaaccaacgtttgaccattcgtcttattcaaattttttatgcaaatacaaaaatacttatgtcatgtttaaagaacatttgatgataaatcaagtcacaataaaataaatgataattacataaattttttaaataagacgaaaggtcaaatatttattaaaaagtcaacggcgtcatacattaaaatacatacggggggagtatatacttcaggccactgggtctgtgttgtattatcactagttcactacatcccaaaactcaactcttgccttcttggtggagtgtgagtcagtgcattgggccattggccggccggtttctccaagttatgcataatatacatttgtatatggagattccagaatttatttagtttataacacaaaaatatttgcaacaaggtgtgtcccacaaattattttcattttaggttcaatttgaattagttagacggctgtagctgttggtggctcggaaaacgggacgaatcatttgcacatgattaatcaagtatcaattattataaacttaaaaatagattattttatttttt

SEQ ID NO: 24316 - DNA, 2691 bp, Oryza sativa
tgtactgtttatgtaccagcggtccgatggagaccgattaaggttgaacatacatctagaactccaagtgtaacaccccagaaaaccacataagcctgggatgccactaaacaaccatacaaaagtgccaaaataagcaaatttcagcaacaactaccttagataagaaaacatcaatacaacaagacaagcaacatgctaaacaagcattaaagaaatatgggaatcataaccatttgcaatacaaaataatagttggatgcaagttgcaaacccataaccatcctatatgtgcatgtgtgtcaagttaatcttcattttcataaaagttgtaggtattgttctgtagatttccaaagtgtatttatttgcagtcatatcctttttatattttgagatataaatgtttgaatcagcagtgttgtttatagtccaagcggcgttccttgtatttgcgtgttaacgggctagggccataggggcatattatttattgttttatatgcatgtttgagtgtatatgctgaggttgtcttgtgaataggtggtagtgcttcggattatgcttggtatcgtctcttcgttgttagaggcaagtaaacgtagcggtggtttgctatagctttaacctgttattttattctaccttcactttgaaaatatatatcatcaaccgagatattattattcgttacatagaggatttacctatctgaatcacatattgatttttacactgtatatggttatacttatgctcttggttataatacccttatactgatctccatcgaaggaatgtggttccgatattctactctggaattcatactgcatttgcatcacttgcattgcatttgaagttatgtcgtgaacctatggttgcgaccgtaccggtacagcatcgtatattgccgtaatacgatgcagcttcataccttattggatgtgaaggcaggagtacatatcattgcattgcatatgcacttattcaccttgttgggtgtgaaggcaggagtacatatcattgcattgcatatgcacatattgcaggatgttatgagaattatcgatcgaagatatctttgagaagtgttttcttctctgggatttgtgagtatatggatttgattggtgacgctatggtgttttagtccttggatattgaacttgtctttatgtgaatcataacttggtatataattagttatataataaacatgtggtttaaatagcttgttaaagccgtttcttgctaagatttattctcacccccttatagtcttttcaggtacttgctgtgacatgttggcatgtagggatgggattagctacacagtcgcacaacatgatctcacttagtcatgagttttgtaatatactgataagattacttgtgtttagacataatgagctaattaattactagagttgttgaccattggttaactacttttttcaagcctatccctatatgtcagtcagttgttgtatcataaacttaatctatatgttgatgcttccgtgatgttttcttgtctaaggtagttgttgccgaaatttgcttattttggcacttttatatggttgtttagtggcatcccaggcttatgtggttttctggggtgttacaccaagctacacttactcacaacttgaacaatggactacgccttgaattgcaagtcttgtgcaagcaagtttcactcagcgtcttatctggtactagaccgtctgtagactacccctcgggtggagcgtataagtcatactcctaggtctttagtaagcttcctagaagattcacccaaaatctctacagactgcgaccaacagtcaagctcacaaaggtgagttctttcaagaatgctctgcaggacagcatctgcgctaattaaagccaacagaactcattaaggcatagccaacctgccttgcagctcacgagagtacatgcatcttcacttagagagggtatagattggtactctcctctagtttattaatggtttgttcttcccaggttctaattcacgggatcttcgatcacatagattgggttaccaccatagtataactcacatgggtctcaaacccatctccttcgatgcattgtctatcacatttcgtgatagtcccttcgtgaagggatatgccaggtttctagctatttggatgtaatccaacgttataactccggagtttctcaaattcctgacagacttcaattgtcttttcacatgtctagacgatttcatattatccttagaactattcactttgacaattaccgttttattgtcacagttcataaggatagccggcaccggtttttcaacaataggcagatccattaatagatcacgcagccattctgcctaaacagtagcagtatctagtgccgtcaactctgcttccatggttgacctcgtcaaaatggtatgtttgcaagacctattccgccgctgttttggtcatcggtgagttcgccgcgtcgctctctacgtgctggtgccctccgttcgcgtcctcgcgccgtcgttcgccggcgagcatgcgcgcccgagccgccgccagaggtgacgtcaccgctgacgtcatcgtggccgtctgccgtggccggtcatggaccgttcgatctcagccgtccgttttggataggatcgatctcggtcgttcgtttccgtgagc

SEQ ID NO: 24317 - DNA, 1671 bp, Oryza sativa
ctattcaactattgcatttatttttcgaatgtcattgggtggaattaacctattgtttgttatagccctttttgttcttgattactttattccttgataccttgggttattacaacttgactagttgggctatatatgtattggttcagctagatattagatatgattgcttagccatgcttagaaacattagcacacttttgggttaacttatgattcactattatttaatgatggcttaatgatagttcacgatggtcaatcgtgattggttaattaattacttgccaactaaaacttgataatggtgggttgtgagcacatggttttgagagtcgtgctcatgacaattaaggaccggttcacgagtttctgttgtgaaacattaaccgtgccaaccacaagccagcgtgggcaacggctttaccttttgtatagcatggttcattgcggagcaccaatctgagaagtggcggagataagcccacgggagtcgctggggagtccatgccttgtttataagagggtgattatgatccaggaaaggtgccctgtggtggattgtgttgtgcgaggggtattgtcacagctcctttccgaggtaccgtggtggtattgaggcacatggtgacatgttgtggggctgtgtcttgtgggtacagtggtacacctctggccagagtaaaactattcgaatagccgtgcccgcggttatgggcgggtctaacaatgtctttcgtgattagtctcacacctctcatcataataaaagatgctataactggtaataatttgtttagctcctggtttggaatggtatattcctggtttggagatagatctgtacagccgggtatggttgttcagaatggttgggcctatacaacagggtatgttgtatagcgttggattaatattgtttaattattacttaactattttattaaattctgaaatgtttattaaatgctgtttatgcaaatgaaaccctactatgccatcctttgttatcctgtgcacttgcatatttgctgcgtgacttgctgagtatgtcatatactcaccttgcaatcattcatcagaggaagagttctacagtgaagctgatggtgtggaggattaggtgtagccctggtcaagctgcctgtggagtggagccgtctgcgccgtttatttttttttccgctgcttagatttttattgattgagaggaactatctacctctgtaatgacattttattcgcttattaattagagtaataattgtactctattatcaatttgttattgtgtgcctcggctgattcctggacgagggttcacacacatgtaagcgtttggaattttggatagaaattccggccgtgacaatctagtgccgtcaactctgcttccatggttgacctcgtcaaaatggtatgtttgcaagacctccacgaaacagcaccaccacctagttagaatcactataaccatctagtaccgcaggatacctagtatagtgaagcctcaattccatagtacctttcagatagtgcattactcgctcaagcgcacgcaatgatcatctcccggattagaggtaaaccgggtcaacttgctcacagcaaaggagatatcaagcctatttgcactaaccaagtacattagcgagccaatgatttgggagt

SEQ ID NO: 24318 - DNA, 700 bp, Oryza sativa
acttgcctagtatggtgtcatctgatggttgcctgaactgtaagatgcatactgatgatgaaaaactcatcaaagaggtgactgtctttgagataaaaagaagggaatcgggagctgctattgtctgttctgatggtttgtcacaaaagcgtcagccacgagatatgtcagttgattggtttgaggaagaaactaaaagtggagatatcatcaaatcaggtgattcatctccaactgtactgtcaactttttcatctgaatttcatgatttctctgacaacaatgaagtggtagggttggccacggattttcttgatgtaaacaatcaaaataaagcagtattgctagatagttcatctcatcgtggtatcatggacaatcattgcaaatgtggtgaggaattttcttctgataaggaggctccagcttaccatttatttgaaaattatgattttgttgacaagcatgaaacaaaagaggtggtacttggtgatacagtagtcttgacctttgtagatgatttagccaatgatgactctgaatatagggaggatatttcagaacaaaaggatccaaataatttatcaggattgcttgataacgttgcagatattttttaccagcagcaagaaatacataaggtggttgtttctgacgacaacaagccacctgaagttttgttcctcagtggaaagcaaac

SEQ ID NO: 24319 - DNA, 3007 bp, Oryza sativa
atttattagtaacacgtgcacagaaaagtccaatgtcttcttttaaatttgttatatgaaccttataaagttatactatctgctaagaaacaaatatgactattcatcttcatacactttcaaggcaaacaatcatgttaggaaacctcactaaaaaaataagagtaggaagaagcaaaacctggtagagcttgacaacaggctgcagattggctgttctcttccgcagagcatgtgtcagacggtcaatgtccgacattcttttgagttggtacctaagtccctgacgaagctctggatcttctacgaaagcctgaaccatatctaatctgttattgatttcatttacatctagcagaggttgtttcagccatctgttaagcagtctctttcccatacctactgtacaggttctgttcatcaaaccaaacaaactgaagttcttgtttacatcagttttagcttcggcaatattcaatgctcgcacagcagcagaatcaagacgcatgtagcggtccaaactgtatttctcaattgtgtaatttccgtagtttgtatcatctgctagcaactcagcatatgaaactagagctccaagggcacccaatgcatagtcaaactgagatacaagatcacgaactggctcaacaggacctctgattattctaccaagatcctgcacaagatctctggatttaaattcaaccttctttctttcagttaatagaacattgcagttagtgatagcatcctgaagaggcttcaaatctatagatttctcacaatctgctgggagaagacactccttgcaacctaatgcaacaagggctgactctacatttgtgaatcgactatcttcgggaaactcagacaacccaagcttcctgtttgtcaaatcaacaaaactaagacctacatatagttgtgctttctggaacacaggaaacaatgccacagttaccggagaatcttgcatgtcattgtttgcaaacagaatatcttcaaaactgccaatatttccaggtgttccagattttgttaacctccaactagacccacttccctcatagagttccaatgtacggtctgtcctctctaacaaaaggttgcgggcgatggtctcaaacatagtcttgctcacactgacacttgagagtccatcagagttgctacctaattggcgtaaggcagacattgtgtgatagtatatttttgcaatgaatgtggcattctctccatgagcagtgtaataatcctggtcaaatatttcagcattagtttactggtcacacttttaagagcgaaggcagttttacataggatgataggaataaatactattgatcaaaaagaaaaaaaaactgatcttttttgtttgagatgaagaaactgatatcaagctcagcaagaaactttgaccatgatttttgaacagtggataatactgagaactccacaacaattatgaaagcatgttgtgaaatagatcttacaatgcaattttcaacctacaaggcataataatatagaaattgagtttgaacaggtgagtcagagctgtcagtatttgaaaaacaaagagagtatatctcaacagctgtgattcattatgaacaccaactacttctgatgatacaacgcgtatactgtgaagagaagtgtgaaagtgtctgtgcgcgtgatttatgaaacaccaacacacatgtgcctggctcctgaaaggggacacacaggtaaaggggtaaaattactttccaaagctatttttttagaatactgtacattccactaatttgttagataaacatttgtgaacattcggccattttatcaataaactgagaagatactagacgtgacaaatatattcaaataatatatagcccgaatttatcaacaaagcctatgtcttatacattggctaatggtggcctaattttccagtgcatgtaaagtctacatgaaactgaagcgtagcatatcatcggaactatgatggagctctgaaacttttgtcaagataaatcttaagtttccttcaaatgacaacttgagttatccggaagggtaaactgacactgacaacttggattgaaaaaagaaaaaaaaaaactgtcactgaaagcctgaatagagacaaacaatctacagtcgtattaggggaagacagatatgcactacttctcataatattacaattaatggaactaattccccattaggtttgcacagtggctcatcaagaaaacaaaagcatctacatgtatcagaagtcaatgttaactgcttacccgccgatcgaagagacgaatagccctcgaatcctatacatccaaaaaaagaatgaacaggttaggaaaagaagccccgaaaatttgtccaaataagggaagaaaacaaaaaggaaagagggagaaaccaaggggaaacggacgcacctgcggcagtttcttgaagaaagagatgaagccctgcgcttgcctcgcatctattgaaccaaacaacaccaagtgagcgaaccaaagaaagaaggaaacggatccaagaactgaagcgcacggacctagcttgagctcggggagcttgccgccctccggcaagaagtcgtcgccctccatcccgccgcagatcgccgggctggatcgggcgaggtggtggcgatgggggacgcaggcgatgtgttcgacgaaatgcgtaggtacgcgcgggcggggtggggcgggaaaagggttagtgttttagggggcagtggagaggatggcgcgcgcccaggtgggtatttcgcggcaaaaaggagaagattgggggggttttggagggtgagcgactgatggggtggtgatggggtgcgtgcggtgcgggagccgaggcggtcgacagattggccggcagcccggcagcagtgagcctgtgttccacggtccggtccttttggggcgatgggctcatggccgatcaactgcgcaacgctccggtgcagccccgcacgatcagttttttcttctag

SEQ ID NO: 24320 - DNA, 5069 bp, Oryza sativa
  unsure (1)..(5069): unsure at all n locations
attcctgcagcccggatggcacttggaacctttgaccaaagtgaattttggaattaaactcatgttagccaagcgcgtcatacaatcgaaattcacatgacaaagtcgcgaatgccacacattggactcatcattctcgttaatatggttcacaacgttattattattacacatgtcatccaaagaaatcggaacaagcatccgctgtcataacctttcccaataaaagttccatatttagatacgacacatttattggattcaaacacaagtctaaaaccatctctacacagtagagagccgctaactagattcttctttattgaagggacatgttgcacgttcttcagctgcacgatctttcccgaagtaaacttcagatcgaccgtaccaacaccatgaatagccgcaagcgacccgtttcccatcaacaaggaggaacctctcccgacctgataagaagaaaacagggaaatattagcacacacatgaatattagcaccagtatcaacccaccaatcaggtgaatgaaaaacagagagtactgtaggtaaaaatttaccgtaccccgatgttcctccgccctcactaatgactatgttagcagacttcttgtcattgcgctcaggacaatccttggcccaatgtccaggcttgccatacacaaagcaatctccctttgcctttcccttgcctttcttcttaaaattggttgtagccttgggtttgacatcaggcttgactttcttgttgttgtgggatgcgtgagggttcttcttctgcaccatattggcactagaacctccctcgatctttttgccccggttgtcctttgccctcgccttctcctcaacacccaaagagccaatgagatcattaacactgaactcttgtctcttgtgttttagagaagtggcaaagtccgacaaaaaaggtggcaatttggcaataatgccacccgccacaaacttgtccggcaactcacagttgttgttctcaagttccttgccaacatctaaatctcatgagcctgttctactacagaacggtcatcgaccatcttgtagtcatagaactgctccatgacatacagctcgctgccagcgtcggaaactccgaacttggcctcaagtgcatcccacatgtccttccctgaaggcatgtgcatatacacatccactatattgtcagcgagtacactgaacaatgctccacggaacaggcaatccgaagcctcgaacttagcctcctcctcatgagagagaggcggttcacttcgtttgcctcgtgaaacatagaagcattgcatcaatgtcaaccacagtagtgcacgtgctttccatctcttataattagaaccatcaaaagcatgtggtttcagtgttgcagcaaagccaactaccgaaaatgacctatcaggtttttggattgttggaaatatggtcataaatcggcatattttaatccaaaatattaagacaataaacatgacttgcacaatgtgaagtgatctagtgataaaactaaacataaccaggagcatgcttaaggtaaaataagcatcaacattgagacaatgcaataacattgcgactgatagttttaacaaaatgaaaggcaacagaaggatgttataccctgtgaaagtccctccgctggattatgaggcagttttgcattcgttggtgttgttgatcagtgcgccacctcctattccttgcacaccacctcctgccgcaccggatgcgccaccaccagtagacatgatgcagaacgaaccgaacgacgatggagacgaagaagcgagcggagcagtcgtgcggaagcactccctaaaaatctgatcacccgcctagccgtgcagatctctggtgaaggtgtgggttcagaggccctgcttgtcccaatcacttgtgcgcgcaagcgatcaaaaccggggaagaacataacagaggcagcacaggcacacatacgagaaaccagcaacggaaagaattcgtagaatatctgatcgtcggtctctgtctcgtcctaatagcacagccttgcgcgcacaaaaccggggaagaacagaacagaggcagcacaggcacacatacgagaaaccagcaatggaaagaattcatagaatatctgatcgtcggtctctgtctcatcctaatagcgcagcccgttacagaggtaatctcgcggagttgaattctgaaccattgcaaaaggatcgagagagagagccgagccgcagatgctgcgcgtgcgcacacgcctcgcccacggcctcggcccggcccgacgcgcgcgcgcgtgtggctttccgacccccactcaacgggtcaacagggagcctccaataactccctctttaagttgaggtactccacttttaatccccaaggtggcattattatctttaacatttattatgggcccatgagattttaatagaaataaatcaggtctagcctattattctaacaatccccaccaaatttcacggttcataagaaatgttctcaaagttgaacctgtttgatataccagtgtttcggtggagactgttaagttgaacttccacctaggaaaagagctacaccagagcacaactgaacaatagactatgccttgaattgtcagtcttgtgtgatcaggtttcattcaaacccttgactggtactgggctgccgtttgcatcccctctgtttggagcatataagtcaaactccatgccctttcatgagtatctagagatcacccaaatctcatagactgtgactagcagtcgagctcatataggtgtgttccttctgagatgttctgcaggtcaacatctctacttaagaaaagccactcggatcacattaagccataagccatcctaccatgcataatagaagagaagtacaacatggaaatgagccctttaagggtctcttctgtcagccacacaatagtttgtttcgccatccaaattcacgggatctccgatcacaatggacaggtttccactattgtgcaaccttagatgggtatcaagcctatttccctcaatgcactgtctatcacattacgtggtagccccttagtaaactgatctgccagctttttagccgtctggacatagtccaatgctatcactccggagtttttctgctttctgacagatttcagtcttctctttacatgcctagatgacttcatgttgtccttcgaactgttcactttaataatcactgtttgattatcacagttcatcaggatagctggcactggtttttcaaccaccggcaaatccaccaggagttcacgaagccattcggcctcaactgtcgcagtatctagtgctgtgagttctgcttccattgttgacctcgttaagatggtctgcttgcaagacttctaggaaacaacgccacctccaagtgtgaacacatatccacttgtgcttttatctcatcagcatcagatatccagtttgagtcactatacccttccagtacttttggataccggtataagtgatttctatagctcatagtgcccttagatagggcatnactctctcttttcagatttgaaccaaactggctcagcttgttcccagcaaatgagatgtcaggcttcgttgcctagccaagtacatcaatgaaccaatgatttgggagtatttcaattgatcccttgctattcttcggctttccttaatagcacactggggtcataatgagtaggagctgccttgcagtcactatagccaaagcgactcaaaacctggtccacataatgggattgcacaagtgtaatcccaccctcatctcctcttagtagcttaatgttaaaaataacatcagccactcctaaatccttcatttcaagtcttttggacagaaagtcccaaagatcaatatgtcatcgacatataaacacaagatcactcattctcccccaccatagcgatagtacacacatttgtcagcttcgttcacaacaaagccagcagatgtaagtgtggtgtcaaacttctcatgccattgcttaggtgcttgcttaaggccatacaaggatttcaactgtttacacaccattccctcctgaccttctagtgcatacccgtctggttgatccatatagatctcctcctccagctctccgtttaggaatgctgtcttaacgtccatctaatggacgagaaaaccatgagaggctgccagagcaagtagtactcgaatcgtggtcaagcgagcaactggtgagtatgtgtcgaaaaaatcctcgccttctttttgggtataacccttggccacaagtcttgtcttatacttttcaattgtaccatcaggcctaaactttttgttgaaaacccatttgcaggcctaagctttttcttgaaaacccatttgcatcctacaggcttgcacccatatggacgctcaacgacttcacaagtaccattaaacataattgagtctatctcactgcgtaccgcttcctttcagtagttagcgtcaggagatgaatatgccttttctatggttcttggagtgtcatctacgaggtatacaatgtagtcatctccaaaggattgcaaccctttgtctcttactctttcgagtatctataatgttatcctcctcaggattttcctcaggtgtttgatcattgtgttctatcggtgcaaagtgttcatgggataaaacaggttcttgactagaagtgctaggtgtatttttcatgggaaattcattctcaaagaatgtggaatctctggactcagtgattgtaccaactcacatgtcgggtactccaaagtttattattaagaatctataacccacgctatgaatagcataaccaaggaacacacaatctacagtctttggtccaagtttacgctttttggctataggtacatttaccttggccaaacagccccatgtacgtaggtatgagagatttaatttcttcctttcccattgctcgaatggtgttatttccttatgcttcattggaattttattcaagacatgacaggcagtcaaaattgcctcaccccaccattccttgggaagtcc

SEQ ID NO: 24321 - DNA, 595 bp, Oryza sativa
cccccaccatgccttaggtagtcccgcggggtccaacatggcattcaccaagtcagtcagtgtgcggttcttcctttcagcaatcccattagactcgggagaatagggaggcgtcctctcatgtatgatgccatgttcctcacaaaataagtcaaacttgtttgagaaaagctctccaccatgatcagacctaagtcattttatctttctgtaaagttgattttcaacttctgttttataaattttaaaatagtctagagcctcgtctttcgttttcaacaagtacacatagcaaaatctagtagcatcatcaatcaacgtcatgaaatatcgttttccacctttcgtcaacaacccattcatttcacaaagatctgaatgtaggagttctagtggtgccaagtttctctcctcggcagccttgtgaggcttgcgatgttgcttcgattgcacacaactatggcacttagaacctttgacaatggaaaacttaggaattaaacacatgctggaaagccgagacatcaagccaaaattaatatgacataaacgtgagtgccaaacattagcctcatcatccacacttaggggtagg

SEQ ID NO: 24322 - DNA, 2312 bp, Oryza sativa
ccggcccaagagggaagggggggggggaaacagacttcttttagggttttctttttataaacctttttaactttgtcatttcttttctattattatttgtgctctgaaaattccactaaaatttatttaagcattttaggcttttaggaaatatacaaaaatcctccaagcctcatttgacttttatctttgcacattttaattgttggaggctttcacattgatttttaattattctttggaaaatttcgaggatagattttagagtcgatttgggacgcgacaaacctacccccttaaacggaatctcgaccccgagattcggaagaactggcgaagagaccgggatgggctgccttcagctcgtcttcgcgctcccaagtagcttcttcttcggcgtggttgctccactgaaccttgcaaaaacgggttactcggttcctggtcctgcgctccatggtgtccaggattttcactggcctctccacataggtcaagtcttcgcgaacttcaatttgctctgaatcggcctgctcggatggcattcgaagacatttcttgagttgcgacacatggaacacatcatgcacgttacccaaggaggcgggcaactccagttggtaagcaacttctccacgtcgagcgatgatacggaagggacccacataccgaggtgcgagcttcccttttgtctgaaacctgtgcacacctcgcaatggcgtgacccgaagatacacaaagtcatccactgggaattccagatcacggcgacggttatctgcataacttttctgccgagactgtgccacctttagattatcccgaatgattctgactttagcttcagcttctctcaggatatcagtcccgaacacttggctttctccaacttggtcccacaatagcggtgttcggcatttgcgcccatacaacgcttcataaggtgccatttgtatgctggcttgatagctgttattgtaggagaactcggcataggggagactcttatcccaagtcttcccgaagtccaggacacatgcgcgaagcatatcttctaagatctgatttagacgctcggtctgtccatctgtctgcgggtgatacgcggtgctgaaatttagtcgggtaccaagctcttcttggagcttcttccaaaagtgagaggtgaattggcttcccctatcagatacgattttcttgggaacgccatggagactcacgatcctagcgaagtagagctcggctagcttgtgtcctccataggtggtcttcacaggaatgaatcgagctaccttggttaatcgatccactattacccatatagaatcatatccaccttgggtttttggaagtccggtgatgaaatccatcccaatttcatcccatttccattctggtacttggagaggttggagaagtccagccggtcgctagtgctctgccttgacacgctggcacacatcacatagggccacaaactctgcaatttcccgcttcatgctgacccaccagtatttctccttcaagtctaagtacatcttggtactgcccgggtgaatggaataaggactttcgtgagcttcctgaagtatcagctgtttaagttctctgctatctggaacgcatacccgctttccgttccataaggttccgtgttcatcctctgtgaaaccagcggctttaccctgtttcatattcttgaggagtccatgcatgtccggatcattcttctgagcctcgcggatttgatcgagcaaggtgggcttggcttctaacgcagccaagaatccacgaccaactatgtttaggttcagggcttccatctgttgattaagctcgggtggaatgcctcgaacgttgagagtattgcaatggctcttccgacttagagcgtcggcaaccacgttagccttaccagggtgatagtgtattcccacgtcataatccttgatgagttctaaccatctcctttgccgaagattcagatccgactgggtgaatatgtatttcaagctcttgtgatcagtatatatttcacagcggttcccaatgagatagtgccgccagatttttagagcatgaaccaccgctgctaactccaagtcatgcgtagggtagttgccctcatgaggtcgtagctgacgtgaagcataggctaccacatgaccgtcctgcatgagcacgcaccccaatccttggcgcgaagcatcacaatacaccatgaaatccttgcgagtatccggcaagattaacactggcgaggaaaccagcttttctttgagagtttggaacgccttctcgcattgcgggct

SEQ ID NO: 24323 - DNA, 733 bp, Oryza sativa
caagggatattttgcatattcggattgcctcaccgtatcataacggacaacggctcccagttcatcagtgccgatttccaggattactacatcaggctgggagtcaagatctgcttcgcctcagtttctcaccctcagagcaatggataggtcgagagagcaaacggcatagtactacaaggaatcaagacccgcgtctacgacaggctcatgtcacatgacaagaagtgggtcgaagaactcccatcagtactatgggccgtgcgtaccacaccgacaacgtctaacaaggagacacccttcttcctcgtgtacggttcagaggccatgctccccaccaagctacgacatcaaagtaaacgagtacagaagtactccgatgaggatcaggaggagcagcgaaatgatgatgtgaatctactcgaggaacatcgcgaacgagttgctgttggagcagccagctaccaacaggcccttcgccgttatcacgagaagcgcatccgagcacgcacgctttcgatcggcgattacgtcctccgactggttcaaatccaagcagggcgaaacaagctctcacccaaatgggaaggaccgtacacgatcacacaagttttgcggccaggcgcattcaagattgcagacggcgatggtcgtgagttggcatattcttggaacattgatcaattatgtaaattctatgtataagtcaatagtatccatacttgtaagacat

SEQ ID NO: 24324 - DNA, 759 bp, Oryza sativa
tccccttggggagccccagtgcttctggttaagaaaaaggatggctcggagagaatggtaatcgactatagagccctgaatgaagtaactataaagaacaagtacccgttgccacggattgacgatttattcgatcaacttaaaggagcaagagttttctcaaaaattgacttgaggtcaggttaccaccaactgaaaatcagatctgaagatatcccgaagaccgctttctcaacgcgttatggtctatatgagttcacagttatgtccttcggactcaccaatgctccagcattcttcatgaacttaatgaacaaaatctttatggaatacctagaccagtttgtcgtggtgttcatcgatgacatcctgatatactccaagaacgaggaagaacatgctgaacacctgaggctgataatggaaaagctcagagatcatcgactattcgctaaattctcgaaatgcgaattctggttggaccgagtagcatttcttggacacatgatttcctccaacggtgtcgaagtagatcccagcaaggttgaagctgtacttgcttggaacccgcccaagaacgtgtcagagatccgcagcttccttggcttagctggatattatcgaagattcattgaaggattctctaagctagctagacctatgaccgagctgttaaagaaggaaaagaaatttcaatggtctgcagcctgtgaagacagcttccaagaattgaccaaaccgttgaccactgccccagtt

SEQ ID NO: 24325 - DNA, 1312 bp, Oryza sativa
gtacggagtcgacagagaacatacccatcacagcgtctggagcatcctgagcggtttcagcttgaatgtgattcacacggcctcgaccaaagtggttggaagcacgagaaccttgtctacttgcctgagagctaggacgagactgagctgccgctggagtaggagttctggcggtgctgccattagcatgccctgagttggtgttggtaggattctgagggcactgtctagcatagtgacccatctggttgcaccggaaacactgaactgctgacggtccctgtggtgacttgaaagaggtaacactgtttggcgcagtgttgccactaggggcacactgctgtggcggaggtgccggacggttcatctgagggcgaggggtgtagcctggctggcggttagcctgggtgaccgactggtggtattgcatgggttgaccatagcgagggcgaggtgtgcctcgggaagaatttccctgatggttagacttgcgtttcttgtattcttcggtagcctcttttctggcatcctcaagcagaagtgccttgttgatcatatgttgaaaagtggggaagtcatgagcaagcaactggagtctcattccaactgcgattcccttcaagaatttcctgatcttcttcttatctgtgtctacttcctcaggggcgtaccgagccaacttgttgaactgacttaggtactcattgacactgctgttgccttgcttaagtctgttgaattcttctttcttcatgtcaatagtgctttcaggcacatgagctgcacggaaagccgtagcgaactcatcccaagcaatgttagtgggttcagggtgtgcattgcagtaattctcccaccaatctgcggcaggtcctcttagttggtgaaaggcgtagagcatcttctcaacaggagtacactgcactaagttgagttttctatcaacatctttcaaccaatcgtcagcctcgacgggctcgacggtctgagagaactctggcggacgagacctcagaaagtctgtcagcttggatctgttgttgcccatgtgaggatggccatttccatgcgcattatgctgaaaactggctatggctgtggttagtccttgcaagatttgtgtctgaactgccattaagtgttgcatgttggtttccacatgaggtggggaagggaggcgttcttctccagaattgtgactggcagtgcggtgagagcggtgagactgttccatctctgcatcacgggaaactgtgcgatgcgagcggctgctgcggcggggttgctcaacctctgtgttgcgggaaacagt

SEQ ID NO: 24326 - DNA, 6256 bp, Oryza sativa
gcgtaattcttctgacggttctgtgctgtcttcaaacgttctcgtatcagcttaacttgttcttctgctaacttgagtatgtcaggaccgaataccagtgcttcgcccacctcattccagcataagggagtgcggcactttcttccgaacattgcctcgttcggcgacatctgaatgctggcctaatagctgttgttgtatgagaactcagcatacggcaaacaacgatcccaagtgccttcgaaatccagggcacacgcacgtagcatgtcttctaggatttggtttaccctttctgtctgaccatcggtctgcggatggtaggccgtactaaaatttagatcagttccgagagcttcatgcaactgcttccagaaccttgaggtgaactgagtgcctcgatctgacacaattttcttgggacagccaaatctacatacgacatgggtcatgtagagttctgctagtttctttccatcataggtggttttcactggcacgaaatgagctgatttcgtgagtcggtccacgattacccaaatggagtcgtacccgttgggggttcttggcaaaccggtgatgaaatccattccgatctcttcccatttccactcgggaatcggtaggggttgcagcagaccagctggcctctgatgctctgccttgactctttggcaaatgtcacacaaggctacgtattccgcgacatctcgcttcattccggcccaccagaagtatgccttgatatcttggtacatcttcgtacttcctgggtgaatggagtaggtggactcatgagcttcctttaggatgagatctcttaactccttcttggccggtacacagatgcgtggaccgcaccaaactgtgccttgatcgtctatggagaaattggtgtctttcttctcctgtattctttttatcaactcttttatcccttcgtcgtctttctgagcttcccggatttgcgactctagggtaggctgtactgtcaagctggcagggacacctgactgtaccacggtcagccttaacttctctaattctctgcacaagtgatcttggtcaggccgtatttgagctacattgcaataggccttgcgacttagcgcatcagcgaccacgttggctttaccaggatgatagtggattccaagatcgtaatccttaattagttccaaccatcttctctgtctcatatttaactcggtctgtgtgaaaatatacttaagacttttgtgatcggtgtatacttcacatctgttcccgattaaataatgcctccagatcttaagagcatgaaccacggctgccaactcaagatcatgggtgggataattgacttcatgaggcctgagctgcctggatgcataggccacaacctttcgttcctgcattacgacacatcctaagccttgtcttgatgcatcacagaagatctcgaaatcttttcggatatctggcaaggtgagaactggggcagtggtcaaccttttcttcatttcttgaaagctgtcttcacaggctgcagaccattgaaatttcttttccttctttaacagctcggtcataggtctggctagcttagagaatccttcaatgaatcttcgataatatccagctaagccaaggaaactgcgaatctctgacacattcttgggcgggttccaagcaagtacagcttcaaccttgctgggatctacttcaacaccgttgggggagatcacgtgtccaagaaatgctactcggtctaaccagaattcgcatttcgagaattttgcgaatagttgatggtccctgagcttttccattatcaacctcaggtgttcagcatgttcttcctcgttcttagagtatatcagaatgtcatcgatgaataccacgacaaactggtccaggtattccatgaagattttgctcattaagttcatgaagaatgctggagcattggtgagtccgaaggacataactgtgaactcatatagaccataacgcgttgagaaagcggtcttcggaatatcttcagatctgattttcagttgatggtaacctgacctcaagtcaatttttgagaagactcttgctcctttaagttgatcgaataaatcgtcaatccgtggcaacgggtacttgttctttatagttacttcattcagggctctatagtcgattaccattctctcagagccatcctttttcttaaccagaagtactggggctccccaaggggatgagctaggtcgcacataacctttactctccaactcttcgatttgtcttttaacttctgctaactcattagctgccattcggtagggtctttttgcaattggagctgtgcctggtgccagttctatggcgaactcgatctctcggtctggtggcattcttgttaattcttccagaaatacgtcgggatattcatagactatgggcaccgactccaaggaggtgacttgtaaacaggttaggatagaccgacttgcggtaggggtgttaggggtaaagcggacttgctttcctgcaggtccttgcaaggtgatggacttttcggcacaatctatctgtcctttgtgcttagccaaccaatccatccctagaatgatgtccaagctttgcgagtctaggactatcggtttggctaggaagtcaacttcctcaattctaaggttaacttccgggcatatttgagttgcccttatattcctcccaggggaatgtactatcattggtacacgcaatttttgggttttccaaccatttcttttcacaaaagcttgcgatatgaaagaatgggaagctcccgaatcgaacagaactattgcgggtacggagtcgacagagaacatacccatcacagcgtctggagcatcctgagcggtttcagcttgaatgtgattcacacggcctcgaccaaagtggttggaagcacgagaaccttgtctacttgcctgagagctaggacgagactgagctgccgctggagtaggagttctggcagtgctgccattagcatgccctgagttggtgttggtaggattctgaggacactgtctagcatagtgacccatctggttgcaccggaaacactgaactgctgacggtccctgcggtgacttgaaagaggtaacactgttaggcgcagtatcgctactaggggcacgctgctgtggctgaggtgccggacggtttatctgaggacgaggggcgtagcctggctggcggttagcctgggtgaccgactggtggtattgcatgggttgaccgtagcgagggcgaggtgcgcctcgggaagaatttccctgatggttagacttgcgtttcttgtattcttcggtagcctcttttctggcatcctcaagtagaagtgccttgttgatcatatgttgaaaagtggggaagtcatgagcaagcaactggagtctcattccaactgcgatttctttcaagaatttcctgatcttcttcttatctgtgtctacttcctcaggggcgtaccgagccaacttgttgaactgacttaggtactcattgacactgctgttgccttgcttaagtctgttgaattcttctttcttcatgtcaatagtgctttcaggcacatgagctgcacggaaagccgtagcgaactcatcccaagcaatgttagtgggttcagggtgtgcattgcagtaattctcccaccaatctgcggtaggtcctcttagttggtgagaggcgtagagcgtcttctcaacaggagtacactgcactaagttgagttttctatcaacatctttcaaccaatcgtcagcctcgacgggctcgacggtctgagagaactctagcggacgagacctcaaaaagtctgtcagcttggatctgttgttgcccatgtgagggtggccatttccatgcgcattatgctgaaaactggctatggctgtggttagtccttgcaagatttgtgtctgaactgccattaagtgttgcatgttggtttccacatgaggtggggaagggaggcgttcttctccagaattgtgactggcagtgcggtgagagcggtgagactgttccatctctgcatcacgggaaactgtgcgatgcgagcggctgctgcggcggggttgctcaacctctgtgttgcgggaaacagtacgatgcgaacggttgctgtggtgagactgctcattagctgattcatgattttcttctggctcaactctaccatcctcaaaaccaaagcgggctggtgcacgagctgcacggcggggacggctagccatctaaactcccagaagagggcggggtaagagtcagataagcacttaggagggcaaggagcaaagcaaatagcaactcagatagcacacactaggcataaactggatttttcaaatcataaaaacacctgatacaacgggtgtggacaagtcacagagctacgccgagcttgactgtgcgcacaccacctaggagaaccagactaccaaacaacacccacaacaaacacacgcacgcactacctcgccacgactccaaaagagttggcggcggaacaaaagggcctatcacacggacggctgctgaagactgcctcctctactcctcgtcggcctggctgcctcctgtagtcggctcctcagtcgaagaaacgtcgatcggctgacgcgaagggaccggcggaacctgtcgagggccggcagcagcacgggccgctggcggtgggggagctgggtagtggaaacggaacacggtggaagaaccaacaacacgcttccgcgcggtgcggataaagcgtgggccacggcgggaggaagcaactggggtgtgtccgggggtgtaggaagggctaactgggtgtgggtagggggagtacactggtgagtacggcgcacgcgagctgggggagcgcgggccactgggagtgcgggcagagccgcgggagctgtgggaggacaggtggctggcgtggcagaggcggcctgagtcccaagagatagtgtcaactgaggtgacaccctcctcggccagacgggcctccaaagcggcgtagcggcgggcaagggagcggtaagcctcaaggagtaggtcgtgctgagtggcctgagcctccgaaagctcgaccatgcgagtcagcactggctgagactcgctgtacggacaagggtacctggcgtctgagtggccagagggaaggtgtggaagctgccggaaggcggaacctccgagacggtggctgtagtcgtgggccaggcgacgaagcgcagtccaggagaggtcctggtacgcgatctggagagtgggcctggccacagtgaagtggtgggggcaaaggccagctccgtgtatacctccacgggggtaaaggtacaccgagagctcacagtgagggggaacacggtccacggagtaccccgtgtactcgggacatgagaagccaaggaaacgggcgaggtcacgaagctgggcgacgtggtgaccctcaccaaaaccgtgggaactgaagctggcgttcactgccatctacaattttgaaagagggagaagatcagtaaccattttagaaacaaactattgaaaataaagaaaacaaaagaaaccttagcttttcgcaagtagttttgaacttagtatccttagggtcgtcctaagcgtcgggtttcgccctagggccaagcctgtgctctgataccatctcttgtcacgccccgaactagtcccgaccggaactagcccgtgacgctccaatttaacctgttaatcgataccagtcccaggaaacagtgctggtatcacagggagacagaatatcacagcaacagaggtctctttattatagagtagaggtacagtcatgttgggctgcggacagatcccgagcttacaactgcattacaaaaggaaaacggaagccaggacttggaccaatcaacacaggcgcgacttgggaactaggccgaaaccctaaaactcatcgtagccgacttgctcctagaagaactcctcatcagcaggatccacttcatcttcttcagcaactgggggggattatttatatagagcaagggtgagtacgggagtactcagcaagccaggggaaataagtgtttaatgcaggcttcaagggaaggctgctgtttttgcaattgattttatttgaactcttttctgaaaacaactaagtgcttctcaaacgacacgaatgagacagtgcatctcgtccggtcggagtatgtgcaatgtatcaatctttaggaatgaacaccgttgg

SEQ ID NO: 24327 - DNA, 10505 bp, Oryza sativa
tataataatccgcaaatctccatataacagcattaaacttcggatgatcatatcttggtcatacccgctccgaaccgacccgttcaagtctcttaatgtttgttataacctaaagaaccatgtgctttctttttatgtattgttattgcttctttataggcttgtagctttgcttgtgtgcttcgcgtagctttcgtcgttccggaggttcccgaagcgtggttcgtggtcgtcgccgaaggttcggaaggccgttctctctgagcaaggcaagtcacatcatccttgaacatattgagtcccagtttataaaattatgttgatttaaattattgcattatcgctttatttaaattcccgcgttatcactgttttatctagccatgcctatttacctttgttatgaccttattattgctattgttattattaccttgttcaccctaggaaaacaaaaccccaactagtgggtactctattcatggttccactagtatgaatttaggtagatgcttcgctgattaataggacaacactaggtggtttttataactttagactttgggaattctcatatcatttgaacactatggaatggttggcttatggtggaattggacatacacctctcttcctctttcaaaacccctaaaacctgttttccggtggggtttgggtgcatgctagttgtgggaagtagcaccccggccactataaggattaagctcgggcctctgttgcaaagcactaccgtacttccacatgtctagtgggtaaggcttagtttgtggctcagtctggttataaacaaaagtacacggatggagatggacgaagtcgggggtcgatggacatctctaggacaaatgaaggctacacgagctgcggcccggtagtcgagatgtcatggcacagggccggtgtcctgctgctagggggctcaatcctgcctgcctgtcccgggggttccggccgtaggtggggttgggtcggtactcttgtctatggctaggatgggttggaaactatgtcacgtcttccgtccgtataccgtggtggtatgtggcacgtggttacacgtgaggaagatgtgtcttgtgggtaaagatgtacacctctgatcagagtataatctattcgaatagccgcgcccttggttatgggcaagccgagcaatgtacccaagtcagtgttttaattcttaaaatttgcttaacaactaaaatgtggaatggttggcctgggttggcttgggacgagctgggacccagggtcgggttgccagttcggtctgaatcatcgtaggccttgggttaaggcaggttcgtgagggttcacgaccttgattaataatactgtgtagctttaggatcgtctttttaaaatggctttgggcaactaagtgacttttaaatgctgttttctgcaaaacttaacccctatatcattaccccttgtacccccttgcattaatcgtgcatccgccggtgtggcttgctgagtactgtggttgtactcattcttgctctatctttctccccccttcagtaagagaagctttggagaagaagtcttaggtggagtcttggcttataccccagttgagcgcctgtgaagatggagccgtaggcccgctagtccgctgctgtttatttttgattgtcaggccttaagtgcctttgtaataatgtaaatattatcgatataataaagatgtgtcttttatatcatgtttgtatggtgtaccccggcttttcctgggacggggattaatacactagcgttcgggaaaatgcaattttctcggtcgtgacagcgcggacgttgtcgcggcggcggggcggcgcagcaccgagagggcgtggccggggaagaagagaggggggcgtggttgagacggcccggtgacggtgaggcgacgttccagatcgcggcagtggcggccaacgacaaaggagacatccgtgcgccgtggttggccgcgcgacggcgatgcgactttgtggtggtgcggcggcggagagtggaggcgtgggttttataggcggcggggagctttgagaggaagggactaagcacgggcggtcggttcaaaccgaccttggggcggtcggttcacgggaggcgcgagaacgagcgacggcgtggatgcgaaggaccatggaggcggtggatcggatggtggaaatcgaaccgcgagcacgggctggcatggctcggcgtggtcaaggtgggggcgtcgagctgctgcagcggcgttagcggctctgcctccgagcgcaagcggccaaggggtggagacagggcgccattgcccgggaggggaaaaggaagggaggacggtggaaagggggacttgccccttccgtttttgggcgaggaagctggtgtggcgcggtttcttggtcggccacgaccgtttcgtgcgcgggaatcgaaggcggtggccgatttttgggcagcgtcggcgggagtcaacgagagagagagagaacgaccgagaaagaaaaggggagagacggcgctctctctgtggggatcacgtgcagcacacgcggagatggagtgggacgaagggagagttgggccggggagggtgaaaacggcccaaagatcaacggaggaagattagactttttcagggaagtcgatattgagggatttttgtatttaaaatcgaatggggatttgaattcaaattcaacatttgaactcagcaaaatacggaggagccaaggaatggattcaaggtggactcagttatttctggattcgggagaagtatttggcgaggattcaagagaggcgattgacctttggaataattaaattggaattagaatcttgaggcgggggattttgatatcgatgagagggaacgacgggaatttgaattgagatcttggcacaacttagactcgcacacaaagaacgaaaactttcgcatataggattttgccgaattagtttttaacgtctcgcgaaaagtggagcgttacactcgtcccgcccggatccggcagcggcgtgcctcgtcttgcccggatccggcggcggcctcgggcgcagagtgccacggcgacctcgggcggcggcgccaccaccatctcctcctcaccgccgccgccgacgacgtggaggaagcgacgggccatattcggcggcgccggtcctcgtcccactcggatacggaggcggtaggactcgtcccatccggatccggcggcggccttgggcgaagagtgtcgcgatgacctcgggaggcgggagcggccagcggtgggagcggcagcggcaccggggtgggtggcggtgggagcggggccgggtggcggcggtgggagtggggacgggcggcggctggagcggccagcgagctcgggtggcggctagggtttcttgtttttttgaattttttttgaattttttttggtgatttttctctttgcatgtggtcggcttaaccatctgcatacgaaaatcagatttttcgcatgcgggtgccctggccgcatgcaaagatgacgatctttgcagacaatttggcgcatgtggctggcccagccgcatgcgaaaatcgttgccggccgtatgaaaaaacgaattcttgtagtagtacagtgttactaaatttcactgttaacatcaggatctagatctcgagcatagccggggaagtggtgtgggaatgatatcctccaagatcattctgctcctgccaccaccgccttcctcgtttgcaaccgtcacaactttgccgctgcggacgcagtggtggggcacgaccaggcctatatatgacatcggtgatcagctttagcattctcaaattaattagaaacacagtctttttagggaaaaaatttaaatgatagaaaaatatataatgtttttcgatggaggtagtacaaacgttaaatttcgagtgtttggttgtcggtgaatgaacaccggtagtgagaatccggtgaaatttcgtttgggtttggctaagggatgaacacattgtgttaccttgggtgcctcgatcggaatgaaaaggtagatggagaattaagtacgtgttgcacgtgcagcttcagcaccaagattcggcggcggaataacctgctctactctgtacgtagcagcaagagatttgaaggagtgtaacttgcttgctcagtggtagcaaagcaggccaaccgctggagacgcctgtcaccgtacgtgtaccgaccgcgtgaacccgagcctctgagcagagtacaccgcgcgggcggtcgtagctcgtctcgccacgccacgcccgcaccacgagcaacgcaaaccgctttgcatgcatggctcaatcccgtttcccgtacgtacgtgcatcgccttgatcataagttgataacacacaccgtacgttcctatataccaaaaggtctcgtccgtcgaccataaccgatcgaggtccaagctggtggagaaaggggctttactctcggttgggaaccccctatagtcccagttatataaccggaactacgaatccgggactaaagatagtctcggttgattctttttttttttgttgttgtttctttgctcaaatcgatctgctccctaaatatctcaaatcatccacaagcatcacagatttgggaagaaatacatcacatattgcaaagaaatgcatcacagatcacaaatacatcacatcacaaaatctcaaacaaaaaatacatcacaaatactaaaagaactgcatcataactcaaatacatcccagatcacatccaatatcacatgcatcacagatcaaatctaatgaaacacaaaataaaaaaaaaatcggcagagcagatggggatggcgccgccggcctcccggtccccgccctctcggcgtccgcgccagctgtcacgccccgaactagtcccgaccggaactagcccgtgacgctccaaattaacctgttaatcgataccagtcccaggaaacagtgctggtatcacagggagacagagtatcacagcaacagaggtttctttattatagagtagaagtacagtcatgttgggctgcggacagatcccgagctcacaactgcattacaaaaggaaagcggaagccaggacttggaccaatcatcacaggcgcgacttgggaactaggccgaaaccctaaaactcatcgtagccgacttgctcctggaagaactccttgtcagcaggatccacttcatcttcttcagcaactgggggggattatttatatagagcaagggtgagtacgggagtactcagcaagccaggggaaataagtgtttgatgcaggcttcaaggaaaggctgttgttttcgtaattgattttgtttgaactcttttctaaaaagtctaagtgagtgcttctcaaacgacacggatgagacagtgcgtctcgtccggtcggagtatgtgcaatgtgtcagtctttaggattgcaacaaggttggcacccggccaacagcttttcaaacggccacccgggccaacaacttttcaaacggccacccgggcctagctgatcccatcagctgcagatttttcaaacatcgaaccccttttcacaacagcaatttcacaagcagtggttagacaaaactatgctaggaatcacctcacatccgcccatgaccgtgggcacggctgttcgaacagtttgttaacctctgcagagggggtacactttacccacacgacattactaacccggatcacccagcccgtggggatcagccacgtcgggagacctccaagctttcatgacaaggcatttcgaaagccgatacaggtttaccatatgccgacgagaggggtcccagaccaacaacaggttaggtcccagaccatactgtgccaggaagcccaggggtcctccccgacaccaccccggcgaatccacatgtctctcggcatcaaggctcccctgataagctagttactcagccaggggtgtcccattccacccatgtggtcgtacttgtcttatgtttggatgaaattccaagggaatcggtccttaagtgcgagagcgggaaaccgtacacccggtacgttccccggtccgcggttttggaaattcatttagttcgcaagcaccgacccaggtgtcgggttttccaagtcttttgtaaaactccagttttacccaagttgttactcagattttaagtttgaaggcgaccgtcgatactcgcacagagtgcacgaatatcgaggcgcaactgggtggttacaaggggacatggtataacaattaacaaaggaaggatccaatgcaacaaattaggtaggtttgccaatctgccttgcagacgggacaacagattaagtgtgatcctatcaatgcataatatttcgcaagcaatataattaaatttcaaatataggctcaagatgttcaaaggtggcttgccttgctcgagatctggagcttgatcctcgaaatcctcgcacagcgggtcttcgggctctgaaactatacgcgaaacagaacaactcaacaaacggcgaaaataaagccctattaaagacctctaagcgtgccattagatagatctcgagatttgaggaattttggaagttgaacggagtcaatcggatttacggttgggaagatattgaatttctaagattattggatttttggtctaaaggaaaaaggatttaattaaatcctttttgaaaaagaaaagaaaagaaagaacagagggatggaaattagacttttcctcgggcggctagggcgcggtccaaggtaaatggagcggcttggccgagcttaacgggccggccggcccaagacggcccaagcgcgcatgcgcgcgggagggaggagagagaatccggtggaccgggctcaccacgcgcggtcccgggtgggacccgcttgtcagcggctcggctcaccgtgcggagggagtacgtggctcatgcgcgcgggcggggaaaggacgcggtgcacgcgcgcggtccgtggtggacgcaggtgcggcgggcccacgcgcagcctcacggctcgcggtggaacacgcgcacggagagggactgaccggggtcggctcgatccggtctaggctaagctggcgccgatgtggcgcctacgtggcggccacgtgggctggcgggaggtagacgacgacccggccgcgaatggacggcgggcggcggcggcgagcggcggagcgaaccacggcgatacgggcaaaagcgtgcacaccgggcggttgctcgtgacaaggggagacgagccaacagctcggattcgccggaggttgctcgacggcagcggattgcggcggcggcaaccggcggcgggagaaaagggaaacggcgacgaggtcacgagaggtcgattcccggcggtgagagcatctatgcggcttcgggaactcgacgctagcgtcggattgggcggaactacgccgagcgaggccggcgacgagcgggtgctacggagctcgagcggcgacggtggcgaacacacggcgagcgacggcaacggtccgggcggcgccggctaactacggggaggctactcaagctactaccgaaatctagggggggagatggagcgaggaggaagaacggagagaggcactaccgtgcgggtcggggcgctgtgacgagaggccgacggcgcgggagtaatctctccggcctcgggccgaggaagaggaagaagagggcgcggccgaagtccccttccgcgtcctcgaacgcaccggctatcccggcgcttggcgaaggacggcggaggcgagacagagcacgggggcggcggcaacggtgaggaggcgaatgggagaggaaaggaagggagggggaagacgggtttaaaagggcggcaatgtcggtttgagagaggggaaccgacatgggcggtcaagccggcgagctggcgctccggctagcgtccaaagcggcgacaggaagtgacgccggcgagaggggaaaaaggggagaaaaagaggaaaaggagggagagaaagggggctcgcccctttgccgattcgggaaaaggaggagggagcggggcgactcggcagagggagaggggctctctgcctccgccccttggaggctagcgcgcggagtggcgggggccgggcgatgacgacggcgatgacggcggggcggtttggagcggcgcgacgacacgggcgacaggcgcgggctggcgcggcagagggtgacggcggcggcgaccgggcggtcggccactcggcacgcgcgcgcgggaaacaacgggtggcacggctgggcagcgggaccgggcgacgcggacggcgtagacgacgcggctcgggcgggaaaccacgcgggcgcgcgcgcgagcgacggcgcgcggggccggttttgcgagcggggagctcgcgcgagaggagggggcgctcggcgtggctctcgcacgcgcgagcagcgagcgggggggagaaacgcgccggggaaagcgagagagagagagagagagagccggggaagagatgggccgagcggaattcggcccatcgaacccgggggaagcaaactagacttttgcggagggattcgatttggaaggaattggattcggaattgaactcgacgatagatcggggattgagatcttgagatggcacggacactagacaacaagcaaaaaaaacaaatttcgcaattagggtttttaagagatgattttcccgctaggcgccacgacggaacgggcgctacagaccaacccccctaacaagaatctcgaccccgagattcagcacctaagggagcaggtccgggaactcggcgcggagaagatcttctcgctcccaggttgtctcgtcttcggaatgattgctccattggactttgtagaacttgatggtcttccttcgagtctgacgttctgtctcttcaagaaccttgatcggtctttccttgtaggtcagattcttttctagctcgatattacccaggggaacttgctcttctggaactcgaagacatttctttaactgggatacgtggaacacgttgtgcatatctgcgagaccttcaggtaactcaagctgataagccacttcgccacgtctggcggttatgaggtaggggccgatgtagcggggtgctaacttgccggacatcccaaacctcctcataccacggaggggtgatacccgcaggtatacatgatctcctttttcgaactcaaggtcatgccttcgattgtcagcgtaattcttctgacggttctgtgctgtcttcaaacgttctcgtatcagcttaacttgtacttctgctgacttgagtatgtcaggaccgaatatcagcgcttcgcccacctcattccagcataagggagtgcggcactttcttccgaacattgcctcgttcggcgacatctgaatgctggcctaatagctgttgttgtatgagaactcagcatacggcaaacaacgatcccaagtgccttcgaaatccagggcacacgcacgtagcatgtcttctaggatttggtttaccctttctgtctgaccatcggtctgcggatggtaggccgtactaaaatttagatcagttccgagggcttcatgcaactggttccagaaccttgaggtgaactgagtgcctcggtctgacacaattttcttgggacagccaaatctacatacgacgtgggtcatgtagagatctgctagtttctttccatcataggtggttttcactggcacgaaatgagctgatttcgtgagtcggtccacgattacccaaatggagtcgtacccgttgggggttcttggcaaaccggtgatgaaatccattccgatctcttcccatttccactcgggaatcggtaggggttgcagcagaccagctggcctctgatgttccggcttgactctttggcaaatgtcacacagggctacgtattctgcgacgtctcgcttcattccagcccaccagaagtatgccttgatatcttggtacatctttgtacttcctgggtgaatggagtaggcggactcatgagcttcctttaggatgagatctcttaactccttcttggccggtacacagatgcgtggtccgcaccaaactgtgccttgatcgtctgtggagaaatttgtgtctttcttctcctgtattctttttattaattcttttatcccttcgtcgtctttctgagcctcccggatttgcgactctagggtaggctgtactgtcaagctggcagggacacctgactgtaccatggtcagtcttaacttcaccaattctctgcacaggtgatcttggtcaggccgtatttgagctacattgcaataggccttgcgacttagcgcatcagcgaccacgttggctttaccaggatgatagtggattccaagatcgtaatccttgattagttccaaccatcttctctgtctcatatttaactcggtctgagtgaagatatacttaagacttttgtgatcggtgtatacttcacatctgttcccgattaaaaaagtgcctcca

SEQ ID NO: 24328 - DNA, 7189 bp, Oryza sativa
agaggggaggagatcgagaggagatggcgcgcggctctcggggtagtctttactcccgttggtataaacaaccgggacactaagaagtcccggttgtttataccaaccgggagtaaaaataatcgtgatctgtcttgaacccgacaactttttgaaccgggactaaaaatgatttttagttccggttggtattatcaaccgggactaaagatcaaaagtacccctcaacttttcaacgggactaaagatgctttttagtcccggtttttattagaaccagaactattgtagaatttggctgaccgaccaaagatggtttctccaccagtgtaaccaaccctgtacatatgtgtgccacgtacgtactgcaccgagttagccatcatggacagctcaaccacccaggcaagttcctgtgcacggatcgagttggccgccatcgccacgatttaattactccaatttgtaactgttaaaatacatttttagatacgtaccacaaagtatttcattattcggatcctaaattgccatgacacccctccaagattctacgtgacgtttatgtgacatatataccatatgaacgataaagtaacatgccacgtaaacatcctagtcctaaattttctttttcttctatttcctcccctctgcattttccttgtcttgttttttttttctctggccgagctgtcgacgaggaggggggcccgccacgcggtgagacgcgagggacgaagcagtgcgagcgtaccggaagtggatcgcttgcagaggagaagcgacgaggacaaggttggcggctgatctcgtgaacggggaatctcgacgtacgacacaacggcgggagatcgggaggctagcttagctgtggcagcgcgggagacgcgggagcttgacgaggcaacgccgccgccatgcgtggagctcggcctccatatatatatatatatgccgctcgattcgggcgtcacgtacgtacgccgatgacgccgcggagaggaacgcgaatgcatgcgcatgctgcaggagcaaattaacgttgcgtacgctcgcgtacatgcatgcgccgcccgcgcccgcccggccggatcggaccgcgtctgccaagagggactgagggagtgcgccgctcagaaagattacaagtagcaagttgaatatatgccttgattctccaagatttctcttggagatttcttgtccgccaaactttttcttctttacttctttgtcgccgatgccagcgcaagcaatccaaattggcgcatgattgcgatcgattgttgccgcgcggaaatatacatttccattaatttttatcgtaaaatatattgaaggcgcttctccatctgtctattagccaatcacgggcgttccccggccttttcctaggtttgaagaaagaagaaatgagaaagctcattaccatataattaattaagtattaactattataaaattagaaaatggattttttttaaaaaacaacttttatatataaaaaagcttcgcaaaagacacaccatttaatatttaaaaaaacatgctaacagagaaaagagcatgttaaagaaaataacaggaccacaattatctatcatttaatttatctgcctacttctcatataaatcaataacactaattttatttcagttctttaatttactttatagaaaaactccagaaaatgcttatattttggtttagtactcctatatttttgtttatgttcatgtgcaaccaatttttgtatatcggtaaaattcagacatggaaccaatatttccactcttccttcttcttcatctcctctaacttccatagaggtgaggaagaaattatggaggaaaacaatggcagatgggatccataagttgatttggccagccaatggggtcaaagctgcattaaaagtaagacggaatcgcctcccaaaccactaaaggaggaacaaacgtacaatggtcaaagctgcacttaattagacgtatggctaattaagtacggacaaacgtacaatgctcgctggttgtgtctctgcttacctggatcgaccgatcgagctaacatcgccgatggacactggttaagaatgataccaggtgaaacggtaaatgcgtcaatccgatccagcagacatggtcaacgtcaacccagcacagacagacagacttggtatatatcctcgaccatcttgaaatccctatagagaactcgtcatcgtcctcacataaaccgatctgttggcgagttcgatcatccgagatcttcatctcactttttggaaaagaccgaaatttcatgattcttagagctttcttgcaggaattatttaaacttataactgaatctgaataaataattttgaccaaattcacagaaaattagaaaaattcgagaacttcttttaacacttaacttgagatagtggctagattgcccggggtgggttttgatactgatctcaccttcttttatcacttaacttgtgacaaatttaactatcatatattctatgaaaggtttatcaaattattatcatatatcatctattctgtggaatctattctatggaaggtttactaaattattgtcatatataatctgtagcacggctgcctacctacttttactttttttttccctccaattattctaggacgtcacgactatagttggccataaggcccgaggcccgacggcctagcccagggcatgagattttgacccagcccacgcaccgcatggcccaatccctgttgggcccgtgtcagcacgacccggctattgggtcgtgccgaggcctatgccttggcacagtgggtcggcccggcacagcacaaagtttagggaggtgaaatagacttattttcagccatatgtatagagggcacacagaatagggaggacaaatagatgtattatatgcatggcacagcccaaagagtagggacgtaaaatagacatattttagctatatatatgtcacaacccaaagatgagggaggggaaatagacttatttcaaagaaagcacgatgagctgcctgtgccttggccgtgcctgggccataggtggagcacgtgggccggcacggcacggcacggctcggcgtgtaggtcgggccgtgccgcgcggcctgacaaatcttggcccgagcatgatcaggcctaggccgtgttgggccgggcagcccatttggccatttatagtcacgactcacaaccagacattttcaatcctgaactttcttaaccggacgaattaccctctcgtttaacaacaaggttgttttagtccttggtgacgcagatgaggcaatgtattaaccatgtgaaaatcagtcaacaacttaataacataaatattcttaaaattagggtggcctagctgtcatactcacagccccgtttcttccgcctctctctctctctcaacctcaacctcaacagaagtaggtaggatgtaacgataacctccacgagatacggaaggaatgtcgcaacgccctccagagttggccaaggaaggtggcagccatgtcctctaggagtcggaacagaaaggtggcagtaccactaccacccgtgacgcgccgcattgagttaggggaggagaggatatcgatggggtagaaggggcggcgctatgtgagatggtggcaggagggggttgaggtggtggtctataggaggaaggcgaaggcggcaacgaggggctaccaacgccgtggtgttggcgataaaaattatgtagaagcaaggtggtggggggaggcgcgcgccgatggggaggaagcgcatgatagtgctattgacctaccaaccggtgttgtttgtctacgggctcccattttctcactatttttccgttcgatgcaaattcaacgctacagaatgggctgaaaaattcaaatttattatttataaaaaaatgatacgcttacacactactggatacgtttacacactagctagacagtacaatactacatctttattttagatatataatagatagggcatcatgacatgcagatatctatcgcgttagtagggcctttcgttcttcatgttaccacgcgggaagtagttgcaagcgatgatggtgccgatgccgttggtattgcaggcgacgcgggcgcagccgacgtacgccgtgcgcctccacaccacctgcgtgtagtgcgtgcagccgagctcgcccgccgagcagtagttgctgtcgtagtagtactttgccttctcggcgagccagtagctcatggcgtcggccggcgtcccggtggtgccggcgccgtagctccaccacaggttctcgccgtagggccccgggatgtgctgcgtctggcagtagcgcgcgtgctgcagggcctgcgccgccagcgcgtcgttccacgccacccgcccgacgcccaccgccgcgcgggcgctgttgtggaggttgacgaaggccgccttctcgtcttccgagaattgttgcgccgtcgtggtcgtggccatgataatcatggcgaaagccgccatgaccaccaccatcatctttgctgatgctgatctctccattcagtttttcagctcctcgctgattcacgaattgttgctgcaacaagctattaagctatatacctctcgctagctagctagactccagtatgagattaacgcatgcaattaggcagtatttataggcggatcgatatgatacacagggtgatctcaacacgtacggctaataattaagtactataacatatgatgctctctggtacgtagtctctcagcaaaaatacctcgagctgacatggaccgatgcacactggttaggaatatgatgatataccaggtgaaacggtaaacgcgcgcgtcaatccgatccagccagcagacaaggtaattaaacgtcaattctcagcagacagacttggtatatatcctcggccattttgaaatccctatgtgtagaactcgtcatcgtcctcacatacaccgatccgtgttgccgacttggatcatccgatcggatgatcgttggtcacccacggtttacacgtacttttcagagaaagaacgaaatttggtcagcaaaatttcgtaattttcgggattttcataacatttttcacgaaattctttcctttaattgaatttaaataaattttgatcaaattaaaaaaaatagtgatttctgcagaccttttcgtgcatgcgggcccgccaaccgcatggtaaaactggttctagccgtatgcaaaaaccttctattgtatgaaagttttattaaattattaccatatatcatctattctgtggaatatattctatgaaaggattaataaattatttatatatataatcgatagcacggctgcctacctatttttgcttttttttccctccaattattctgggacgtcacaactcacaaccaaacgttttcaaccatgaactttcttaactagacgaattacctccacgttcaacaacaaggttgttttagtccttgttgacacagatgtgatgatgtattaaccatgtgaaaatcggtcaacaacttaattacataaatatttctaaaattagggtggcctagctgtcatactcatagccccgtttcttccgtctctctctctctctcaacaacagtaggtaggatggggaaactattctaatccctcgaggggatgttcctcatttgcttaaaaaccatctaaacggttatgaaaaattctgaaaaaatttgacaacattcatacaacacatatagacaactacacaaaatcttaagtgcaaacttaactcacacgtcgagatataaaaaaattcaaattcagcgtatgaatagtagcatactgtttatatctaaatttgtcttttttgtttctcgatgtgtagatcaaatttgaacttgaattttgatggactaataggtatcattatactctacattgtcatttttctttcagaatttttcacaactatttgcattgaatttagaagaaaaatgtatacgaggggatatccccctcgagggattagaatccacttctggtaggatgtgacggtaacctccacgagctaggggaggaatgccacagcgccctccagagttggttgaggaaggcggcggccatgtcctctaggagtcggtacaggaaggtggtagcaccactaccacccgtgatacgccgcattgagctagggaaggagagtaaatcgatagggttagaggggtggcgccttgtgaggtgggggaggagtgggtggtcgagtgcggcagcagcgacggcaagaggggtttgaggtggtggtctgggaggtaggcgaggggtgcaatgaggggctacaaccgtccacctctgtggtgtcggcgacagcggattctgcatgagcaagagggacgcgccgatggggaggaagcggatcgatgatagtgctacgggtccatcaattggtgctatttgtctacgggctcccattttcccatcattttgtcgtttgatgcaaaataaacgctccacagaatggaccgaaggattcaaaattttcaagcaattacttttaacttcaacatgcacttttcctgggcaattaatttagcaaatccgtacttatttatttattatttatgtaaaaaaatacatacgtttacacactactggatacacacacgtagagaatactacatcattattttacataatagatagggcaacatgacatgtgcagatatctatctatctagtagggcctctcgttgtatatgttgccacccgggtagtagttgcaagcgatgatggtgccgatgccgttgttggtgttgcaggcgacgcgggcgcagccgacgtacgccgtgcgcctccacaccacctgcgtgtagtggcggcactcgcggccgccgcagctgttgctgctgtagtcgtagtacggcttctcccccacccagtagctcatcgcgtcggccggcgtcccggtggtgccggcgccgtagctccaccacaggttctcgccgtagggccccgggatgtgctgcgtctggcagtagcgcgcgtgctgcagggcctgcgccgccagcgcgtcgttccacgccaccggcccgacgcccaccgccgcccgggcgttgttgtggagctggacgaagaccgccttctcgtttgccgagaattcttgggccgtcgtggtg

SEQ ID NO: 24329 - DNA, 17908 bp, Oryza sativa
ctaataattaagtactatacaaacatatgatgctctctggtagtctctccatctgcaaaaacctcgagctgacatcgaccgatgcacactggttaggaatatgatgataccaggtgaaacggtcaatccgatccagcagacaaggtaaactaacgtcaattcagcagacagacttgcatggtatatatcctcggccattttgaaatctctatgtatcgtacgtacgtcatcgtcctgacataaaccaatctgcttatgttgccaagttggatatgatcatcgattcgatcggatgatcaccgaatttcggtggtcacccacggtttacacttttcatgaaagaccgcattttggtggtcaccaaaagttcatgatttttgggattttcataacatctttcacgaaattctttgaaattttaactgaatttcaattaattttgaccaaattcacaagaaaatccaataaattcaggctagatagttgcttgccgagcgattcgaaattacaaaaggtctgaaccgaaacctaaataactgaaatcaccctgttttaacacttgtggcaaatttaattactatcatcgatgaaaggtttatttttgtacaagattacaaatctctttagttttcagtataacagatatctggtaaccttgagctcgtaagtgccagatctagacaccgagagggcttatactggtctgcaacaggttttggcaaaatgtggggtagtgatggcaacgggtactgcccaatattctgttcaggtgaagataactatcgatttttaacttgacacacacgatccgagccctgcaatcgctgcaccaagtatcatttggttatcaaccgtaccgaaactcgattaacctcgccgagaaggctaatccctgcacgcgaatcgaataacacaagtaaaaacaagaaagacaatagttcaattgcagataaatgattaatcaagaactcgaagttgaggttccacaaaccgatgaacggcgaaattgtaatggccgaaataatctaagcaaaaccacactctaaactatgattgtgttaacaccaaaatttgatacggttctttagagaattcagttaaggaaagaaatcgattggtagatggaagtttctcaagatcaagctgaattcgagaaatcatgaagaccatggtaaggcagtttcatatagttaatatatctcttaaataggcaaaattagttattttccttttcttgttaggagtcttgtctcatgtctgatctcttgtatcaactcaagggtataaatatatacacccgggtctttgtaaattatccacaaaacaatacaattatatttcgctgcatcgtcaaccattcgatgagttcttttttccgagtagggctgcattggttaaattcgatctccagcgagaaagtaaatttcgcttgtataataagcgaggaagaaaaaaatgcacctttgtttgatgaatatatgttgtaaccatggtcatattcctggtggtgatgatgacctcatcaggtagtacaacattgacggacacaatgcataagcgaactctccaaacaaaaacctttttgatcagactccagtagaaacacttcagaaaatcaggcatcccacatatggaatccaaactatgtatgaagtggtccatgtatatatatggcacgtgattttaattacgtattaacttttaaagttaatttgtttacggctggatggattgtcaaacccaatacactgtctagctaattaatctcttgtaagacaaactgcctagctagttaattactatgggcaccaggactatataactgtaatcttcaatgtttccgatgaatgacgttggaggttgaaattatcaaatgggatacacacgttctcttttggaacctgcagtggttagcaggttatatgatctgctatttttctttctgaaagtgatgtatcaatcaagttgcaattactttcgggttattcaactactctgatatatatataaaacaataaagtacacatcgatcggtgggcggtaattaatcaaaagaatgtgaaaatcaaatctgaagtcatggtgtattgcgtgtgagtagataaagggatgcgttgcattgttcaaatttgagacttcagattgatccaccgaatgacgattttaggtggccggcccattttatcatagaaagtgagtcgatcggtacaagagaagagataaaaaggagatggatttttatctctcgagaatatttcctcgtttcttacatccataaaaaccacaaaacatttttaaaaaactggcaatacatgctagctcgttcaaattcttagaagttgaatttgaacatgttttttctaagagttatatatctcatattaatatatcttgttatttttttaatcttttatgactattgaggtgacatgcaataatcccctcgagggatcaacaaattaagctggaagcggtattgttctataaagcctctacgaaaataggattgtcctcggtgatttcttaagacgtctatctgagataatttatcaaagctttattcgtttctcgattgtggttccttgaaaggaccacatatatgttagaatgattttctctaggctgcccatagacacatgtggaaatccggccctaagtaacaagtgggtttcgtacgattgtgtaaatagggcaccattcacatgcaaaaatagttgtgtacaattgcaagtagggtagagaaggaagatacaaaataatctattaagaaggtatataatgtctcgatacaaaacaatgttgtattataattttatctaccatatactctaacacggtgtttaacactgtataacttgcttgatatattattgcatggcttgagttcgaaaataaaaatcatgcaaagcagtagaaggaaattccaatatcataaatactattgcccgggatacagtctagggacaggataccttaatagtgaaccattatattccatcgatgtagatccgtttatccaccgtctttctctcaaccaatcgttctgtccttctccttcctccctcctcatactcccccattcacatcgatcctttctccgatcgccggaggaccaatcactcttcctacaccagatcgagaggccctagtgagagtatggatgccgacgaggtcacacggatcaatcagaattggtgaggtcaataaagtgtgaggctattgcggtggtgaggtcactgttgtcatcgttgaggagaaagaagagggaagacacggggcggagggggacaaggtctgaggcaccggtgatacggcggaggcggtcattctaggcatggagttgacaaagcggacagggggtggtcacaaggtacttctcatcacctctttgatgctcatctgtattgtctaccggtatgccatcctcggctgatgccatgtattgggcatgatatctcggggtatcacggatgttacctgctggtattaggcttggtttctaggtaccagggtttggtacccaagtatcagctagtacacataggtaccaggtaccaaggctaccaagtttcatgtatcagttagagcaagtataatagtacttcctcaatcggtgataacaacagccacatcatccttgtattacatggagggagaaaacatgaaaacaaacggagcgagtgcttgttgaagcgtcgggtgatagcacgataatttaggcggtatgaaatattttgtatgctttgtgggcatttggttcaattcgtttcatttaattaattatgatatgcatatcgctgacactaatgtcagtctatgatataatgtttccaaccgtgtctgcacgcacgtataaagccaagttggtcatttatcaaacatattagattggtttattaaaatgcttatattttaggacagacgaaatagtaacaaaatcctttatttatcatagtaagtacgaataatttacaatatatattttacagcgacgtcgtttattccatatacatatctgatgatgcgtacatgcatatatgtagacatatataggcgcgcgcacacacacaatccggctacatagatatatatctgactaaattaagtactcacttaattatatatagttactagaaaatatatatatagtctgctagtaagggcgctgatcgggccagttgccgggcggggaatagttgcagctgatgatgacgccgccgccgttgctgcaggcggcgctcgcgcagccgatcgacgtcgtgctccgccacaccacctgcgtgtagtggccgcactccagcagcgcccccctcgtgcacgtgttgctgctgtacacgtagtccgccttctcctccatccatttgctgaccgcggccgccgccgtcgccgcgctgctgccggcggcggccgggccgtacaggttctcgccgtagcccaggtcctcgctgttggagtgcgcgaggctgcaggtggtggcggcggcgagctgcgccacgtagctctccgcgaacgcctgcagcgtcgtgctccacgccacgtcggggaggccggcgccctcgccgcgccgggcggcgttgtgggcgtcgaggaagtcctgcggcgagctctgcgccgccgccgtgctggccgccatggccagcgtcgccgccgccagcagcacgagggcaaaggctttctgcgccatgctaattaagctaagcgctatatgagtagctgctaatgtgtgtgttgtacttcgatgtgtgttgcttgctgagggtatttatagctgaatcaggagagctagcttagctcatcgattgcatcaattgcatgcaataccatggctgattgcactaccaatatactccctctgtttcaaaatatttgacaccgttgactttttagtatgtgtttgacaattcgtcttattcaaaaaaatttaggtcatatcatttgattcattgttaaatatactttcatgtacacatatagttttacacatttcatattttttttaataaggtgaacggtcaaacacgtgctaaaaagtcaacggtgtcaaacattttgaaacgggggaagagagtatatatttgggacgtggcaatgaactttccaattattttcctgatcgatctttacttttagagtagcagtgtgcccaacgtactactcacgaacatacgacgacgatatgatgctaatacgacaggggttagaaagactttgacttggtcttgcactctcacgttttgctttgattataattaattggtcaattctagcaaactggtggccatggatggatccaaattactttaataccatggcgcgcgttacctccatatactttctttagctgggcaggtgaatcaacttgatgtttacttttctgtacgtcatacatatcgatatcacactatctggaaaaaaaatcttgcatgtcaagtattgttgataatgatgggtagcaaagcacagcctttttctacacatgattccactgggaaaaaaaatcaggcaacctatgtaaatttattgaatttagtggtatatttatatagtatatacctccaatcataagttaaagaatataagttgttcaagacttcttaagatcaaaatgagaaacatctagaggtcttctggctagctccacaaggtggtgagctagctaactgacggagcgtggggctcctcaccggaagaccgcgcaggcccccctttgccggttcggccgggggcgctaagtgaagttcttaaccctcgatctgtggaatgttcgcgagagagcaaatgcacaagacacgggcgatgtagacaggttcgggccgctgagaagcgtaataccctactcctgtgttctggtggatctgtgtgtgaaggggttacagagaaccggagagcaagagagttcgaactctagaactcctcttcctttttctctcctctacgtctcaggtacattcagagtcgtctcccagtccccccctcctttggtgggcaaggtcctccttttatatctcaaggggataccacatgcaccacttctacctactcttcttttgggtggggacccaccctatcttgaccaaaacttggctcgcgccttcgcctagaagctaaatcacagcttgtccttgagtgaggcccagcgccgtcacttgcctgacacaggggataaccctgtcattccttcattaatgggtggagatttgcaatggccgctgtccgaatgaccctccgatgggatgggtcatacctacctccactccgccggaagcagatgcaacgtgggagcacggttgtctgccgatgacgtgactggcgtcagaccagtcacagaccggtcattcttgtccaccgcgtgtcagtttagcatgccgcacgtctgcccttcttcatacaatgacttccttgccatggttgcgatgaagcctggaatgaatctggctgggactgacgtgctaactccaggagttagcacgccggctccggctagggacgagtgcctggaggctctcatcattccgacgggacggggcgaggcgtgtgacaggccgcctgttgccacctaacccgcgatctgaccggtctgtgaccggtcacacaccgcgactggtcacggaccggataaatgcgcgctgcgccgcattaaatgcggcgtgatgcgctcgtccaacccgctataaatgcggttaggtgagcgccgctgtgctcacctaacccacacacgtgacgccaacaccacagggggtcggggcgccgcagccctcggggccgaaacgggagcggcccgacccctcggggagacagtgggaggggtggccacgtcaccctcgggcccgacccccccgagggggtcaggccacgtgggtgaccgcggctgcccaagcctctagtcacgatacccccggtcccatgtcaccgacactaacctatgttcgaagcctcaccccttctaattatttgatattaggtcattccctaatatttgtggtttttttgttaagatcaaaatgtcatccaaatagtcatatacacttttgacaaatttaacagcatatgtatgagtatcatttcacaaatatacaagtctaaattcaacacatattgtatgttgaaaacataacagattaaactctaaatagtataaactccaaatagtatagttgtatttcaagctagctaggtactccctccgtttcgaaatgtttgacgccgttgactttttagcacatgtttgaccgttcgtcttatttaaaaaatttaagtaattattaattctttcatatcatttgattcattgttaaatatatttttatgtacgcatataattttacatatttcacaaaagtttttataattaaaagctttcgacgccattaattaacagagaagctcgatccagcagatgagtttctcaagctaatatgtggtgtgctgagtacttgttgcttgctgaggtatttatagcagctaaatcatgagagctagtatagcttagctcgattacgagagaggatggaaagactttagacttggtcctgcactgtcacgttgcttctagtagatgttaattaattccactaaatataattaagtggtcaattgtcgcaaacttgccatgcttgtattcacactgtgccttatagtctttggcacacagctgcatactttcttcatctgggcaggtagtgaatgcaacttgatgtttatttttcttgcttatttatgtatcctatagccaatagctcaacatacaaaaaataaaggagctattggatcatttctatgcttaatcacaaccatccattttgtagcttctttcaagattaaaattagagtaaatttcacaaaactacaggtattttgcataatttatcacaaaactacggatttaagagcttgtttcacaaaactacagatttagtgtcttcgtttatcaaaaaactacaggtattttgtacaatctatcacaaaactacagatttaagaacctgtttcacacaaatatagatttagtgtattcgtttatcacagtgctacacatttaatgtcttcgtttatcacaaaactacagatttagtgtccccattctcacaaaactacacgttttaacaatgctaaaaggtgtagttttgtgagaatggggacactagatttgtagttttgtgataaataaagatattaaacctgtagttttgtgaaacaagttcttaaatctgtagttttgtgatatattattcaaagtacctgtagttttgtgataaacaaagacattaaatctgtagttttgtgaaactagttctaaaatatatagttttgtgatagattgtgcaaagtatctgtagttttatgaaatttactcttaaaattaagatcatatatcctatatatatatgcccagctgggggcacaagacatatcgttgaggacagaggcaatattaatatttggcacgttgcaatatgaactttccaatgattttcctgatctttttctctcgtgtagccgcattacctaactcacgaagacgtacgtacggtattatagtacgtacagcatgcgagagagaggttggaaagactttgacttggtcttgtactgttttatacctcttgtagttcttaatcctaactactaaatataactagagttaattataagtggtcaattgtagcaaactagccatatatgcatgcatggatccacactactttagtctagcttggcacacgttactttagtcaattagtctttagcaacttgatgtttaattttctggcctatgcatgtatccatgtcacaatattatctggaaaaagaacatcgggcatgtcaagtattgataaataatactagtaggtagcaaagcatgcacaacccttttacacacgagtgtgtccgcaagctaggacaaaaatcaggaaaattatgtattttcccatgcagcgcgtctagctctccgcatgggaaaatgatcttttcaggcggaccgcccgcgcgcccgtctgtgaagatcgctgttggggtgcaagcgaagccgtcgtcgttcgtctgggaactggaaaaatatgtttttaagtagtaatagttattgtagttacttatgtacggtgttatagtacgtacacctctgatcataaaagaatataatagtactattcgtaattctttaacagtagtatacaaaacgtttgtaagtatggtccgtaacttgttttcgcggcatttattccaaccacctgtgactatgtacaaccaagggcatgtaaaaatcaaggatttgcgcggatgaatttcgaactgcacataaaagttgattttcatagacgtctcatttaaagaacacaccgtgaaaatgaattttcagtttttattttaaaaaacccaaaaaaatattttgtattcttattgcttgtgcttggactataggaaatgttacaatatatggataggatcgtatagtacatcccatgaattttttttaacactggtggagaaggggtttttactctcagttcgtaaccccctgtagtctcggttttccaaccaggactacaaatctgaaactaaagatcgctatctttagtccgggtgaaaaaattgggagtaaaaatccatttttagtccctgttgataacaccaaccgggactaaaaagactaatctggttgctctttattattttattttcttcattgtttttaatatatattgatttcacccccatcccgtcgccaaaatcccaaatcaataattctcaaattgcctccaaatccacaatcgatcatctcaaatactcaaatacatcacaaaatctcaaaaaaaaattacatcacaacttctacaaaattatcaaatattcacatcacacacaaatcaaatacatcacacaacaatctcagatccaatcaaatacatcatacaacaatcttagattctaaaaaaaaaagaaaaaaatccgccgcctcgccggccggccggcccgctgtgccccgccgccctcgtgccggctgccgccgcctcaccgcgcgccgcgccagccgggcctccgcgcccgaccgccctcagcctgttagagagaagaaggagaggaagataaggttgtggagagaagttaaaaggagaggaggagataaggttgaggagaggagataaggttgaagagaggaggagagaggagttaaaggagagaaggagatacctcgatccgatcgcgcatgcctctccgatctccgcgtcgatcttttttcccggttggtgctatctttagtcccgattggtaacaccaaccaggagtaaagcatatgggaatcttttttcccgattggtgttaccaaccgggactaaagatagattttagtccggttggtaacatcaaccgatactaaagattgaaaagtacctggagttttcaaaccgggactaaagatgtttttaatcctggtttttaatacaaccgggactattgtgaaatctggtcgactgaccaaagataatttctccatcagtgtaagaacaatagtatcccatgtataaatatgattatttccatataatatatttataccagtccgtaagacttcatataatcgaatcaaatatatgcagtaaccttaggtgatgaaaatcaaacacccctttatttagtactccctccgttcctaaatatttgacgctattaatttttttaaacatgtttaaccattcgttttattcaaaaacttttgtgaaatatgtaaaactatatgtatacataaaagtatatttagtaatgaatcaaatgataggaaaagaattaacaattacttgatttttttaataagatgaacggttaaaaatgtttaaaaaaagtcaacggcatcaaatatttagagacggtgggagtaatttgtaataaaaatacacaccggatacatatatttgtatctgtatagatatactcaatacgcttgcatcatgatgtacttattccatccgacacacacttatatacgcatgcagatatgcatacatacatacgaacatacatatataatatagttcgcacatatatgcgcatatatatctatagatcgattacgtacaaacaatatataagtatagtagcaaaatatatataccatagcatatacgtaatacgttacgtacgtatacgtatacggtagctagtacggcctctggttttggacgttgccggcggggaagtaggtgcagatgaagaagacgcctcggttggcgttgcaggcgacggcggcgcatccgacggcggtggtgtcgcgccacacgacctgcgtgtagtggccgcacatggcgccgccgacgcagctgttgctggcgtagtcgtaggagcccttctccgccacccactggtcgacggagctcgccgccgtccacgcctgcacggaggggttccacgacaggttctcgccgtactgatagttgttgcgatcggagtgccgcagcgcgcagtcgccggcgcgctggttcgcgtagccctgcgcgtacgccgccaggttgtcgtcccacgacagcgccgggacgccgacggcgctccgggcggcgttgtggatgttgacgatgtcggtcgccgtggtctgggcctgcgccgtcgatgtggtggccagaaccaccgccatggccgccatcaccactgcaaagctcgctcctctctccattgcaagctcgcagttgatttgattggcagtgtacgttcgatcgactgcgcaattagagtagaactagagctatagctagctagtagaggtgatgattaatacatgcaatttcggcagtatttatagacgggctggctctcgatcgagccatggacttaattaagcacatggcaaagaagaaacggtaaacgttgatacggcggactggtccctaattattaagagaaagaaatgggagaagagctgaagaggtgataagaccagaaagtcatgaacaaagcactcatgggaaagtggataatatgcgtggcaaaacttgttactacagaccaaattctcttacccagaatgtctgaaaattcttcaaatcgggtgcccgcgcctccgcgccgaaaaaaatggggcaccgcgcctccgtccaccacgcgccccaccacacgcactgttgcaataaatctgccacatattacggaaacactctattaacaggaatccgtttcatttttttttcaccaataatgtttcaacaagtatattcgtattgttacactatgtatagatcaaatgttgcagagaattgaaacatcctttcgctatttgctgaaacattatttttatatgcggtgaaatagcttcaaaaaccgttgtttcatgcgctgtagcaaaatgttttatgaggtgatttggttgtatttaagctttttaaacgattggaccattttcaatcaacgtagtgaaacaattccgatcgactgcgcaattagagtacaactagagctatagctagctagcagaggtgatgattaatacatgcaatttcagcagtatttatagacggactggctctcgatcgagccatggacttaattaattaagcacatggcaaagaagaaacggtaaacgccgatacggcggactggtccctaattattaagagaaagagatgggagaagaggtgagagaagacctgaaagtcatgaacaaagcactcatgggaaacaaagtggataatgtggcaaaacttgttagtgcctctgtttcagattataagtcatttgcttcaagtttaactaagtttatgaataaaatagtaatattttcaacccaatacaaatatattatgaaaataaatttaattatcaatttaataaaactaattaatttagtgttgcacatattactatatttatctacaacttaatcaaacttaaattagtttgattttcaccaaagtcaaaacgacttataaaacggatggagtactacagaccaaatacttacatgagaaaactcttacccaaaaagtctaaaaataggagtgggatgatggagaagtttatactccgtatatctttggtggagtcgatcagctaggaaaggatgtgtcgggtgctggatacttttggcgcttcctttggacgcttttcttgttgttttgctctttgtcgttccataaacagtactatcttcgttttctctagttaaaattgtctaagtttgattaagcttatagaaaaatataataatatttttaacacaaaataaacatattatcaaaacatattcaatgatagatttaatgaacctaatttggtgttttagacgttgatgaattttacaaatttgtgattgaactctaaaaaaatttctatctttgatcactatttttttttcataaaaagtaaagttacacgtgcactggctagtagatgggtggaaccattcaaatttccaatgcatatgcgtccattggaatatgggtaaccatgctttcctgccgcgttttcttcctttctagctaccctgtgacgttcatcagcaagtacatggccggatcgacttaatttgatccgcttgattattttgattagaaatcgatttcccactgaccaattcttacacgtacgtctatctagttgagaaatcatagcatgtcgatattattttatcaaaattgcggggaaatattactttgtctcttataagggaatatgtccccaagcttgttgcttaaataataaatgtcaatccaaataataatcatatattttgttgaaaaataattaacaatatagatcaatatctggtatcacttcacaaactttcacgtttacatttgatgtatgcatactagtcaaacaaacaaattaaactctaaattgtacgtatgtactactacctccgtcctaaaataattgtaattttaggttgtttggcatatattaaggtttgagaagaaagactataatgtccatctttaaaaggtgtatagataaaagtgaaagggtggttgagggtataatagggagaaatttaaatgggaagtgattaatgagacaattactactctattgtgacaactattttaggacaaatttgaatcctagaaatacaattattataggacagaggtagtagctagtagttatttttcaaggtatatggtaatatcaagcagtaaattagtaatgagcactctaatattttacccctcggccatatagctaaagctttttttttcttagctataaaattaggttttcacttaggccccgtttaaatctgcttaaaaggatggattaaattttggattaaagtggcatacttttcaaactaataaacggtgtgtttcgtgcgaaaactttatatatgaaagttcttctaaaatatcagattaatccatttttcaagtttgtaataattaaaacttaattattacaaacttgaataccatccattttatagctactattcatcattatacctccatatactttctttagctgggcaggtgattcaacttgatgtttaattttttttctggcatatatatcgatatcacactatctggaaaaaaaaatctggcatgccaagtattgatgataataatgggtagcaaagcacacccctttcttacacatgattccactaggaaaaaaatcaaccaacctatgtacgtaaatttattgaagttagtggtatatttatatagtatacctccaatcataagttaaaagaatataatgttgttcaggacttcttaagatcaaaatatcatccaaatagtcatacacttttgaaaaatttaacaatatatgtatgatatcacttcacagagatatacaagtctaaattcatcgcatattgtatgttgaaacataataggtagattaaactccaaatagtgtagttgtatttcaagctagctaggtgtatgttaacggttttgctagagtagtgtcaacagaaattagaggaggaagctttcaaattttcaaccgccaccggatatgcatcaaagattcgtaacatgagaggagaaaaatcgtgtgttttttctctgtgcgcgtggtatgaattaatctcgagacgctcgacttgaacgatagctatgctaaccacttgtacctatgcgcttttatgataggtatatactagtataagttataatgtaattacattataattatactattgttacatttgaaaatttttcactaaaaaactttttaatggtatataagtactcccatatgttaatatcatcaaataataaattcatttccacatgtcgtagctcaagagagtggtatatatcaaaatgaatttttcaacttttgatatttgtaaagcccctgcgaacaaaatgggattatcctcaggcagatccttaagagtccgcctatgataatgtttatttggtaagccttttccccattttcacatacggtttaaatatctaaccctatgtatatgacgacgtttcttgatacattaattattgcatagctagtgatcgaggtcgagaataaaatccatacaaaagtactccctctgtttcataacgtaattaagactttttagtattctccatattcatatagatatgtctagatttattaacatctatatgaattaatgtgagtaatgccagaaagttttatatattataaaacagaggaagtagtagaaaggaatttcaacataacaaatcctttatttatcatgtactccttaagtacgaataacgtactgtattctgtatgttttacatatagatatctgatgcgcgcctaacgtacatgcatctactccagtattaattctactagctagtacgggcgctcgttggggacgttgccgggcgggaaatagttgcagctgatgaggacatcgccgttgttgcagacggcgcggccgcagccgatcgacgtcgtgctccgccacacgatctgcgtgtagtggccgcagtcgagcagcgcccctttggtgcaggtgttgctgctgtacacgtaggacgccttctcctccatccacaagccaaccgcgtccgccgccgaccacgccttcccggcggggccccagtagaggttctcgccgtagccgctgcccgacgtgtgccggagatcgcacgcgccgccggcggcggcgctcgccaccacgctctccgcgaacgcctccagggtcgcgttccacgccacgtcggggaggtccacgccctcgccgcgccgggcggcgttgtgggcgtcgaggaagtcctgcggcgagctctgcgccgccgccgttccggcctccatggcgagcgtcgccgccgccagtagcaccaggacaaagcctactttccgcgccattattgcagatcgatccaatgcagaagagtttctcaaggtagctaaagcgattgtgctgtgctagctgatcgatatgtgttgctcgctgatcaggtatttatagtcgttatatcacaagtagctcatctattagctcgaagattgcatgcaataccatggctaattaattgcactgtttgtatttggcacgtggcccaaatgaactttccaattaatttccacatctttttcaagtagcacgtacgtacgatattcgatgctactaattactccatccgtcccataatataagagattttgagtttttgtttacactgtttgactactcgtcttatttaaaaaaatttagaattatttttttacttactttattatccaaagtactttaaacataacttttcgttttttatatttgcacaaattttttgaataagacgagtggtgaaacggtgcaagaaaaactcaaaatcctatatattatgggacgaagggagtatatatctagattatgcttatgttaaacttgatcatattatagtagtataatcctgtccgtacgttttacaacgtacgcgcagcatgcgagcgagctagggaggttgaaaagactttagacttggtcttgcagtgtcacgttgcttctagtagtttttccttccaccaattgtatgtggtcaattaattgtagcaaactggccatatgcatggatccacactagtttaatattatctcccacgttacctggatatactttccttagcagctgggacaggtgaaccaacttgtttaattattctctgtcatatatatctttttttaaaaaacttctgtcatatatataccaagttttagtgaaactagttttgcatatacaccaaactagtttcgttaaaactaaactttaatctattttgataatttgtctgttatgtattgaatttttttctatatttttatataaacgtagtcaaaattaaaagaaatttgactagaatcaaaacgacttgtaatataaaacgcaggggatagctagctatgctagagacaaataaatcttcataatattgctagcttgctctccctctagatctggcaaagggagggcaccacggccaggccgcgccatgcgaccgagccgccgcctcctacctctagcacctccgccaaaccgctgagagagaggggggggggggagggagagctgagagagcggtgtgagagacgaggagataagatcgaggaagaggaggtgttggccttatcacctcgtgggttgtggggccggccaactatctgcctgaggaccggctcggtttgatttttaggtgccggttcttgactatgaactggcatctattctttttaccacaaagatgccgggtagcgcccgttccgtcgtggcgcctagcgggaaaattatctcctaaaaaccctaattgcgaaagttgtttctttgattgttgtctagtgcccgtgccatctcatgatctcaatccccgctctatcgtcgagttcaattccgaatccaatccctccaaatcaaattcctccgcaaaagtccattttgcctcccccaaggtcgatgggccgattttccctcggcccatcttc

SEQ ID NO: 24330 - DNA, 1484 bp, Oryza sativa
ccgtagagcacctccggggaatccgagccgttggctgttctcccctggtcccgggcaaccgcccggtgtgctcgctttgcctgtatcaccgtggttcgttccgccgcttgccggccgccacccgccgtccattcgcggccgggtcgtcgtctacctcccaccagcccacgtggccgccacgtaggcgccacgtcggcgccagctcagcctagaccggatcgagccgaccccggtcagtccctccccgtgcgcgcgttccaccgcgagccgtgaggctgcgcgtgggcccgccgcacctgcgtccaccgcagaccgcgcgcatgcaccgcgtcccttccccgcccgcgcgtgtgcgtcgcgtgctctctccgcacggtgagccgagccgctgacaagcaggtcccacccgggaccgcgcggggtgagcccggtccaccggctctctctctcctccctcccgcgcgcgcgcgagtttgggccgccttgggccggccggcccatttagctcggccggaccgctccatttctcttgggccgcgccctagccgtccgagaaaagtctatattccctccctcccttcttttctttttcttttccaaaaaggatttaattaaatccttttcctttagataaaaaattcaataatcttagaaattcaatatcttcccaaccgtaaatccgtttgactccgttcaacttccaaaattcctcacatctcgagatctaatctcgagatctatctaatagggcttaattttcgccgtttgttgagttgttccgtttcgcgtgtagttccggagcccgaagacccgcagtgcgaggatttcgaggatcaagctccagatctcgagcaaggcaagccacctttgaacatcttgagcctatatttgaaatttaattatgttgcttgcaaaatattatgcattgataggatcgcacttaatctgtttgtcccgtctgcaaggcagattggcggacctacctaatttgtcgcatttgatccttcctttgttaattgctataccatgtccccttgtaaccacccagttgcgcctcgatactcgtgcactctgtgcaagtatcgacggtcgccctcaaacttaaaatctgagtaacaacttgggtaaaactggagttttacaaaagacttggaaaacccgacacctgggtcggtgcttgcgaactaaatgaatttccaaaaccgcggaccggggaacgtaccgggtgtacggtttcccgctcttgcacttaaggaccgtttccttggaaatttcatccgaacataagacaagtacgaccacatgggtggaatgggacgcccctggctgagtaaattgctaatcgggggagccttgatgccgagagacatgtggatttcccggggtggggtcggggaggacccctaggtttcctggcacagtatggcctgggacctaacctgttgttggtctgggacccctctcgtcggcatatggtaaacctg

SEQ ID NO: 24331 - DNA, 943 bp, Oryza sativa
ggctcaccgtgcggagggagtacttggctcatgcacgcgggcggggaaaggacgcggtgcacgcgcgcggtccgtggtgaacgcaggtgcggtgggcccacgcgcagcctcacggctcgcggtggaacgcgcgcacggagagggactgaccggggtcggctcgatccggtctaggttgagctggcgccgacgtggcgcctacgtggcggccacgtgggctggcgggaggtagacggattcgccggaggttgctcgacggcagcggattgcggcggcggcaaccggcggcgggagaagagggaaacggcgacgaggtcacgagaggtcgattcccggcggtgagagcatctatgcggcttcgggaactcgacgctagcgtcggattgggcggaactacgccgagcgaggccggcgacgagcgggtgctacggagctcgagcggcgacggtggcgaacacacggcgagcgacggcaacggtccgggcagcgccggctaactacggggaggctactcaagctactaccgaaagctaggggggggagatggagcgaggaggaagaacggagagaggcactaccgtgcgggtcggggcgctgtgacgagaggccgacggcgcgggagtaatctctccggcctcgggccgaggaagaggaagaagagggcgcggccgaagtccccttccgcgtcctcgaacgcaccggctctcccggcgcttggcgaaggacggcggaggcgagacagagcacgggggcggcggcaacggtgaggaggcgaatgggagaggaaaggaagggagggggaagacgggtttaaaagggcggcaatgtcggtttgagagaggggaaccgacatgggcggtcaagccggcgagctggcgctccggctagcgtccaaagcggcgacaggaagtgacgccggcgagaggggaaaaaggggagaaaa

SEQ ID NO: 24332 - DNA, 5230 bp, Oryza sativa
tcagcacatattacatgtcctttgatgcatgtaagagagggtttctgagtggatgtaggcctttgatatgtttggatggttgccacatcaagactaaatttggtggacaaatcctaacagcagtaggcattgaccctaatgattgcatatatccaattgcaatagctgtggttgagaaagagtcattgaggtcttggacatggtttctatataccctaaaggaagacctgggcattgacaatacctacccatggacaataatgactgataagcaaaaggtatacttgttctttatttttgtcttataagttttgttcttataatctgacatatttcaaattccatgtttgtttttacatgatacagggtcttataccagctgtccaacagattttccctgattcagaacatagattttgtgttagacatctgtactccaattttcaggtacatttcaaaggtgagaatctgaaaaaccagttatgggcatgtgctagatcaagttcagaggttgagtggaatgccaacatggaagaaatgaaatctcttaatcaggatgcatatgagtggcttcaaaagatgcctcctaaaacttgggtcagagcttatttcagtgaattccctaagtgtgatatcttgttgaacaataattgtgaagtattcaacaagtacatcttagaagctagggaattgccaatcctgagtatgtttgaaaagatcaaaagccaagtaatgagtaggcattacagtaagcagaaagaagtggcagagcaatggcatgggcctatatgccccaagatcaggaagaaagtactgaaaaatgcagatatggcaaacacatgttatgttttgccagccgggaaagggatttttcaggtggaagataggaatttcaagtacattgttgaccttagtgctaaacattttgactgcaggagatgggatctaacaggcatcccttgtaaccatgctatctcatgcttaaggagtgagagaattagtgccgagtcagttcttccaccctgctatagtttagaagcattctccagagcatatgcatttaacatttggccctgcaatgatatgactaagtgggctcaggtgaatgggccagaagtgaagcctccaatatatgagaaaaaggttggcagaccacataagtctaggaggaaagcaccacatgaggtacagggaaaaaatgggcctaaaatgtccaagcatggtgtggagatgcactgctcttactgcaaagagcctggacataacaagaaagggtgcccactgagaaaggctggactcaaacccaaactgaagacaagtaggaccccagctgcaagttctacagaagagttgcatgaatctgagcaagaaccagtagaggtaatgaaacaatactctatcttatcactctattatcagtaccctattaattataactctatcttaattacctttgtaaacttgtaggtgctgacccaatctcagtctgcatatgaccaattactatcacaagttcctaatcctatggttgcacagatgtttgaggaatcatcacaagtgagtcaaatggaaactacacatggtcctctcccagataaccagtacattctttcaaaccagccagctgtagtatctacccctatgaccacagcaacaaaagagggaaaatctagggccaacaaaaggaagtgtacaactgaaggagtttcaggagttgctgctactacttcaaagaacagagctcccaggaagaaagctactgctacaaacaagtgatatgtgttagaccatatgtttgatggtcctttagtgttagtagtactttgttatgcaaaaatttcaaccttgtatggatttcatgggcatgcttgcttgattttgtgctgccaaacttgtggctattttgtgatagaacatgggatttttgtgatgccagacatgtgttcactaaatgtagtactggaaatactactaaatgccagaaatttggtattgtgatgaatatgcgaaattactgcctgtaatgcatgatgcatgtttgctatttccatatgacagttttacaggacatttcatatgctagaacaaaataacagttgtctgctgaaaaaaattagagatgtcgattttcagaacaaaatctcagatttcagcttcacataatagcatttagcatacattttccatacatggttcagattcagcatacacaaaaggtcactcaagtgccttatttcagctgacacaaaacacaccagcaccaatacatccatatccatcaaactttggtatctacctaagaagcaatagtgcaaatatgactactacaaaaccaacaataactgacaacatagatcttctactctcttctaacatcttgattctataggccattttagtaactgagccacattcctctttttgtcccctgctctttgcttcatagacattgcgttcagtgacaagtccatcaatcatagctcttgagttggcaagggatgctctaatttcagagttctctgtcttcacttcacgaacagtgctgactaaatcattcaaaacctgcttcaaatacgacgttgtccctggttcataccactgccgtaatttgcatccaccattctgcacattcaaaatgaataaaccaactgacttcaacaaagtactctccaggtaccgaatgggagatggaaaggttttaccttgcctggatatttctgtcgcccaccgtgttgtgctccaactggagctcgagcctgccatcgccttcaacccagccgctccgccgccgaagcccgccgagacctgctccgccaaagaaccctgccacgacatactccgtcgccgaaccctgccgagacctgctccgccgacgaacctgccgcaacctgctccgccgccgaaacttgccctcaatcgcaaccctagtcggcgcttagattttgggcgcttcagggaagaagaagcagtggtggaaaccaaatgagaaaaagagaggggcctggatgaaaaacgacaaggcgtgggcggtgtgtcacgcacggtgtggtccagctcagctgtgcacgtggcatgccacgtcggcgcgaccgcggtcaaatggcattttggaccggcgatggtacatttagcaagtttagtggtctaattacacgatttgcaagttaatggacctggatgacatccgccctcaagtttaagggccgctactgtattttactctagtttttttaatcctaactactcctactaatgtaactaaagttaattataagtggtcaattaattgtagcaaactagccatatatgcatggatccacacttctttagtcttggcacacatacttacgttaccttcctcatactttctttagcaacttgatgtttaattttctggcctacatatccatgtcacattatctagaaaaaagcatatgtctgggattacctccgtcccaaaataaaaatatttatagactagtctaacatttttaactttaactattaataaaataataaaaaaatacatcatttaaaattgatgttactagatttatcattaaacgaactatcataatatacaactctttttagatattattaatcaaaatagcatatcgaaaactatgtcgaaataaaaaatagttatattttgggacggaggaagtagctagcaaagcatatcctttttacacacgagtgtgtccactaggaaaaaaaatcaggcaacttgtgtgcgtacaggtgatgacgctctctctcgtggcacgatcttctggtgagggggataactctcgctttgatcgagtgcgacgtttgcgatgtggctaccaaccagaacaaatccaggacgccgtgcaatcgctacaccacaaacgatgtcgtaccaaccgtgacgcgcggttgatgatccctacaatgcaaacgagagaacactgcaagaacaagataagatgcaatctaaatattgcgaatagggaattaagcacaaaggaatagttgcgattgaagtggtagatctaatcgacccggcaaatcaacacactaactattgggggctctgaatctatagtcgccgactaatcgagcaaggactagagacaaggtgaatggcacttggcaaaattcaactaaacaaaacccaattgtttttgaggatgtacaaagttatttatagaggaaaataaagctagggttaagtgctaattcgtggaggtggatgggtagtcaagccaagcttcttgaccatctcttcacttgctaaattgttgcaactcccgctatcaataatcattttgacggtatggtctttcacaagaactttgctttggaacaaattgtgacattggttttgctcttcacacttctctttagcactaagtgctagcttgacaattaggctaggatactgatctagcgactctggatgcaaatggacttcctcgatgtcatcattatcttgtcctcctgcgtggtcagtggcagctaaagcatattcatcatcacaatcactagtagaagtatactcaccatcatcattcacaaatagagctcgccgatttggacagtcacgtgcaatgtgtccaatgccatggcacttatgacatgtaatatcacgggtacgtccagtggaagctactgaagttgcactcttggctggagtctgaactgaagcgtttttgcttttttcttgagcattggatggcgtagaagtaggtgaacgaacggcagtagtagcttgacgtggtgttgactgtcgtgtggaagtagcacctgcaaaagaacttctatgcttgttgcgtccctgcacttctctttcagctttgcatgcaaaatggaataatctattcatggtattgtattctttatattcaagaatatcccgaatctctctattaagacttccatagaacctagaaattctagcatcctcagtttcttgcaaatcacatcgtgacaaagcaatcatcatctcttgatagtatgtttctacagaattggaacattgtcttaaaagttgcagtttatttaacatgtcacgagcatagtaagaaggaacaaatctagacctcattgtacgtttcatatcatcccatgttctaggtctaagtcctctaccacatatattattccaccatagagatgcaaaggaggtaaattcactactggcagctttaactttcttattatcaggaaaatcatagcaagagaatttttgctcaacagctaa

SEQ ID NO: 24333 - DNA, 12256 bp, Oryza sativa
acatcatagcatgtcgatattaatttatcaaattgcggagaaatattaataactttgtctcttataggaatatgtccccagcttgttgcttaactaaatgtcaatccaaataataatcatatattttgttgaaaaataattaacaatatagatcaatatctagtatcacttcacaaactttcaaacaaacaaattgaactctaaatagtacgtacgtactagtagttatttttcaaggtatatggtaatgtcaagaagtaaattagtaatgagcactctaatattttacccctcggccatatagctaaagctatttttttcttagctacaaaattaggttttcccttactttgcatacactatgagcttccttgatgcttttattgggatcgatttacatggacaccctatagtttttttttcaccacttttctttttttttcaccatatagtttttttaagtttatatacctaaagtttatacttatagggtttacacatcttttataggtcaaaagtttatataccgattcaaatttgaatttaaatttaaatacatttaaagatgaacttgaatctgatatataaacttttgacttacaaattttaggtcaacaaactttaagtatgtaaactttagatgtgtaaacttaataggtataaacttcgggggtataaacttagtaaaacagaaaagtaaagtggtgccaaaaaaaaaataccgcgtagggcagaggaaccgatcgccccaagcaatcaatcgtgccataggagtttcgcaccctatcctcacgggcttcaagtctagcctgatgaaggcattagatgggcgtcatcgccagcccatctatgtaggcttgaaatattagctcatacatgcatgtttgtgggctgtaattcgttggaccagatgaagcctattcaaacttagccccaattggtagtttcccaccataggtcagcccagatgttcaattctttttggtagagcttaaaattgtgagaattaacagatttgttctcagttcatgagaatatgaaaaagttagttttccaaatttttgttatagttcattttctgaattatatatctactacaaattcttataatgtgaatgacaatctaaattgtttagggagagttaaagattctgagagaagttgcagctgctaaaagcttttcccaaatagacacctagggcctgtttgggggagcttccagctgctgcagcttttcccagaatcagaaactcccccccaaacagtatagcttttggtacagattctgagaagctatagttgcatggtagagctccaacttctaaatttaactccagtagttgggtctgaagtggagttgtggagctgactaaacacagctccacatctctagttcattttatgagagcgctccacccagcttcgctgctattaggtggagctgaaactgtttggctgagctccagttttaggagaggtggagctggtgatggaactatgccaaataggcccagaattcagaaaatgaacaagaaattagaagctgggaaaccaacttttacagatcctcaaaagttgtctactaaccagctgcttctaagaatcaattcttaattagtttcccctggacaggccactaggactgttccaccacagcaccacccagtctctgattgtatggtcgtcctttcaaattacatgcagacaatggaattaattttctcatttattttcttcttttattcgaacgacaacgtacatatatatataataagatccccgtaattattatttcgcacatttatatcatactccatacatagttaaagtaaatactgtattaataacttattaagcagagagagtgaggccacgctcgaaggggcgctctccctggaagttgccggcggggttgtagttgcaggtgatgaagacgccgccgttgtcgcagtccacgcgggcgcagccgatcgccgtcgtgcggctccacatcacctgcgtgtagtggaggcacgagtcccacgaccccaggcagctgttgctgtcgtagtcgtacagatccttctcccccacccagctgttgacggcgtccgctgccgtccactcgctgccggagcctccgaagaggttctcgccgtagccggccttctcccagctgccggagtggatgagcgcgcagtcgccggcgcgctccgccgcgtagttctccgcgtacgccgccacggcgtcgtcccagaccacctcgccgacgccctccacgcgtcgcgccgcgttgtggaggtccacgaagtcctgcggcgagttctgcgccaccgccggcgtggtcgccatggccagaacgacggcaatggctgccgcaagtgctactcccgatatctttggtgtctccatatgcaacactactacacaatttgctctcttaatcgattccgattgtgtgtgtgttcgttgaatgctgatgcgatattactcgcgatcgatcaaggtatatatttatagccagatgagctcccaagatgtcagcaaaataaatcgattattaatcctacaatttgcatggcaacttggcaagtagccatgatgcttggctctgctcggcgagagcggattaattaggataaaataaaactctcctggcctcactctcatttctttttattaattgattaattgttaatgattttgtgtttggtacatgcatgaatgcatgcgacgtgttctttttcttttctcctattttttttgggggttgccgtcgttgaatcgtagtcattggaggacgcagcacgttgctcatgtgctcgacggctaaggcgattatatcgatccgacgaggcatgtcttatctttgattggtggactagttccttaattgattgatcaactgatcagtttggcatataggctgtattattagtattttatatacatacaatattatttggtgcaacttgttgtgaagatatatataatttcagtgtttcaacaactaaattttaaatatttaatcagttgtaaatgatgatttttatgccatcagaaaacccaaccttaatttagtttatggaacaaaccacaatggttactgaataacatttctacatttagaaacaaagtccacctaagcattcgtgatcggatcaagggatccatccaaatcatgtggggtatgggtcaatatttggtgggaaatttctccatctccatgctgtctgaaagaattctataaggccaagtagccaactttaaataattcatgcataccagcaggtgcagagtttttcgattcctagtgggtgtgggtcaccctaggaaagaaaaacgaaagatcaatattcaagaacggaagagatatgtcagcaaattaagcacatcctcgttgcgtgtttgctaagccttcattattccaaacaaccactaggatcaatataataagagtaaattgcatattggaccacctttcctcagtatttttttataatatatattaaacctagcctttacttcaatcacagctacaacctcttattatatggttcttgacacaaagtccaaatagaatagaatgaaattttagtacggcctaccatccgcagaccgatggtcagacagaaagggtaaaccaaatcctagaagacatgctacgtgcgtgtgccctggatttcgaaggcacttgggatcgttgtttgccgtatgctgagttctcatacaacaacagctatcaggccagcattcagatgtcgccgaacgaggcaatgttcggaagaaagtgccgcactcccttatgctggaatgaggtgggcgaagcgctgatattcggtcctgacatactcaagtcagcagaagaacaagttaagctgatacgagaacgtttgaagacagcacagaaccgtcagaagaattacgctgacaatcgaaggcatgaccttgagttcgaaaaaggagatcatgtatacctgcgggtatcacccctccgtggtatgaggaggtttgggatgtccggcaagttagcaccccgctacatcggcccctacctcataaccgccagacgtggcgaagtggcttatcagcttgagttacctgaaggtctcgcagatgtgcacaacgtgttccacgtatcccagctaaagaaatgtcttcgagttccagaagagcaagtccccctgggtaatatcgagctggaaaagaatctgacgtacaaggaaagaccgatcaaggttcttgaagaggcaaaacgtcagactcgaaggaagaccatcaagttctacaaggtccaatggagcaatcattctgaagatgaggcaacctgggagcgagaagatcttctccgcgccgagttcccggagctgctcccttaggtgctgaatctcggggtcgagattcttgttaggggagttggtctgtagcgcccgttccgtcgtggcgcctagcgggaaaattatctcctaaaaaccctaattgcgaaagttgtttctttgattgttgtctagtgcccgtgccatctcatgatctcaatccccgctctatcgtcgagttcaattccgaatccaatccctccaaatcaaattcctccgtaaaagtccattttgcctcccccagggtcgatgggccgattttccctcggcccatcttcccctctcccccggcccatcttcccctctcccccggcccatctccatctctcccccggccccctctctcccgggcgctctctctctctctctctcctttcctccgctccgcccgcgcgccgcgcgcgcgtgcgcgagggtcgtgccgagcgcccctccccctccgctctgcctgcgcgcgtgagccgcccgcgccgagccgagtcttccctctctgctccctcgctgccgcttcccgcgcgccgtgttcacgtgcgcgcgcccgcgtggtttcccgcccgagccgcgtcgtctgcgccgtccgcgtcgcccggtcccgctgcccagccgcgccgcccgttgcttcccgcgcgcgcgtgccgagtggccgaccgcctggtcgccgccgccgtcaccctctgccgcgccagcccgcgcctgtcgcccgtgtcgtcgcgccgctccaaaccatcccaccgtcatcgccgtcgtcaccgcccggcccccgccactccgcgcgcaagccgccaaggaaaggaggccgcgcccctcctctctctgccgcgtcgcccccgctcccctccccctttttcccgaatcggcaaaggggcaagccccctttctccccctccttttcctcttttcctcctctttttcccctctcgccggcgtcacctcctgtcgccgctttggacgctagccggagcgccagctcgccggcttgaccgcccatgtcggttcccctctctcaaaccgacattgccgcccatttaaacccgtcttccccctcccttcctttcctctcccattcgcctcctcaccgttgccgccgctcccgtgctctgcctcgcctccgccgtccatcgccaagcgccgggagagccggtgcgttcgtggacgcggaaggggactccgggcgcgccctcttcttcctcttcctcggtccgaggccggagagatcactcccgcgccgtcggcctctcgtcactgcgccccgtcccgcacggtagtgtctctctccgttcttcctcctcgctccatctccttcccctagctttcggtagtagcttgagtagactccccgtagttagccggtgccgccccgaccgttgccgtcgctcgccgtgtgctcgccgccgtcgccgcccgagctccgtagcacccgctcgtcgccggcctcgctcggcgtagttccgcccaatccgacgctagcgtcgagttcccgaagccgcgtagatgctctcaccgccgggaatcggcctctcgtgacctcgttgccgttttcctcctctcccgccgccggttgccgccgccgcaatccgccgccgtcgagcaacctccggcgaatccgagccgttggctcgtctcccctcgtcccgtgcaaccgcccggtgtgctcgcttttgcctgtatcaccgtggttcgctccgccgctcgccgccgccacccgccgtccattcgcggccgggtcgtcgtctacctcccgccagcccacgtggccgccacgtaggcgccacgtcggcgccagctcagcctagaccggatcgagccgaccccggtcagtccctccccgtgcgcgcgttccaccgcgagccgtgaggctgcgcgtgggcccgccgcacctgcgtccaccgcagaccgcgcgcatgcaccgcgtcccttccccgcccgcgcgtgtgcgtcgcgtgctctctccgcacggtgagccgagccgctgacaagcgggtcccacccgggaccgcgcgtggtaagcccggtccaccggctctctctctcctccctcccgcgcgcgtgcgagtttgggccgccttgggccggccggcccatttagctcggccggaccgctccatttctcttgggccgcgccctagccgtccgagaaaagtctatattccctccctcccttcttttctttttcttttccaaaaaggatttaattaaatccttttcctttagatcaaaaattcaataatcttagaaattcaatatcttcccaaccgtaaatccgtttgactccgttcaacttccaaaattccgcaaatctcgagatctatctaatggcccgcttagaggtcattaatagggcttaattttcgccgtttgttgagttgttccgtttcgcgtgtagttccggagcccgaagacccgcagtgcgaggatttcgaggatcaagctccagatctcgagcaaggcaagccacctttgaacatcttgagcctatatttgaaatttaattatgttgcttgcaaaatattatgcattgataggatcacacttaatctgtttgtcccgtctgcaaggcagattggcggacctacctaatttgtcgcatttgatccttcctttgttaattgctataccatgtccccttgtaaccacccagttgcgcctcgatactcgtgcactctgtgcaagtatcgacggtcgccctcaaacttaaaatctgagtaacaacttgggtaaaactggagttttacaaaagacttggaaaacccgacacctgggtcggtgcttgcgaactaaatgaatttccaaaaccgcggaccggggaacgtaccgggtgtacggtttcccgctcttgcacttaaggaccgtttccttggaaatttcatccgaacataagacaagtacgaccacatgggtggaatgggacgcccctggctgagtaaattgctaatcgggggagccttgatgccgagagacatgtggattcgccggggtggtgtcggagaggacccctgggcttcctggcacagtatggtctgggacctaacctgttgttggtctgggacccctctcgtcggcatatggtaaacctgtgtcggctttcgaaatgccttgtcatgaaagcttggaggtctcccgacgtggctgatccccacgggctggatgatccgggttagtaatgtcatgtgggtaaagtgtaccccctctgcagaggtcattaaactgttcgaacacccgtgcccacggtcatgggcggatgtgaggtgattcctagcgtagttttgtttgactactgcttgtgaaattgctgttgtgaaaaggggttcgatgtttgaaaaatctgcagctgatgggatcagctagcccgggtggccgtttgaaaagttgttggcccgggtggccgtttgaaaagctgttggccgggtgccaaccgtgttgcaatcctaaagattgatacattgcacatactccgaccggacgagacgcattgtctcatccgtgtcgtttgagaagcacttagttgttttcagaaaagagttcaaataaaatcaattgcaaaaacagcagccttcccttgaagcctgcattaaacacttatttcccctggcttgctgagtactcccgtactcacccttgctctatataaataatctccccccagttgctgaagaagatgaagtggatcctgctgacgaggagttcttccaggagcaagtcggctacgatgagttttagggtttcggcctagttcccaagtcgtgcctgtgttgattggtccaagtcctggcttccgttttccttttgtaatgcagttgtgagctcgggatctgtccgcagcccaacatgactatacctctactctataataaagagacctctgttgctgtgatattctgtctccctatgataccagcactgttttctgggactggtatcgattaacaggttaaattggagcgtcacgggctagttccggtcgggactagttcggggcgtgacatccggttcttacaaagattctgtgtcaactactccgatgggatgggtactaaaaggtgctggatattcaataaaaactagcacctatttgaggaaaaaggtgccggtcttttgaaatttggcatgtggacggacgcgtgggtgggcacgtgagtaggaaagacgctatagctaggtgtcgattttaccacttccggtggcctttagcgccgacatctatttaatgttttgtagtagtgttcatcgaaaagaatccttctgttgaggtatctttcccttttcgtggtgtcctagatttgttggagcagggattggtcgcatggtttgtggtgattaatttgttcttttctaggtgctgtctgcgtaatgtactctctgctgatttttttttctctttcggtttggtttgttcttcgtgttgttgtttgcagcaagaatcggcggttgcacacactggtggagaaaccgtttggagtcccgattagtaaccccgtctccttgcaagaagtcggggtttctgatcctcgccccgaacatctctctactgttggagctcatttccatgtaccgttcatggaatttgtacatctgtgtcggtagggactccagctgttcaggtttgacaagcggtttaccgagttcaaacttgtatgccacttccgccttcgggattggtgcgcctccaaccaactgatccacagatagactagtgtctgcaatgaaatccgttatgccaaaatcttcgccggtcaccaacggctcgacctcttggtttggttgttctccaagctgagggactggtttggacttcttgtgataggctctctgaagtgttcggtcatagtccgatatctgtaacgcctccttgtttgttttggacattcccttgaagaagttcttcacgctcgggtcaataggtatcttcttttcagtactccgaggcttgagttgcctcttcacctccctgccgcataagcatcaagctcctcttgactgcaatcgtatggtggctccttgtttttggtggcgtcgactttcgccttcttcgttgcccttgtgcgggcaggcggtggagcttggcaagaccttgtcttgggaggtgcaggcggacacggtggaggcggaggagccggaggagatggtgcagcaggaggtggcggaggagccggaggagatggtgcaggaggacgtggcggaggaaccggaggagatggtgcaggaggagatggcggagccggaggagatggtgcacaagacgccgcttgtcgcccaggaaggatgatgtaccgcttgcgccatagtatgatggcgtggcttgtgtctcgtagatgcgtctcaccgtcccctcctgggtagtccaactcgaggtcctcgtacgcggcttccaccagctcaacttcgaccctcgagtatcctgctggaatcggcctgcagtggtaagtcccggaagggtccgttgggatggccattcccgacgccaccttcacgtgatgagaggttatctattagtaatcaacctaagcagcaacttgcggaatgtacaagtcaaaaatcatcaaactacgagcataccttgattgataagttcttgaagggaatatgcaactcacatggtgtccgctgcgtgatctcatcaacagggcaggtggttgcgtcctaggtttgcacggcgtccatgctctgtgatccgacctgccccgttgaggcgcagctgctacgattgcctgatgtgctgaccattacaggatgaatgtacggctggggatcctgggaccgatgtgcggccatacgttcatccaccttccttgccacctcctcttgcatgctgagctcgtagctcaataccctgtactcaagatctgcaatcttcgcctcggtatctctcttgctcctcatccgactcctgtacgtgtggatgtcctccttaaatccaatcttctagggaatcacgcctttccctcgtgtttgtcctggatgctcgggagtctgtagggcgagtgacagctcatccttctctctgtcgggtcggaatgtgccctgagaagaggccaccactgcgtccgttagtcgactggcagcctcgcatatctgatcgctgaagacaagggagccatcaactgggttaagcgttccaccgtgagcatagtaccagaacttcgatcgatccggccatttagcggtggccggttcgatacccccctcaagcaagctagcctccatctcctcccacttcggcttcgcgacgctatatccgcctgaccccaagtggtgatggtacttcttcttggcggcattttccttgtttctggccatcatctcttgcccttgttgccctgtcttgtaagcaacgaactcgtcccaatgatcccttagctttgggaatacgtcgaagttcggtgttagtcccttcaggatgtatttcttgtagagatctcccttgaagctctagaactgttctgccattttcttcagagtccactatttcactaagttatccgtacccgcgggtagcgtgaacgtctcgagcaatgtggtccacaacatctctttctctgagtccgggacaaagctgtcatcatccccgcgtgcccttgttctgcgccagtacaccgtgctgacaggcacgttgtccctcacaacccaaccgctgtggcgtacaaaattcctggctgcttctgccggggcactaggtcggccgtcttcgtccacctcagttatgatgtgccgaccctctatcttcttcgcggcacctcgttgtccgcgtgccctcttctgtccagcagagggttgacttccattagcctcctccgcatcgttcccctctgcatccctctccacgttaccctcctcgttccaatactggctgcttccctctgcgattgtttcgtatagtatctgttcctcatcgcgatcagccatctgtgcatacaaaaaatatttgttaggtatataggatgtatttgctaaccgtaatattgaaactctgctaattttatattaaatctctaataatcttatattaaatggctactaatctcatattaaaattgtaataatcatttatatatgctaagtctaacaatcttatattaaatctctaacaatcttatatttaatctctaataatcttatattaaaattgtaagtcatatatatatatatatgctaagtctaataatcttatattaaattgctactaatctcatattaaaattgtaataatcatttatatatgctaagtctaacaatcttatattaaatctctaacaatcttatatttaatctctaataatcttatatttgaattgtaatagtcatatatgctaagtataacaatctcatattaaatcgctactaatcttaattatattaaatcgataacaatcttatattaaaagtgtaataatcatgtatgctaagtgtaacaatcttatattaaatatctaacaatcacttaattacatcacttgcctgcgcgaattccttcgatggctagctaccacttcggcttgagggacgacgccgacgtcttctctgcaacattaccaggaaaatgtattagtctaaacgtcttctctgcaacattaccagtaaatcgtattagtagaaacgcgttcgttctcacacatttagtacaagtgcattcatgttcgtaagcgtttcgtgcacgttcgttcgcgttttgtaatcgtattgttcacgttcgttcgcgttcgttaacgtttcgttacgttcgtccgcgttcgttaacgtttcgtgcacgttcgttcgcgttcgttaacgtttcgttcacgttcgttaacgtttcgttcacgttcgttcgcgttcgttaacgtttcgttacgtttgttcgcgttcgttaacgtttcgtccacgttcgttcagcgcccgttcaaaggtcgtccacgtatcgttcacgt

SEQ ID NO: 24334 - DNA, 9089 bp, Oryza sativa
ggccgcgtcgatcgaagtcggtcgtcggccggccgtggagatcgatcagagagagagatcgagatcgagatcaagagagagagagaggcagcggcggctctcacccaagagatgcggcggcggcgtctgcggcggaggcggcgaggaccaccaagcgacggcgagaaacgacggcggtgtcggcgcggggttgccctaggcacggtggcggcgaaggagaggccgatcaagatcgaaaaacggctaagtgttggtggagaagacgagggcgcaccgggaatatatatacccccggatctttagtcccggttgttctcaggaaccgggactaaagatcttttcccgctatttccaaattctttttaaacccggttagggttaggaaccgggaataaagataatagcagttgtgtcttcaatttcattgcatatgtgtttctaaaatagtaaataatgcattacaattatttaaagtcgaacaattaatgataaaaccttcgaaaaattattgttgtacgtagtagaatacgtggataatatataataagcacatgaatgatttaaaattgttaaaaattctaattaacataatagcacatgcatgatttaaaattaatacaaaatctaatatcatatataactagcatatcatgatattaaattgataaaaattctaattaacatatgtaaataccacatgcatgatttaaaacctttagaaattctaataatcatatatatgtagcatatggatgattttaatttgattaaaattctaataatcatacataattaacaaaaaatctaataatcatatataactagcatatggatgatttcaatttgataaaaattctaataatcatacgtattttacatatgccatacaacaattgattagtatagatattcggtacatccaacatagtttacatcgtgtacagaacaattacggcaatacatcggcggtgacggttgaccggacgtactttctcctcactattgttcattccttgtgatcgctacgtgagtaaggggtgtcttcatttgataggaggatgctagggtcaattgtcatcgtgaaaggggttgcccatcaaactgatcgtaatcctcgtcagtcttgtcctctaatccgacgatttttctttttcctgggagaaccacgtggcgcttcggctcgtcagtcactttgccctttttttctttgctagacatgtccttgacgtaaaaaacttgggttacatcattggcaaggacaaaaggttcgtccgagtatccaaccttgttaaggtcaaccgttgtcatcccactgtcatcaatcgttacgcctccaccagtcaacctaacccattggcaccggaacaaagggaccttgagaggtccatagtcaagttcccatatgtcctcgatggcaccgtaatacgtgccagttgtaccatcgtgtcccatggcatcgatacgaacagcactgttctggttcgtgctcttcatgtcttgggccctcgtgtagaatgtgtacccattgatttcatatacctggaatgtcgcgatcgagccagatggtcccctcgccaggaaggccagttgttggttaatcgtctcattacccatgagatgttgtcgcagccatgtggagaaagtatcaatgtgatgccttgtaatccatgcatcggacttaccgatgtttttggtgcaaactagagccaagtgctcctcgatgtagagagccaccaatgaagattgttgcagaaccgtgaaatgggctttacggaataaattgttgtctaacgtcattattgctttctttccgagagtcccctttccccgtagtctcccttcatggcgtgattcaggtatcccgattgggcgaaggtcttcgataaattctacgcagaattcgatgacctcctctgttccataccccttggcgatgcttgcctctggacgagcacggttacgaacatacttcttcagaacgcccatgtacctctcgaaaggaaacatgttgtgtaggtacacaggaccgagaataccgatctctttgacaaggtgacaaagcagatgcgtcattatattgaaaaatgaaggtggaaatatcaactcaaagctgacaagacattgcaccacatcattttgcagggcttctaatctatgaggatcgatgaccttctgcgaaattgcgttcatgaaagcacatagctttgttattattgcccggacattgtctgggaggataccccttattacaactggtagcagctgtgtcatcaacacgtgacagtcatgagactttaggtttgtgaacttcttctccttcgtgcttattattcgctttatattcgtggagtatccagacggtaccttgatgctctccaagcattcaaacgtactttccttctctgccttgctaagagtgtagctggctagactcaagtaatggcttcctttctcctttggttctgggtgaaggtcaccgcgttgttccatatgctttagatcattacgtgcttccagtgtatctttcgactttccatatacacctaggaagccaagaaggtttacgcaaagattgttagtgaggtgcatcacgtcgattgcgtggcggacgtccaagaattcccaataggataactcccaaaatatagagttctttttccacatcgccgcgtgaccatcttcgctctctataggctggctgccacgcccctttccaaacactactttaagatctttaaccatagcaaacactgtttttccgctgcgatgtttaggcttcgtacggtggtccgccttatgttcaaagtgcttgcctttcttccgaaccggatggtttgctgcaaggaatcgacgatgacccatgtacacaaccttcctacagtacttaagatacgtactttctgtttcatccatacagtgagtgcaagccttgtaccccttgttggactgcccggataggttgctaagtgcaggccaatcgttgatggttacgaacagcagcgctcgtaggttaaactccttctgtttgtcctcatcccacacggggacaccttccttcttccacaacagtttaagatcttcgaccagtggtcttaggtacacatcgatgtcgttaccaggttgcttgggcccttgaattataatcggcatcattatgtacttcctcttcatgcatagccacggggggaggttgtagatacatatcgtaacgggccaagtgctgtggccgctgctcatctctccaaaaggattcatgccatccgtacttaaaccaaactgtatgtttcgtgcgtcctttccaaagtctttaaattttctatcgatgtttcgccactgcaaaccatcggcggggtgtctcagcatcccgtcctgttgacgctcttcagcgtgccaccgcatcattctagcgttccccttgttcctgaacaaacgccttagccgtgatattatagggaaataccacatcaccttagcaggaattctcttcttcgttagctgcccgtcaacttctcctggatcatctcgtctaatcttttatcgtagtgctttgcaaacagggcatgcttctaggttctcgtactcctcaccgcgatatagaatacaatcattcggacatgcgtgaatcttctgaactttcagtcctagagggcacactatcttcttagcctcgtacgttgtctcgggcaacttgtttccctccggaagaatgttcttaacgagtttcaataaatcgccaaatgccttgtcactaacaccattttttgccttccattgcaagaactccagagtggtatccaactttttgtgcccctgctcgcaacctgggtacaacgacgttctatggtcctctaacatcttgtccaatttatgggcccccttttcactttcgcaatcctccatggcgtcctgcaacatctgaccaagatcatccgcaatgttgttaccatcagcatccctttcctcctcgcccgtttgatttcattcaaatccagcgtactgagcaaagtccggaatattgtcgtcttccacttcatcttcttccatttcaacaccttgctctccgtgggatgtccaacaattatagcttggcatgaaccccgactcaaacaagtggaaatgaatagtcctgcatgcagaatactccttctgattcttacacttattgcatggacaacaaataaaacccttttgcatgttagcttcggccactctcaaaaaataatgcacgccgtcaataaactctttggaccaccggtcagcgtacatccattgccgatccatctacataacatgaaaaaaaatcgtacacacataattattcgtacaataatgacagtcatacaataattataaaataattacaaactctttcaacagtcacacaataatgacatatcattattcctacaaatattatgaaatattacaccgaataattatatatttactatttataaagttttaaactaatattaatgtgttgtacttattttaatttgtcattttactttgttttctattattcaagattaactttcactatattttccttctcaacttttttataaaaccttctttagcaaataaactaaatttctatatattctttattctccacacaaattttctctctcatcaaataacaacaaaattttggtcacaaaaatgtgtgcaaaacatagctccaaatgtaatatgaaaaaaaaaacattggaggatgaagttgctaaccttttaggcacctctgatttgtatataatcaccaaaataaatttactagaaattttggcatgacctcccctcttttttgaagaaattttgaagcttgctcgggctgaaggaggaagaagacatttatataggggtgagactttagtcccggttggtgttatgaaccggggctaaagatcgctgtgatctttagttacgatctttagtcccggttggtgttattaaccgggactaaagatcccgggggacctgacaggcccttacagcatttgaaccgggactaaagttacgatctttagtcccggttggtgtagatcaaatatgcccgttaccctttttaaccgggactaaagatgatctttagtcccggtttttgttgcaaccgggactattgtggaattagcccgaccgacgaaagatggtttctccaccagtggcagttgcactgccaagattgttacacctttgctgataatagccgaggacaatctcgtcggcatccatggcggccagcagctcgaaggagatagtggacgcggtggagaagtggatggcgttccccatctccaccgccgccggcttggagatcgttgccgaggagggctctagcggaagcagcgcccagcagcagcaggcttggcgtccggtggcggcggcgtggtgcgacaacggcggcacgtcggggacgggagcggcatgcaagtcgtcagtggacggcggcgcgcggcggcggccgcgcgtcgtaagactggctgccgcgtgggtgtcgctggaggtcaaggacgcgctgtccagcctgcagcagacgttcgtcgtctccgacgcgacgcgcccggactgccccatcatctacgccaccgaggggttcttcaccatgaccggctactccctcaagggagataaggcgcaagggcatttcggtccaaccacattaaaaaagggctcctgaaccgccacgtcagcatggcaagtttcatttagacggcacggtgctcatcgataaatatctatggttatgtagtgtctttcccccaaagctttgtttttcggtgtccctaggctaaaaccacacaactgcgatgccgcgtagaaaaatttgccttacttattatagtaagtacgaatatggtactgtatatgttatacatacatgaacgtgattaatttattcatataaatatatatctgatgcgtacattcatgtagtagtaagtatagtgtactagtaagggcgctgatcggggaagttgccgggcgggaaatagttgcagctgatgatgacaccgccgccgttgctgcaggcggcgcgcgcgcagccgatcgacgtcgtgctccgccacaccacctgcgtgtagtggccgcagtcgagcagcgcccccctcgtgcacgtgttgctgctgtacacgtagtccgccttctcctccatccacaagccgaccgcgtccgccgccgtcgacgcgctgccggcgccgcccatgtacaggttctcgccgtagcccagctgcacgctgttcgagtggtcgaggctgcaggtggcggcgagcaccgccacgtagctctccgcgaacgcctgcagcgtcgtgttccacaccacgtcggggaggccgacgccctcgccgcggcgggcgtcgttgtgggcgtcgacgaagtcctgcggcgagctctgcgccgccgccgtgctggccgccatggccagcgtcgccgccgccagcagcacgagtgcaaaggctttcgacgccattaattaacagagaagctcgatccagcagatgagtttctcaagctaattaattaatgtcttgtgctgagacttgttgcttgctgaggtatttatagcagttaaatcatgagagctatagctaagctcgattacgagagatcgaggttggaaagacactttagacttggtcctgcactgtcacgttgcttctagtagatgttaattacttccactaaatataattaagtggtcaattgtcgcaaactttccatgcatgtattcacactgtactttaatagtctttggcacacagctcagctgcatactttcttcatctgggcaggtagtgaatgcaacttgatgtttatttttctggcttatttatatatcctatagccaatagctcaacatgcattaaaccacataattttaaaaaaagagagccatatattggatcattcctatgcttaatccattttgtagctactattcatcactaattagtaaataacttagcattcagtgatttacttagctagcgtagaacgttattactgtaaagaagttacaccatcacttgacaacacattggatgacacttctatagttcatatcagcgtgtatatataatctttctcgtatgtacgtattgaaattttacaactgcattgcacacaccaatattccgtctgcactgcacggggtatcatctagtattctagtgtgtgtgcatatgtatccatatcacattatccgaaaatgtgtctttcaaagttgtgatggctcccaaccaatgatggatcataaccgggctacctcggccatagctcaaggcctaagtacaggctcatataaagctatgcacactacgccgaatcaggtcatctctgacggtattcaaaccgtcacctttgacgtgttttggtcctagtcagagattagtggtcgctgatgactttactcacatttgacggaggacgttcgtcagaggtaaccgtcaccatttttttccacaacactccacgaaccggttgagggcttaacccaaagctaggttcatcccttttctaactctaatgcaatacttaaagttacaacaacaatagtgggccctattcataacctggttgagaaatatcaatatacacacacacatagagtaaagatacccttaattagaaataaagcttcgagtaacactgacatagccgatgacaaggtggataccgtgacagatatggtttctagagaatatttttctttttcttatctaaagaattaaagaaatggtaaaaaggtagtttctttcaagattaaaattaaggatcataccataatatatgcccagctggaggcacaagatataacgttgagcatgcacagaggcaatattaatatttggcacgttgcaatgaactttccaatgattttccttggccttttcctctcgtgtagccgcatattaattacctaactcacgaagacgtacgtacggttctactactacgtgttatagtacgtacgtacagcatgcgagagacgttggaaagactttgactggtcttgtactgtcacacgtttacctctagtatagttttttgagtaaaatacagtagcggcccttaaacttgcgggcggatatcatctaggtccattaacttgtaaatcgtgtaattaggccactaaacttgctaaatgtaccatcgccggtccaaaatgtcatttgaccgtggtcgcgccgacgtggcatgccatgtgcacagctgagctggcccgcaccgtgccttttctcacgcgcaccgtgtgtgtcaccggccacacttgtttttttttcatcgaggcccctctgtttttctcattttctttcgtcatccactgctgcttcgtcttccccggagtgccctagcgcagagtgcagcggagatcgtgaggggggtgatcgccggagaaatagggttccaacggaagcgcaaagaggcgagatcgattggctgttgcggcctcccgccgaccataatcgcggggaggaggcatgattttccgcctggaaggggaagggcctccgttgtacagtgagtataacttcaaaatttcgttcgtccattaatctgcagggttagcatgcactgattgatgttggtagatagatacaaaggaataaggcgtttgttatgcaaaaaagatgttatttttccctgtaggatgattatcctgacattgttctcgagtaggctagaacatgagagtaatacagctaattaggattgcaatgcaggtcctgatgatggtaaattcaccgctgaggtacaccatggtggtttttttgttggtcaaagtagcaacagggcatatgtagatcaaacaataaattggattgaccactgtgaagcaggaacatgggatattgtttgtttggatgaatttttagctatgcttgggtatgatatgactccagattttaaggcttattggttgctccctggaaggactcttgaagatggccttagggttatatctactagggctgactttgaagtgatgaaatcagttgtgcacaaggttaagaattttattatctactttgatcagggtgacacaattgcaggtgtagattgggatgatgtagtagctaatccta

SEQ ID NO: 24335 - DNA, 968 bp, Oryza sativa
taaaatcagacagctctttatttattactacctccatattttaatgtatgacgccgttaactttttgtctaacattagactattcgtcttattcgaaacaattatgtaattatcatttattttattgtgacttgattcatcaccaaatattctttaagcatggcataaatattttatatttggataaaaattttgaataaaacgaatagtcaaacgttggttgaaaaatcaatggcgtcatacattaaaatacggagggagtaatttgtaataaaaatacacaccggatacatatatatctgtatttgtagatactcaatacgtctgcatcatgacgtacttattgcatccaacacactgatcatgcatacgcatgcagatcgatgtgcgtacatatatacatacgaacatacatagtagttcgtacatatatgcgcatatatatctactgagagcagaaagatttatacgtacaatatatactagagtagtagcaaaatatattccatagcatatacgttacgtacgtacgtatacgtatacgtatacggtagctagtacggcctctggttttggacgttgccggcggggaagtaggtgcagatgaagaagacgcctcggttggcgttgcaggcgacggcggcgcatccgacggcggtggtgtcgcgccacacgacctgcgtgtagtggccgcacatggcgccgccgacgcagctgttgctggcgtagtcgtaggagcccttctccgccacccactggtcgacggagctcgccgccgtccacgcctgcacggaggggttccacgacaggttctcgccgtactgatagttgttgcgatcggagtgccgcagcgcgcagtcgccggcgcgctggttcgcgtagccctgcgcgtacgccgccaggttgtcgtcccacgacagcgccgggacgccgacggcgctccgggcggcgttgtggatgttgacgat

SEQ ID NO: 24336 - DNA, 805 bp, Oryza sativa
cattctaccaccgaaagtgcgtcacacgatcaaacctctatgcgccttcttcaatgcaattggacagaagggtatagatccagaagatctagatgggttgccgaccgatattgtgaataccctctgtcacctggagatgtttttcccactatatttctttgatataatggttcatctccctgttcatctggtgaagcaaacaaaactatgtggcccggcttttctaagggaaatgtggccatttgaaaggtacatgggagttctgaagtcgtacgttcgtaacagagctaaacccgaggggagcatcattgaaggttacacgaccgaggaggctattgagttctgtgtcaattacatgtccgatgccgatcctatcggagttcctgcgtctcgtcacgagggaaggttgtcaggtgttggcacaatcggaaggaaaagaattaggcccgatcaagcgtcgtacgtgcaggctcattacgctgtactccaacatatggcagaagttggcccatactttgaggagcacttagagaaaatccgagatgagaacttaggacgatctaatgcatggattaacagagaacataattcttggttcaacgaatggttcaagaatcgtgtgacaatgtccacggatgtcccaaatgagacagtacagttgttggggatgggaccgtcttggaccgtagacacatggcaaggatacgatataaatggatacacattttacaccgtcaaacaagatgacaaaagcacagtgcaaaacagtggtgtccgtatagatgcattccaggatcaagttggg

SEQ ID NO: 24337 - DNA, 6249 bp, Oryza sativa
ggatgaagaagtgaccaacataaaagttgtagatcttgatgagaggatcaactttattgttgttgcctttttcatttgaaatcatttactatttacaaatgctgttttaatttgtcatattttcaaaatcaatttcaagctgttgggaacaaagttatatatacaaatgaccaaaatgaaagttgtagatcttgataagctctacaattttgttgttgaccatattttgatttgaaatcatttactatccaaaaatgtattatgtctaataaattgaattattatatagtagctatatattttgcactcacaaatataaagacttgatgggaaaaatagaaaaatagtcatcggtgacgggccttagtttaagcccgatagagattagtctatctctatcgggcattatcttagggcccgtcacagatgagtcatccgtgacgggcctgaatgtcatctcaatcgggcattagtatggagcccgtcaccggtgagtcatctgtgacgggccctacggcaatgcccgtttgagatgactcatcactctactataactagggtttctcagatcggatcaaaaatttttctaagtcccgctacagtttcccacctccttagaaccctagcgccgctgtcgtcctccatcgccgagcccgccgccgtcgccaccagcccgcagtcgccgccaccgagcctcctccgccctccattcggaccgtgtcacgcccgaaaattcactagtaatttccgaacttatttgtgcataaaatcctcgtccaggaatcagccgaggtacacaaactgacaatttaatatacagattcatccaattaactaaaacgataaatacttacttaagaggcacttagtcctcaccatgaagaaaactgcagcggaaaataaaatctagcgaagctccggctccactcccacaggcagctcaactggggtataagccaaacgtcttctccttctagatcctttttcttcaactgaggttgattgattattgcaagaatgagcatatgacatactcaacaagccacacagcaaatatgcaagtgcacaaggataccaaaggatggcataatatagtctcatttgcgaaagcagcatttagcaaagagttaagagtagtaaaacagtagagtaattaatcagaaattttaatcaacactgaacagcacacccatgctgcacaggcccaaccatcctgaacaaccatacccggctgtacagatctaactccaaatcaggagctaagcaaattattaccaggtataacatccataattattgtgagaggtgtgagactaatcacgaaaaacattgctcaacccgcccataaccgcgggcacggctattcaaatagttttactctggccagaggtgtaccactgtacccacaagacacagccccacaacatgtcaccatgtgcctcaataccaccacggtacctcggaaaggagctatgacaataccccttgcacaacataatccaccacagcgcacctttcctggatcataatcacccccttataaacaaggcatggactccccagcgacccccgtgggcttatctccgccacttctcagtctggtgctccacaatgaatcatgctatacaaaaggtaaagccgttgcccacgctggcttgtggttggcacggttaatgtttcacaacagtagctcgcgaaccggtccttaattgtcatgagcacgactctcaaaaccatgtgctcacaacccaccattatcaagttttagttggcaagtaattaattaaccaatcacgattgaccatcgcgagctatcattaagccatcattaaataataatgaaacattaattatcccaatagtgtgctaatgtttctaagcatggctaagcaatcatatctaatatctagctgaaccaatatatatagcccaactagtcaagttataataacccaaggtatcaaggaataaagtaatcaatgcaaacaggccataacaaaggaatagattcacaccacccagtgacattcgaaaataaatgcacagttgaaataaatagagaatttaaatataggatcaacatgctcaaaggattgtgtttaggatctgtgtgacttgccttgcaataatcggtcttcaattaatcttcttggatacttccggcgcactcgtaaaccttcgcaacgacggaaacgacaagctaacacgcaaaacaaagaaaaagactaataaaaaccaaataaacagtacataaaaagtaaacaaacatgtagatcataattttagatgaattatgagacttgaacggcctcattctgacttcaaatgaatttattaagaattttactagattaaatctaattaaagcccatttaaaaaggattaaataaatttaattcaatttatggataattttaatatgtagatctttattttatacaacttttgcaacttgaaccacataaaactgagttacaatgaattagttatgaatttttaaagattaaatcggattaaaacacttatatggattttaattgaattatgacgcaataatgaattattttttaaaaggaaaagggaattattgcgtcagcggctagggtttgcggtggaccgggtgcacggcggcggctcacggaaatgaacgaccgagatcgatcctatccaaaacggacggccgagatcgaacggtccatgactgggccacgacggatggtcccgatgacgtcagcggtgacgtcaccaccggcggcggctcgggcttgcaaactcgccggcgaacgacggcgcggcgacgcgaacggagggcaccagcacgtagagagtgacgcggcgaactcaccgatgaccaaaacgacggcggaagatgaacggacggcggcggcgtcgaggaaaagacggcggcactcttcggcttgacgacggcgacagtgctccggcggtcttcagcgacggcgaaggggtggacgaggacggcgacgcgatggcgaccacgatggcaaccttcccgagcgatggcgacgactggagcgacggcgaagcacggctggagcgacggcgacgactgcggtacgaggtctcacggtgctagggcgcttccgacgacgagagacgaaggcgagggtggcggcgggtagcggcgacaccgggggtccttttaaaggggctagagagcggcgacggaggcccacagtgaccggcgacgagaaggaaaggttagggttcggaggaaaaagaccgatccgattcgacctcgaatccacgaacttccaaagcgaaaaagacgatgattccaaaagagaaaaggtagaggagatcccgaagattgtttcccctcaattgatttcaccggagaaggaaaggcgcggccgaatttggaaggagacgacggcggcgcggcgctagggttcgggcggcggcggcggcgcgaggaagacgaagactgacaggtgggacccacctgtcagcgagagagagagaaagcagagcggcggctcggcggactgggccgactgggccggggaggagagagggagaaggaaagagagacttgggctgactttcggcccaaaaccaaaagaaagattttaaaacctttttctatttaaattattcatgaaatgcaattccatttattaaaaatacttccttggctcaaataaatcccagaaaaatctaggaactatagaatcaagtaaagtatttaacaaaattttatctagcccaattttatattgagatttaacaaattaaaattagatcttctcttttaggcttttaagatcatttctaataattccttttaaacaacaatttataatttaaggatttttaaacaagaaaagctcttaacaatgataattagatcattaatgatcaaataattactgaactgttctttgtatcatttaggaattgagctccgaaaaatccgagaaaatttcagagagtagacttaatcatggagaatttaataaaaattaaatccatccatgctttatatttaggaaattttatttcccacatttaacttcacttgtaaattaatgaacatttaatataaattctaataataatttattaaataatttataaatcctgaaacgaaaatcaggatgtgacagaccgccgccgcctcctcaacgacgacccctaccgagcccggcgacatccttcctcatcgtcgtcgcctcctcctctccgacgcctgacgccgcctccaccgagcacgccgcggcctccaccgaccccggcgacgccctccaccgagcccggcgccgccgccgccaactcctccttcgccgactcctccctcactgagcccgaggccgccgccaccgaggcagccgcctccaccaagcctccgacgcccgacgccgcctccatcgagcatgccgccgcctccaccgagcctgcgacgcccaacgcccgacgccgacccccaggtgagtcctccatcgcgcatgaatgatgaatagatgaatgtggttcgattgatgaatgtgatgaataaatgattagatgaatgtgtttgaatacttgcatgtgtgtggatagatgaatgtggatgaatagatgattagagaggaatgcggatgaatagatgaatagatgaaatattcaatttatttatatgtgatattcaattcattttacatgtggatgaatatatgattagatgaatgtgtttgaatagatgaatgtttatggatagatgaatgtggatgaatagatgattagagatgaatgtggatgaatagatgaatagatgaaatgtttaatttatttttatgtgacattcaattcattttattactgtgagatgtgcaatttagtttatttatgtgactaatagattttagaattttggattcttagccattgaagcactaaatagtgtattttcgttatttagaaaaaagtatacgatgtcttagcaaggcgaaccattgtcgacgacaactagtgggtcctcaagggcacgtactcctaggacagggaacaaaatccctaaggaacggttccgcataacagtggtggacgccgtagggttgccgacatctccaaggaaaatattgagtcgatttaggtctatctgcggggtcatagggaggcagaagttcaatattctgcaagatgacatcaagcacgtgccggccgcagagaaggacattgcttggctaacgttcaaggagagcttcgattatcctgcggagcatgaggaccgtctcaggcgggctgctttcaaggttatgggcaacgcttgaaagaacttcaagactaagctagtcggcgagttcgtctacaacccggcgaatccagatccaagagagaaattttcttggatcacggaacaggtctgggaggaattccatgcgaagaagtcgacccccgagtccagagctagtagcgaggcatatcgcttgctccagaccaagaaccagcatctgcatcggcttggcaccgccggatatgccggtaaggaagaggaatggcagcatgaggatgaagaagcggaggaatcgaacacgccgcttgtgtttggcgatatcccacacccttgggctaggaactgggccagggccaggtaccagaagaaggatgatggcacaatcttcatgccaaatccagaagatcaacgagtgtacgaagctatagtaagtgtctagtcaaactagatgtttgcaaaggttccgatcatgcagtttatttaaccccactaaattgtaatgcagaaggagttggttgccgagcaacaagcctcgcaagaggtctgctctcgaagacgtgaggatgacctcctcacgaaagcgttgggcaacaaggaacaccgtggacggacacggggcattgggtcttctgttccctggaagtatggattaccagactacgcgtggcagtacaagaagcggtcttccaacaaggcggagaaagatgcacgccttgaagccaagatccgggcgtcgataagagctgagctgacatttgaattcgacgaaaagctcgagtcaatgagggccaagattaggcaagagatccgagaagagcaacagaacacccaggccgctgctgttgctgcgcacgaagagttaggaagtcccacccaaaaacacagcagctacgcatcaactgaggtggcggaaaatccaacatcggtggacaagcccggtggcccacataccggtaaaagtttggtccccaaggcatgaaagacttaacgagtccatatgatatataatattctta

SEQ ID NO: 24338 - DNA, 4949 bp, Oryza sativa
gtaaaagtttcgtccacaatgcatgaaaaacttaccgagcccatatgatatataatttttttaaaaaatcgctaaatctatcgcaggaaccaacgagctgcaccctcacagttagggtgatgccgaccttcacggttccagcagccgagggacttgcgtacaagtcgaccccagagacaagagtgcatggagcgcaactcaggggcgactgtgcaaaagttcaagtcgactcggtgaagccggaatatgagctattcccactaaagtatccaccgaacgacgaggtcctctcactaggaaatgcccgtggtaccttcatccaatggcccaaggacctcattgagatcaaatggcccaaggacctcattgagatcagggttacagcgaggccaaccactgcatcaggcagtcgtccaccaaagagacccgcctctgctccttcagcccctcctgctcaagatcgtcatgcacaatcttacgatgtgcagttgcagtacgacacggattttggggatgaccgaacggaggccgacagcaaggcgattcatgaacccccaccgatgaagaagagcgggaaggcacactcttcccctcagagaattactctcgataaacccaaagcaaaggggagaggaaggggaggaaaggtgcagtcctcgcttctagctccaagaaagctagatctgggcaagggccaggaagagactaagggcaaagaggtcaagaagaaatacgtcgctccataggggttccaactaggcatgccattggttggagatgacgtgcttgccgcaatgggcaccgcttgcaaggaccttcacgcatactacatggagaaatctaacgccaggaagccgaataaagctactgatatccttggagagcacgatggaaagtcattccttgatccaacaaattatatcgtcgtcgacttcaaggatctattcgacctctacagactccgagcggttgacacaagcctccttaagtgctactccttgtaagtattgtcgcccaactcaatctggtaataacaatcggattaactagcttacaagatcgtttatcctgtgtgtaggttaagttggcaatggtgtcagaagaatgcaccagaagttgccttccatgatccacaagtggtcactgtcacaaatctccagaatgaccgtcaaggaatgatcaactacatctacgacaccttgtggtcctgccgagacaaggagtacattatgtgcgcctataatcaatagtaagtgtgttatctaaatatacacaacagcatgacacattccttcagtacttaattaactttcactatattaatgccacagtcccattggatccttctggtcataacacctaagtggagtaaatgtcactacctaaactccagaattgataagaacgcatatgattggaccccaattcaactagcgatagatgaagcgtgggcccaatacgtgcaaagaggaggcctcaggaagacaggacatgacaccctcatccacaaaaaagacttcctggtgaagcaacaaataggtgaccagtgcggattccatgtgtgccacaacatgcgccttctgtacagagaaaaggtgaagactttggctgagtttgaggtcggtggtctcaattctgatagactaactacattttagtacttatatatgatcgatcaactaatctagaattatgataatgtagggtacaataaccaagtctctgcctaccagctttgaggaggttcgcgaggagatagccagcttcatcctccgcgaaataattaacaccaaaggaatgtttaggcttaaactaaaatgatgaacaatgttgaacttatatgtttaggcaatgatgaacacttattatgcaactgtgatgatgtaactgtgatgcttatatttatgtatatatttcatatgtttatgttaagacttgctaaataaatatttgatccaattaacttggttttgcaggtgaaatatgataaatatttgaatggatgtgaaatatgtgaatagatgtgaaatatgagatggctgtgaatgtgtggttgtgtaaaatatattgatgtctgtgtatgtgaatgcatatgtatatgaatgggtgatgctggggagctggggatattggatatctgtgtttgtttctgtcatttctgcagtgggcatggctagcaaaggcctgaggctagccaaaaaacaaaatttattttttttatggattatagtcatctgtgacgggccataactaaatgcccgattgagatgatagtcatctgtgacgggctctagtttacgcccgattgaggtcagtagtcatctgtgacgggctctagtttaggcccgattgaggtcaatagtcatctgtgatgggctctagtttaggcccgattgaggtcagtagtcatctgtgacgggctctagtttaggcccgattgagatgagtatcatctgtgacgggctctagtttaggcccgataaaggttagtagtcatctgtgacgagcactaattgtggcccgattgagataggtcatctgtgacgggctatagtttgactggtcgtatgggtcaaagctatcggtgacgggctttacttagggcccgattgagatagattcatccgtgacggccgtttgcccgattgagataactcttcacatcaatgacttctagcctgtgacggacgttgtgcccgattgagatggggcttaccgcccgattgagatgagggtatccgttctagtgtatcgcccctcccttaaacataggggagccaaggctgattaaaaggaatcaatcaaaagtgtttgcattggtcatataaacatcctctcaaaagtaagtgtttgcattggtcatataaacatcctcaaaagtgtctctacattggttgaaatgtctcaagaaaataccttttatatattaggcataaaagatgcctctataagataaagttaataaaatatgctaaaaatatctctaaagtatatatagagtaaaaatattatatgtaaattttaaattgtttgtactaagtgtctctgcacattgtaactcgtaattttagaggcaatatgaaaattgtcaaaaacaaaaatagatgatatgaaaattgccaaaaataaatatgtatcttcatggtgaagcgtagcttaactggttaagtttcttgtgacggaaccagtccacctaggtttaagtcttagatttgacacaggtgctcgcatttacagctaattattcttttggtggtaggcgacccgtcgacagcgagatgcctatgttaactttatctgtaccttaagatacgctggcccatatgggtatagtgttttttcataaaggtgagtgtacgcgtattataaatgcctgcatttgtactatatttaaagaaaatgtttttacatggggttgtttttagtgcctgcatcctccgagatatgcatcttgcacaacacttaatgtagtaatacttcaaatcttttgtattgaatgtagtggtttaatcacataatccgagatcaaccagatgtgtcattatggacaaccatcgaaacatcagttacaattctttaagaactggctacgccgctgattctgaaggctcacctcaccactgcagcatgtcttatgaagtatgaaaaatcaaacggaaataatgaggaaaaaaagacaaagacttctcacaaatgatgcagccacctgtgtttttagtgatatagagaaaatatacaaagtgttatcaacacttgctcatacaaaatgccatcgataaacatgagttgtacaatatacatgctatcagacaagtgtatatatttactttttgacatcaccattatcaaatttatcaaaaaaaattaaccaatttttttgtgaaaagtatgggtaaaagacaaaccatcacaaatactgaacttttaaaagttgtattcttttagtcatggtataccaacatggtttgttcttttgcaaactatagttacaaaaaccttccatattcgaatatctaaaggaatagaaccattcaattcagcaattttcaaaaaaaaaaaaacaaaaagaacttcccgtatatgaatttcttagaaaacttatttaaatacatttttctatcttataacagttagtttatttgtttgtgcccatgaatagttatcaaaaaccaactatctatggagcctggtttgcagtataaatcatgcatggatccaccagatccactaattctcaaacatggactcgtccgctaagacacatgcagcaagttaagtatgagtacataaagtatgattgcgagacacatgttttgctagcgaaacaacaagatacaaacttgccacacagcaaaaagttcaaagctcctttcccatataaacaaaacaattttgtccatacttatcgcataaactgacacacttgctcagtgctgcccggtcgctctgtccgggggcgacgcgggcggcgaacaagccgcgccgtccccgcccttctcttccccccccctcccagcctcgccgccgcccgagccgccgccggcaaagccaggcggctgcaagtacggcggtggcggggctctctctccctcgctcgcggtcaagacggtcgggacatcggcacggcaggagctcagggcatggcgtcggcgccgaccggcggcgtccagatccagtgccgtggtgcccggatccggtcccccagcgacgggcggcggcgtcctggtagctcggcggcaaggtttggcggtgggtttgggtggtcgacctggcgggagacgctgccggagctggctccagtacccgagcacggcggcgcggccagacgacgggtgcagcggtggaggtgccgagagaacccgtggtgacgtcggtgatgcgggaggaggcaacgacgcctctaaccaaatctgctggcggcggttgcggctgccgacggcggcaatgac

SEQ ID NO: 24339 - DNA, 4459 bp, Oryza sativa
aatgtggcgaccgtggacgtggctgtggcggagcaggtgaggatggcgacggcgaggtagctgggcgttcggcagcggtggctgcggtggcggtgaccacggtcaccggaggcatggcggcttcggacggctagctgagggcgtggcaaacggctgcttctggctggcgtggcatcatttggaggaggggtcggagactggctcggcgcgagaggcgcaggcggcagagatggaggctgggttggcgcgagagacgtagccgatggagagaggccggattggcgcgagagacgcatccggtggaggagaccggcttggcgcgagaggcgcggccgacggtggaggaggcgacctcggtgtgaggaggagctaccggtggatgtggcatgatcttcggcgcacggagcctggccggcaggggacgctggtgctggggtcccacatgtcggcagagcttgagtggtggtggagcatcggtgcgtcagccatggattcgcaggtggtgagcggcgggtgaaaacctagcctggccttagctggaccgacaacgattgttcattccccctcttgagggcgttgtcgtgctgtctcacccctcaagagtggttgccgggcgaaagcccagtcttggctcctttgagccccgacggacggcagcaacggtttttccgtcgcttctcttcttgaagacgtcgttttggcatcccctagggggcaatgttgtctgtgttcctttgttggtctagcggcagtcggttcggtgctagccttctcccgggttgtgtgttggcgctgtcggtgtgcgggtggtgctatattttttcatttttcctggttacgatccgccagggttgtaatcttgtaattttttcctgctctatcaatagaacttcgcaccgtctcgtacgagtcgttcaaaaaaaatacttatcacatcactctagctacatcgtcactctagctatgtggtgccataaatgtgcccggagatatgctcttgcttgttacttagggcttgttcgaagtagcatgttcggttagctaaatgaccatatgcaaaacgagacgaatcactagaaaataactaattaagtattaatttttataaacttaaaaaaataggtttatatttgaattttttaaaaaaacttttatataaaagttttcttttaagaaatcacaccgtttataggtttacagtaaacgaggcagttgataaaaaatctaataatcctcatcaatatgttttgtagtgaatctggtggtttattcgtgtcatcatggaaccatcggaagttcggaacatcacttacgtaaactcctttactaactggctacgtacgcgcgccggtgattcagcagcaggctcacgcacctcacccctcagagcatgcgatgaagaatcaaaaagcaaagacaaaaaatgggagaaaagacaaatttcttcccacaaaacgctcacagatcttttgccattattacttttgctgactcttttcaccgatcgagttcctctcttgctcctaacataattcctcggtttcatcggagcagagatcgaattctccccaaatcctcagctcgcgtagtctctcacagccaaattgttgctcgtacgtgaatccgtttgtttgagctgaatctcctttctgcatcatcatatcaaatcccctttcgatcttcatcttcctgaatccgtttgtttgagctgaatcccctttctgcatcatctaatcccctttcagcatcttcttgggcatcatactgttcttgtccatggctgcgcctgctgagaggagatcggagccggactggagctcgggcctcccacggaagctgctcgagttcatcgccaagaagctgccgtccgggcgcgacgccgcctccttccgcctggtctgctcgccgtggtgcgccgcgctgccgctggagacgttctacccgatgctgatgctccccttcgatccggactcaccggacggcgacgccgccgtggtcaccttctactgcgccatggacgacgacgacgaggccaccatcgacctgcgcctccccgaggtacgcggcaaggtcgcctgcggcatgtcccacgggtggctggcgctcatggacggcgccgcggccgtcacgctgctgaacccgttcaccggcgccgccgtcgcgctcccgccggccgacaggaacgtcgccatggcgtcctacaagacggtgtccatggtcgacggggcgtggattctgcactacatttctggtgccaccaagcccatcaagttgagcaacatgagggatgtcttcttccgtgagatcgtgttgtctgcgtcgccaaggaactccagaggtgtcgattgcatggccatggccgtgctcgcgagctcgacgttggtcgccttctgccggctcggggacgccagatggacactggtagattcgaagctcgagtacccagtgacgtgtgtggtgcactgccgggacaggtttgtcgcgattggctccctcggagagatctcaatctttagcgtcgataacactgatggtgtagctcctctcacggcgagcctgttgctcttgatgcctccgccggcacatatctgccagcgtagctacatggacataaatggcgagttgtacctcgtcggcgccattttacgggtcactacctggacaaggtatgagatagtggtctacaagtgtaacctcctcgatgagaatccgttgtggtccaaggttgaagattccgaggacattgcatttttcgtgtcgaagtacttcaacactggttttggtgtagcaagcacctccaacattagatggagctgtgtttacttatctgaaccgaggttctgtactcatgaagatcaaaaatgcacagttgatagttatctggaaatggtcgatattaacactaatgaatcagcattgcaagcttaccgccccagtattcagggtttaggggctctatgctggattcgtccgaatctctggagttgaggtatgttatcaaatcaaatatggacatatttgcctttatttctaaaggaaaattgctctataggaaatggatatgtttgcttcatgaatttaaattcagttgatctgcttaactaaatcaactattttagcatcatgggagcgtggacagaagaaaaatgtagaaatagaattcatcttctaggattcctgaaatattgagtttactggtgtatcacggacttctcaggcggtagggtgttttctgcccaagcccaaattaaaatcatttttttaatctagcaaaagaataattatatttatcaaaatctgttctgaaattccagaatttaaatattcttattgtttacaggaatcctcatcaaaatatttttgtggattaatttgttggtttctgattatgtgtaggtgagtgatgctgaaaacagcgaaagatcagaagagaagcatgcattcgcagtctgagacagagcacaatgaaagtccaggactgaaattatgcaatccaagggtagatcatcgctgcttcatccaaggctcggtttggagggctcagtttcttttaatcgcacatttcgtaatcccttttaataaaccaaacttttcctttttgtcatcatgagaggagtatccttgatagacaaatggtgattttcaagcatgcctgtaaacatttccagggtctatttaattttggtgccaataggatttgtaaattttgaagattgctatacaacttctttcagcaggattttgctgctagcagattccattgtgttttgtctgaaatgcatttgcttttccattgttttggaaaaatgcatattttgattgagctgtataccaaggactgcccagaatttgtgcttcacctgggcatatctcaagagcttaattaataattttactggagaagaaagaatgcacactgtcctttgtcgatgtcattttgaatgtgttccatatagagaatggctgttcattcagcggagaaagagtctcaaagatcaagtggaattttgtatggtgagcagtaagattgaatattgtatatttttgtccagagatagttgttgatattgccttttatgatacatcagatatgctactttatcacccaatgtaaaacatgcaggggagattctatgtggatttgaccctatctccggagatgaggtatgtgaccggttattccatgtggtttgcaggtcttagggtttatgcatgagcgtaatcgaatgtacacttgtttgattcatatacacaagccagcggccagctataaagtcagacatgccattttggttggatcgaccatattatacccgatttggaatttaatttattggtattcgagccaactatgaaatatgaatatatgaatatagagaacataggtgaatggttgacaaaggtttgacatttatctacccaacatggaacacaagacatattcctctataaacgttca

SEQ ID NO: 24340 - DNA, 21591 bp, Oryza sativa
catgtatttctagttatcgtcggtccagattttcaaaacctatgtgtagctacaaattggcttgaggtctcactgtttcagtatttttgtattagttaaatgacatattgttcgggttgttccattagaattttagattgctggcttgtcatatattaataagattatattccactaacaggttttggcgagtctatatgctgtctgtgcaaattagtaatgggttttgtcatgctcaattataatggttttgtcaattgcaaatggctctgttgtcagactaatagattcttttgatttctgaatagttattttatcatgcgcacttttgtttttctaatgcccactcattctgaaggttttatgtgcctacctcaatatctccatacttttttcaaatagtttttctctagcatcccccatttcatcactgcttactcattcgaatgttttgttgtgcatatatagactaaagttgatatactcatttatttatggtttttgtcaatggcgagtgtaggattattgtcaacctcaattaatacttgtacccagttttattggtacatatagttttgtctatacaactttatttcctgatgcttactgaatcaaaggttttgtgtgcttaaagttttcgattgtcgatggaaaatactaggtttttgagcatttgtcagccttgatatctcaaatatttttcctcattagttttgtcagctcagttatgtgagatatgtttcctacaatatttcaatttcaattcacaatatacttagggggtgtttggttcatggccacactttttcacaccacacttgtggctgtcacagtttgttaggcatgtgtttggttcgctgccacagttgtggcttgccacactttttcaatagcatgtcccatatgtcatagactcaattttcttaccaactttgccatactttgtggctagtaatttgtccaccacacttttgtggctgccacaacttgcgtaacgttagctgtggcaaagtgtgaccggcaaccaaacacacccttaatctttgtctccttggcttctgagtattgttttatttcctgggtcaattaacactacctcgtcctggagattttgtgatgcacatttggcatgtttttctcatttgagaatggtacatttgttagccttaatatatcactactaaaaagacttttgcgaacaccacctcatttttttaaggcagacatctgtatgcacaaatatactaaaggcccaatagaaaacctgtgtgtgaaaatccattttcgcaaacgaacctcttaagagatccgtctacgaaaataggtttatttttgttagcggtcctattacgagatccgcatataaaaaatctttcacagcctcattttcactccttttgtttttattaagtcctccctcctcacccagaggcatggcggtggacttcaagcggtgatgtcagtcttcaggaggcgtcgaggagcttaggggtggtggactcaccggcgacagcaacaggaacggtggatctgttgatagcaattggcgatcttaggtagggcctcacggcccgtttagttggagggagttttagaagggattgagagtttagagggataaggctattaagtgttttgtttggttgggagacatgggaattttggtgggataggaatggggaattgaggaaggaactccctccttttcaatacctgggtaggtgcaggtaattgggagggaattcctcctttactttgtgtaagcaaatctcagccatccgtttttattaatgacctaatctccaactaaattacctatcaatttccatcatctctaccaaacaagatattgggattaaaaatcaaattctcatcttaatctcatcatcaattccctcatataaacttccaatcgtctttcctcgagttaccaaacaagccgtcaaggctctgtgcggcagtggcagggtccgtcgacctcgaccgtgacgacaagggcggggctgtggccagggtttgcatgttctagatctgaataggataggattttaagattcttttttttttggggggggggggggaatttccaggcaaatggcttaatatgtccgcttgggaaattaaaaaaagtaggtttgctatcatcggatttattacagttggattatatgaatgcaatgcgatggtaattaacaaaagtcctacgacgatgaacatcattataatattttattatgctaattgatcctatagtgtttataatctactcaggacaacgatgggacttgcagagttcatatatgcccaacctgacatcaagggcaaccaacccaggtaagatacgtatgaccttgctctgttaacccaatacagatatattcatcagatagtttgtagttttctaattcttacggcatggtgggaagaactcggtagtcgatcgatgcagggagacatccagcgtagcaggtgcaaaatgaatccaaaccaagattaccagtcaaatatcatcctgctgtgacagctgatttacattgtccaaaagctgatttatcatacgaattgaaaatagccatcccaccagaaaatcacgatcacaaatagtcgtgtgaccacaaatcaactgacatatcctaaggacgatttaagagggggtatggatgacaaatttgcgaacaccagaacgacagactttctgcttgattgattcagaagcccttgcaacagcaagttgagattgtcatgcacttgaagcaccttctcttgccccctcacttgtagaagcagcatcaattcctttcaaaaatacagggaaaaagaaaagaaattgcatcagttactgcagaaatgcagagagagagagtcacatcagcagggtgatcgatcaacactttgcacttaagccgtattagtaggaacaatacacgaaaatcacatcagcagggtgatcgatcaacacctaatctgctaattacatgagaaaatggtaattttacaacttatactaatccaaaagcaactaactggcatactatttcttacagtctagtagacagtaacaaatcatattatatagccaaagagaaattttatggtacttgaggaaataaccgcatatacttggaggtaccaacttttacactagaaaatgtggtatctcccaataccttatcaagaatagtaaaattactcatagctaaaagatacataattagcatagcagcacacatatgtaagcagctagttagctaaaggatgtataatcaatggagtagcacacatagatatcagcagcagaaacttagctatatatacctggaatgcagaagcttgtgtagggaacaactgaagtgcatttgtcaaacaccttcctggacctccttgaattgagttggaccatatagacagcagcagggtgatcaggcgagtgtgtgcccacaaagatgacatcggtgccctccacggcgccgagcaactgcacactactgggaatccatggagtttggagggcgccatcggggagtagcggctcgagctcaattgcccttcccctgatccactgcgcgactccgttgtcatccacattcctcgaccacaggcgtaatcggagacggaggcacaatttctcgtcctccggctccacctcgacgcatcgcagcacgccgtcgtcacccatggacatcatgaaaatgggggaactgctttcgatcaatggcggcgggcgtggcgggccgtagacgatcgacaaccgccgctgcccgccgccaagccggagctcgaaggcgtgcgtggagctccaggtgaagtagagcgtgtccccgacgaggacgctgcggcacggcaatggcgacctgtcctcgaggtagtagaacacgtcatggtgttcgacggtggtcgtgtcgctccactcccccgtgtcggaggagtagacacgagcggaggtggcaccggggaggtgcgggaggaacgggctagggctgtggctccagatcagggccacgaggaatgggccgccatggcagctgcggtggtcgcaaccacccccgccgccgccggcggcgcagagcaccgcggcgttgaagccgcggccggtgattgcgagtggcgacgacggccgtggcaggcggcggtgctcgttcgtgaagggatcccagacgacgaggtcgtggcctaggctggtggtggcggcggcggcgcggcgtgggcatggcgtggcgaagagggcgcggccgtggcggcagtcgaggacgagccacagcgggaggtcgcggctgccggcggcggcggggcggcgggaggaggcggcgccgttgttgggggtgtagcgggagccgtagcgcatgtccccctctcccatgccgatgcggaggaaaccgacgacggggggagcacggtggaggcggcggcggagtgcgcggtcggcgaggatgcggcgccagaccttgcaggcgagggaggcgcggaggaggcaggcggggtcgtcgggcgggaggcggacgaggatctcgccgacgagctcgtcggagagatcccgcagcgacggcgacggcggcggcatgggttttgggaatggattgcgacggtttggggtatggaattttgctacttttcaacaaaacaaaaaaaataaaatcgatagtacttaacaaagaaagaagaagagatcgatatttaccgaacaaacaaattactagcattaagcccttaacaataggaatgagaatcggtatctccaatcagatcaatactttccatcagtgtatacttccttcgtttcacaatgtaatactttctagcattaaccatatttatttagatgttaatgaatctagacatatgtatgtgtttagattcattaacatctatatgtatgtgaacaatgctagaaaatattacattgtgaaacggatggattattacattcatgctatccttattatcatgacaagcttaattgttaaaactctaattggataattgaggttttgttttagggcagaccgtagaaacagtccagggtgttcttaaaagctactttctccgtttcacaatataagactttctaacattgcccacattcatttagatgctaatgaatctagacatatgtatgtgtttagattccttaacatttataacatttatatgtatgtgagtaatgctagaaaatcttatattataaaacggagggagtaagcgctagtgtaacgtatatgccaaagtcaaaaaaaaaattaaaaaaattaattttggagttggttttaaggttttcttttatcgtattttctatttcaacattaccattttaagtcatttagagcacataggtaaaagttttaactataaattattttcttatcgctaatacgctgattaattggccaaccgatggcagcctacacataacgcttgtgaatttagcgggcttatcggagagttagtaccaaagtctatctgaaaagccgaaaacgctcccttaaagttgtctatttcccatgaattaaaattttaaattggaattcgaatatgaaaccaaatcatcctccaaatcaatccaatattaaagagagtggtttattcctactcgacgcctgggctgatgaaagcctttctctccctcctccagcatggcccagcccataatagcagcacgggccggtttttctattgtgggcttcctccagcagcccacaatagcaccaaaggccctgtacgtcgctgccgacgctgtcatcaccgtgcctgttacttgtatgagaccttaaatttttttaagaaaatgttttggctggaacattaaaatttcacggtagttttgtaagttatgggtagattagggaatgtagtagactgacgctgaaagttttggaaatttagaacttcttttttccaaaaacaagataattagtaaatactaaaactatactaaaccttttggtttcttttttttttaaactaaatcggcaggtagaggctgccaattatactttcaataagcaggagtaaaaacccagacgggttacgagaaaaagaaaacaaaggacgctattgttgtcggccgaacaagttcacagcacgcacaacaactcaacgctacaacccactcaaaatagaccatcgacggagcctaaacacgagtcatcgttgccaagcttgccagagcaaagcagctccgacttcacggcaaacttgtgtcgtcgttgccaagctcatcacagaaacgaccaagcagctccgacttcccatggcgaacatcagccaaagcaatcgtatcaccgcttcctgcttgttgttggcaccaacacacctagagagagactgcaacgtgttatcgttaccgagcttcatcacaccccatcaacaaagcagccgagggttatgtttcgcccccggtcgcccgtgcgtggacgacagggggccgcctgcgccgtctgatctgatttccagttgatttccagttttctctgtttcaaccttttggtttcttccttattatatatttgttgagtcattaagaaagatagtacaaacgcaaatgcttaaaatataggcacacttatatctatgaacgcgcatacatattctacctttataagtatcttaaaggggcaattgcaaatttaccactgctttgaatcgttattgcaaaactgccactagaaaattgcaaaaataccactggaactgtcattcgagtggcatccttgcaaaattgaaaaaaccggtggcaaaaaagacttaatctgtaatcttgatattaatgaagttattactgtgggctacttactctgtcctgaatataagtatgaagtaattattccgtactattaataagtgctctttgcgacaaaagctttgtaagaaaatttgtaggacgtaaatcctttggaagatttccttttctcttttggaacaaaggaatgagccctatgaaattcatatgggattgctaaattagggcccctttgaatcaaaagatttacgtagaaatttaataggattcaaatcttatagaaaattttcatatttagccctttgattcaaaggattgaagctttccaattcctatgaaatggcgcattgtatgtggattttggaggaaatatagcaagagctccaatctcttagaaaatttcctttgagtctatctctctcatctgattcctgtgtttttcttgcgctccaatcaaacggccattcctgtgttttttctatattttgcaatcatctgttttacacttcaatttctatcaaaatcctgtatttttcctattcctccattgttttcaaccttacgattcaaaggggcccttagtgattttgaagaaaatctaacataatcttgaaatcttttcccttggaatcatctttccaaattactatattttttccatgtggaacatccaaccatcgcacaataagcaattcctatatttttcttatttttaggataatgccacccaaattcattattactgcgctttttaaacttatgaattacaaagaagccctaaagctagtcacaatctatgtatgcataccatatttaccatgggactacctattcttactcatgaaatgtctgggaaaattcagtccccactaaaaaatcagatttttttttcttcattgcttcattctgcactaaatattttctctttaaaaaaaaaactttgcagcatcttcactgtcaactacttcctccgttttatattataaggcgtttgactttttcctagtcaaacttgattaagtttgaccaagtttatagtaaaatttacatcttaaatatcaaattaattttattaaatctaaaattaaatatattttgataatatatttattttgtattgaaaatactactatatttttttataaacttaaacgaagagagcagtaatattgaagtgttttgaagatccagattgtttcttccctaccgcctaacaatgaaaacgattaatccgcctaatttttaatggcggaatgcaatagcatatgcataaaaccgatcgaatctatcgaagaaatgcttaactcttgtcacatcctgatttttgtttcaggatttataaattatttaataaattattattagaatttatattaaatgttcattaatttacaagtgaagttaaatgtgggaaataaaatttcctaaatataaagcatggatggatttaattttttattaaattctctatggttaattatactctctggaatattctcggatttttcggagctcaattcctaatttttaatcatacaaagagcatttcagtaattacccacatattaaattaatcattaaatggtctggttttaatatttttaaatactttgggtgtccaagtatgttcaagatttttcttggaattatttgagcataggaagtatttttaacaattcaaagatcatttcattgattaatttaataggaaaagtaataataatcctcttcctagtcttgggccctttccagcccatctccctcttttgtgtgcacggccgtgcagcccaattcggcccagccgagctccccccttctctttctttctttgctttgttttcagccagcccaagacgaaaagtctaatttgcctccctcgacactgtttatcttctgcctctagcagccgaactgagaccgatttggctcggtttttctcctccaaatctgacctttccccttgtgtttttctaaaattagttgaggggaaatattcctcttatcctcctctatatttacccctaaaaattggagctaatcgttgagtatcttatccgaatcgaactcgttttcgagtttatctccgaaaccgagtttttgatttcccggatcgatttcttgcgggaggagtccgatctcttcaatccaaggctataaataggaccccctagtcctcctctttcgtttgccccctctcccgtgatctcccgtgcctcgtagcgccgccgccacgtgctccaccccgccgtcgtcgccggccgagctccatccgcgtcgcgccgccgcctccgtcgtcgccgccggtcgccgtcaccgccgtaaggtgcgccgaggtgtgggcaagctcggccgctctctccccgctgtcgccggtcaccggagccccgtcgccggccgtcgtcgttcgtcgtttggttcgagggtgagtaccgttaggttcgtctcgtcgtcctctacgtgtacatgtcctccaaagtcgcagccgaccatccaatctccggcgaggtcgccatcttggtccggccattgatgaggtcatcatgatgtcatcatcgtttttctttttcctgtttttctaatagattaaatcttcggaaattcataactaaatcatcgtaactcggttttgagtggttcaagttgctaaattcatctaaaatcatgatctacatgtttgtttactttatatgtactgtttatttggtttttattagtctttttcttcgttttgcgtgttagcttgtcgtttccgtcgttgcgaaggttcgtgagtgcgtcgggagtgttcagaagattaattgaagaccgattattgcaaggcaagtcacacagatcctaaacacaatcctttgagcatgttgatcctatatttaaattctctatttatttcaactgtgcatttattttcgaatgtcattggtggtgtgaatctattcctttgttatggcctgtttgcattgattactttattccttgataccttgggttattataacttgactagttgagctttatatattggttcagctagatattagatataattgcttagccatgcttagaaacattagctcactaatgggatgaatcatatatactacattattatttatggttatatttaatggtagctcacgatggttaatcgtgttatgataattaattggtaattaaaatatgattaatggtgggttgtgagcacatggttttgaaggtcgtgctcatggcaattaaggaccggttcgcgagctactgttgtgaaacattaaccgtgccaaccacaagccagcgtgggcaacgactttaccttttgtatagcatggttcattgcggagcaccagactgagaagtggcggagataagcccacgggggtcgctggggagtccatgccttgttttataagggggtgattatgatccaggaatggtgcactgtggtgagttgtgttgtgcagagggtattgccacagcctctattcgggtactttccagtatcgcgacgcatggtagacataatgttgaggctgtgtcttgtgggtacagtggtacacctctggccagagtaaaactattcgaatagccgtgcccgcggttatgggtgggttgagcaatgtttttcgtgattagtctcacacctctcacaataattatggatgttatacctggtaataatttgcttagctcctggtttggagttagatctgtacagccgggtatggttgttcaggatggttgggcctgtgcagcatgggtgtgttgttcagtgttgattaaaatttctgattaattactccactgttttacttctcttaaatgttttgctaaatgctgcttttgcaaatgagcctatattatgccatcctttggtatccttgtgcacttgcatatttgttgtgtggcttgttgagtatgtcatatgctcattcttgcaataatcaatcatcctcagttgaagaaaaaggatctagaaggagaagacgtttggcttataccccagttgagctgcctgtgggagtggagctgaagccatcgctagaccgttattccgctgctgttttcttttcttttgtaagtgtgtaacgttattattatgatggatttgtatattaaattgtcagtttgtgtacctcggttgattgctggacgaggattttatgcataaataacttcggaaattactagtgaatttccgggcgtgacaactcttttaacttttcaaggaatccttaatcagtgtatgcatatacgtctcgataatgaatcatgttaaagttcatttacacatgactgtacttaaagtctgaaaccaaagaaaagaagatcgagatagccaaatcaatctttgcaagacataaacagccatagtacatatataagggttgatatgtctgattcacaccatgtctcttctgtcgcgtatgcgcagataacccttccttcctgcctaacttaagctcttcttcccttctatacactactacacaaagcgttttcccatacggtcaatctgatttttacgtgcaaagcttcggcccgtctggaacaaatcacctaggaaaatcacgattttcgcgtgcagtggcacccgcacacgaaaatcagattttcacgtgcggtcgcttatgccgcccgcacggaaaaacaaaacaccgaaaaataaaataaaatttcaaaaaaaaaaaccctagatcaggtcggcggtggtggcggcgtcgccgctcaccggatccgtggcggggggagggcggccggccgccagattcgtgcggggaaggccgctgctagcccgcccaccggatccgtcgcctgcgcgctcccgtccgctggggagggaaggggacgggaggggagggcagccggttcccacgccggatccgtggcggggaagggcagccagccgccagatccgtgcggggacggcctatgcccgccagatcccgcgcctccaccaccgcgccatcgtcgctggcgccgcaccgccaccgtcgccgccatcgatgccgccgcttccgcctcccttaccgagggcgccagcatcgccgaggaggaagagggagatgggaggatggatggagaggtggtggggagggcgagcgcgtggggagaggataagggtgagcgtgtggggtgggctattttcgtgtgcgggcctgttaagtggcttgcacacgaaaatatatttttctgtgcgggcgacgtcctgatgcccctttttcatttttctgtgcggttgcacttatggaccgcctagaaataaactagtctggtgtccaggaaaatctttagtgtagtagtgatagtgaaggtgtacaattaaaccgttaagtagcggatccagaaatttagatcgttggtgtcataacatatctatcgatgttatagcatgctaattatatttagaatatagtgttacaatatatgcataagcagtttaagcatgggttttaccgaaagttgtcggtgtcgcctgacaccggtggtaacactgtagatccgcccctaaaccctttgctttctcaagtcaataaccaaagaaccaattgttcaggaaaaaagaaagtaatttcctgaataatactcctactttcatccctaaataaacgtaggcaggaatttactaatttcatactggtcgcctaaagctctttaatacttctatgtccttttcttatcatttttagttattcaaccaatagaattttctcctcctcattttctctctctctctctctcttcttattttctcttcatgtttatgaagggtatagtatacagtttttagcttcttctaatatatctttgaatagttaaaactatatatattttacagtgggagtaacatgtacttccttcaaaatgtagctatttctaacacagtagcttgtcttaaaataaagctatttcttcatctacctcctactctcaaccaatcacaagcattcttcttcacatactttctcttttcaaccaatcacacactttctccaatcattctctggttctcacatactttcttaatacacgtgctaaccttaaaaatgtttacattttgagacggaggaagtatgaaattatcaaatgatgaaccttctctttttgactttcgagaagcacattcagaaacaaaggttctctggaacacaaaaaactgagagagttttttagaaattagctcaaagttctttttaaaaaaaacctcggaggcaataagagaaaggagtagctaaatctcagacgcctacaaaatttcaaattccagcatacatttctgagtgtaaaattatagtagtgtgcaaatagccaaatatgcaatttgttacttctttttaactgtaattttgttgttatatagtatggctttactttatattatatcaaagttttactattttccatgtaattttgcaaatgtcatggattgtattttttttcatataattgtactgccatctaagtagagagaaaagtgaccgaattttcctgaaatctacatttcctttaaaaatgtttagctaccagggagaaaaaaaataaactcaatactaaaatgatttttacaagtgggtagaagaagacaaagaggcagcagagaagaattgaagatgctcctaggacagtagcctgtagccacctcatctcctgttttgtttgctttttttttccttttttttagggagcctctcttgttttatttgctctgcattatcatctctttcttacaccagtcgtccattccatccatccatctatacttagctgcacactgcccgaggcaacgccaccacacgcctccccttccatgctcccggtccaccatgagccaacccagaaatttatctccatgtcaaaatataaaagattttcactgaatttcacacatacatttattatattacgatgtgtcacaaccacctaaaatctcttatattttaaaacggaggaagtaaaatataaacaagtttatttttatttctttctatttgtccttaaataaatttatttttaatatttattatatcaaagtttgtaaaagtattaagataaatatattttgataacaagagaaataattacattataatttgataaagtaatggcattctaatttttttaatatgtggaattagttaaaacattaaacttattttgggacgaaacaagtaaaaggaaagtacccatggtccagtgcaacaggttcaccatctgtcctgcagtattcccttgccagtgggctacttgcacagctaccaatgcagtggaccatggaccatggcgcatgcactacgcgtgggtccacggtagactagttccatacgccagcgtgcatgcacggaattccaggacacagccctcgtgcctcctttttatgcaaaaaaaaatagaaaagaaaagaaagtgcagcgatctaaacttatttaattaccaccaccatcagagatcttgagacagggtgatagaaagtcatttgcatcaagttgaccaataattcatcatagcttcacactgtactagcactagtattttatctccatccaataattgagattggtcagttgctgacactgtgtgaacttggggttacataaactcaattacaggtaaaaagtaaaaagaattactcatcaaatgcacctctaattatcttcttttctgttcatctctctcaagactagattaattttaaccacataggaacaacatctaatttcttgagatctacacactgagggttttgtgaagcaggctaggagcggtacagggtcttgagcctctttgctgcctggatgaagcccagaatcacctgcaactcatccaattgctgctttttgtttagcatttggaagagattggagccagaggttaagacttaaaaactgattgtgtaatcacaggttatacaatacaaactgcctatctaaaagatataagtaggtctgtagctacctgagactgaaaatgctgctggaccccatggaagagctgttcctttgatggattggggttcatgcttacctgtgcatagtttttcatcattaagcgcacattagaccatggaatgatggaaatgaaaagataaggtttgctaatcaataaatgggatgatccaggctgcttacaagattgaaatgcttccagtatctccacagcgtaggagttccaagttttgtcaggtttactctctgcaaacaaaatgtaaaatatacttcgatcagaacacccgtcaaaaaaaaaaaaacctttgaacaatggcacatgatgtgcaaaagacagattaaaatcctagcagatttcgtagcaaactgaatgaattgtcaatgaaatcgattccgccatgtccacaataaggcatgcaaaatgcattggctaaacagcagaatggtctatgacaacaacagatcctacctaaccatgggccaagccacgtgatccaagggtcacactggctttaattcttgatggcacggtcagatatctcaaaagtattactcattctgtatacttattgcgatagcgattagtaattaccgttcgcagctttgtactggggtgaaaattgcctcggttgctggattttatacaggaagaccagggccttgtatgccgaactcttggctttgttggtttgtggtactctatgctcgctacttgcgaaaatagaagaaaattgttagttgatcacactactaatagtttaaagcaattggctaaattgcaattatcacagaatggtcttacaatagtccatgtctttgtctcccatgtcggaactgctacagaacgaattgttgccatcaatatcatcatcgtcttcgttaccagttggaggttccaatacactcaaagcattcctttgcagcttcacctctacaccattctttagaacctgcatttgcaacaatatctcaggtccaggtcttgtttttcattatgtcatatcacctctcctttttctttcgagaggatatcacctcaaataatggtgggtatagattatgacggtattattaacacagatgatcttttaaaaacatgtcgagaactgcttgccttgctactttctaaaacaataaaagtcaatactattttgttcattagttaaacaagcattttcaagatagaaaaccacaattgagtaaagtttaagtgggatactaaataattcagcgggagactcaccagccagtgccaacctccaagaccaacagccttcttgacaacaccttgtaggccaaccaagacggactttgttcggttgttcccagtgacgatgaccttcgtgtgccgaggaagcaccgagagctcctcatcgccactctcgtaccgaggcggagacagaacccgggaggagcatagctcagtctccatcatcatgctgattctctgccctgatctctccctgattcaaggtttggcagcaaatcaatcagtacacaacaaactcaatacagtggagtgttctatgattgactatcaacagcaaacaataaatagcactatcaacccagtgccagaaaattttcctagattagcgcaatgttcaagatttattgcacggtgcaagaaccaagtaactctgcatctcaaatctgcaggattggtgaactttgctaaaaacagtgctgctccaaaattaaaaaaagtataccagctattattaggcatagcaggatttcagaaactagctcaacataaaaaaaaaaagcttgaccctgcataaagggaatctgaaattcaaaatcgattcttgagtcctaagttccacaggaaattcatatttatattttttttgcgtacattaatttccatggggggcacgagtgaagcctgaaagcgatttacatgatgtgacacctccatgcaactcgatccggatcagaactgatgcggttgcaaattacaaacagactggagagcattagtgacccccaaccactaaccatgatggtgatgaatcggcagagacactcaccaggacccactaccagctagctagctgcaagaattgctcgttacttgctggagtagcaatcgtgaaagtgatgtgtctaaggaatatgtacaaaagcagtgcatgggattgccaggtagtaaatcagaaatgaaatggtgtaagcaatcaattttggcttaagcaatttgcttagctaggtgcttggcattaattatgggaactggatctactaaaaaattatgtggagtaaccacaagaatttaatagttggggcaggtaaacaatcttgtgttcatgctttcagtaaattcgcatttaaagcggagttatggagattgcagactacagtaatgaacagtacagtacaatctcgtgatgcattttcccccaactaataccctggtgcccgattttaataaaataatttcatatatttttttccagtgcaatctgcactgcaaaaattctgaatcaagtatagattcgaatttactgtaaaatttcacagaacagctcagaaacccgatctaaatcactttagagatcgcctagcttcaagatcttaattaaatgcaggatgaattgggaaatgctacccggtgtattagaagaaaaatcgcatgcaaatccagaattcttcatagtatagaacaaaatgcaatcaaattcttgatatgaacttctgttgactgaagatcacagctgcaacagtgtatttttctatagagacacaggatcctagtagataagcaattaaggatatctgtactcgcgctgcaaagtctactgtaattttgaatttgagaaaggagacgcgaattcaaaatgcgaaagactgtctttttaaagcgcaatccgagctcgaattattcaaaattcagagcaagaagggagattcaaccacgggtttaatactcgcagattcagataatgcaacttcgatttgcgattacggacctaatcacggaatcagaaatcgaatccatcccaatcgagcaccaggaatccaaatcaaatcaaatcaaagctagtacaaaaaccctgcaagcgagcagcgcaaaacccgctgaattccctccgagctcaaaccaccatttactcccaatccatcaaaaccacaattcattccgcccaaaaattcaactccccagaagacaaaccaactaggtaaaatgcggatcaaaaaaggaaaaattcaagagggcaagccgaggggggttttcttggctcacctgctccgatctcgccgcaatggccaccgaatcagcccgggaaacgatcgagccgggcggtgtcgcggatcagggacccgattccgagcccgaattgtgcgccgaggcgacggatcgatgcgcgagagagggaaatccgagcatgaagaagaggagagagaaagtgaaggagaaggagagagagaagagcactgaatgctttccaactgcacagaaaagagcaaacggatgagccggctttaacgcgcaaactcggctcggctcgggcttgatctcggcttggctcggctcggctcgtggagatatggctgcgatctactgtgacgtgggggttgcctggacccaaatataataaatcggtggtgtaccaagcaggatcatgagtagagagactgacgcgtggggccagttaggtcgcagaagtaggtgggaccagaagtcagtgactgtgactcaaacaatggtggtttgtggggatgtttcctaaacgacaagataggggcaaaagaaaaaaaaaagaagaaggcagatgatgatttctatttttatttaaagagtaaatttcataaaattacatatactttacacgatctatcacaaaactatatatttaataacttatttcacaaaactacagattcaatgtttttgtttatcacaaaactacaggtactttgcacaatatatcacaaaactacatatttaagatcttgtttcacaaaactatatatttaatatctttatttatcacaaaactataggtttagtgtcttcattattacaaaactatagattttgctaaaacctatagttttgtgataataaagacactaaatttatagttttatgataaatgaagacactaaatgtgtagttctgtgataaacgaaaacactaaatctatagttttgtgaaacaagttcttaaatctataattttgtaatagattgtacaaagtacctatagttttatgataaacggacatattaaatctgtagttttataaaacaagctcttaaatctgtagttttgtgataaattatgcaaaatacctatagttttgtaaaatttactcttatttaaaaaatgaaataaaataaaatcgcgccgctgcctggtttctctttctcctcgatgccgacgaccacctttctcctccttggccgtcggcgactaccgcccccattccggccggcaccgccgcctctcatctgccatattcctgtcccaatccgcccacacgagctggctgaaaagtggaagcggcgataggcggcggcgagcgagacgagaaagagaacgattttagaggaaatgattcaaaacaatattatcaatccctacgaatatactcccttctcctctgggtttttttttttgaagcgtatgaatgttagagaattttcattttcataagaaacagtttaattcctttaaaattcatgtaaaattcatccaaaccggaaaggtcctaaggctgtgttcaggaggtgagttcacctcccacgcacgtaaaatggagcagtgcattttcttatgattaattaagtgtttactatttttctaaaaaaatgaattaatattattttttaaaacaactcttgtacataattttttttcaaaaaacacatcgtttagcagtttgaaaagtgtgcatgcaaaagacgagggaggtgagttgggaaagttggagaaagaactcaacttgtgtcattttgactttttttattcattttttttaagttgaaccaaatttatagaaaaaatatagctgcattttcaataaaacaacatattgctaaatttgatgttaaaagtgtcttctagtttgaggacaaattccaatttactaatgccttgtattattatctaccttatagttcactaatacagtcttatattcctcatttctaattgataggtcaggattatctcacttaaaatctactcccgtgattttctcatctttctatcctttcggcgtcgctccctcttgccgctagcgtcaccccttctcctgaatcttgatagcggttgccaacagcgccgccccttcgccctcccgtccttgaaggtgaagcagcgtcctgcctcaaactacaccctaaccctgatcccccaaaaccctagctgcaattgcaccatcttcaggtcgtcgttcgatctccgtcacgctgcctcgccctctcaacaacacacattccccgcctgccattctccatcgtgtcaccataaagtcgtcgtcgatccctcgccgtccgatctacggtgcctggttcacatatcacatctaagtgttttgcgtttgctagccttgtaggctcaaggctgccggcggctctaggaagcggaagaaggctgccgctagtggcaagcacaagcacccgccatctgttttctttgtcttcatgtgagtttctcgctccttcgcccaccacactatcaggacgtgcaggcggacgggtgggagcggtcggatttccccatcatctacgagtctggtcctctctcgacgaaacgcatggtatcctaacctcgccttgaaccctaatgctctctgaataatttggttcatggttggtgtgacagccatgaaggcggcggcgggatttagtgcccgcacagtaatctatactccctctgttttataatataagttgtttgacttttttttagtccaattttgttaaatttgatcaaagttatagaaaaatttatcaacatctaaaatatcaaatcaattttattaaatataacgttgaatgtattttgataatatatttgttttgtattgaaaatactactatatattttataaacttagttaaatttagaaaaagtcaaacgagttataatatgaaatggtgggagtattggtttggtgtgatttctgtttgtgtatcggacacatgtgggagatcggggacaaacctaggtgtttgttttggtcggcgtgcgttgtaggcttgcagccctttcgttcttgtagctgcaccgctgtaacaaactaacaattttactactgctgtaacagttttactacgaaaaaaatccgagttgctctgggatgaagttaacttcttcattttcatgtcagccagtgtaattagagaaattgatgctatctgtgtttgcaataatgtccgtgtgattaatggtttgtgcaatttgtctcgtagataacagaacaagaaattatcaaagcatagaactatgaattaggggtcgaagaaaaatgtcatagacatcagatatttaccacctcgatcaaattatccttgttttctccgtccctttccttcaattttttttttgtggtcacaagattcagtggcttcctcgcctgtactatactccaccatcccaaaatacaagaagattttattgagatgtgacacattctaatactattgtcggtgacataggaccgagagtatcatgactagaggcttgggcaggagcaatcacccacgaggcctgaccccctcgggggggtcgggcccgagggtgatgtggccgcccccctctttgtcttcccgaggggtcggaccgctcccgtttcggccccgagggctgaggcgccccgaccccttgaaggttttttgcgccgcgtgtatgggttaggtgagagcagcgagggctcacctaaccgcatttattgcggtttggacggg

SEQ ID NO: 24341 - DNA, 19192 bp, Oryza sativa
cttcatcctagccattacaggcaagatattgtatgaagaagggcgaacatgcagattgttaaactgacacgtggtggacaagaatgaccgatttgtgaccggtctgacactggtcatgtcgccagcagacagccatgttcccacgtcgcgcctgcctccggcggaagtggaggtaggtatgggccgtcccatcagaaggtcattcggacggcaaccatacaaatctccgtccattaatgaagagaagggaagttggagggaaagagaggagaagtccccacacaaaatagagagatggtgcatgtggtatccccttgagttataaaaggaggaccttgcccacttagagggggggggacggatcctgaacgatagaggctggattcggatcccagaacgatcaggggctagctcgcactttgtagcttcttcgtacacagatccaccaaaacacaggagtagggtattacgcttctcagcggcccgaacctgtatacatcgcccgtgtcttgtgtgtttccattctcgcgaaccttccacagaccgagagcttagaacctcacccagggtccccggccgaatcggcaaagggggacctgcgcggtctcccggtgaggagccccacgctccgtcatctggcgcgccaggtagggggctctgcgtgtgtttttctaagctctcgtattctttcgtgtgcgccaagcttttcctgttcagcccaatggctgaaccagcaaaggcgcataacctctctccgagtgttagcggtgacgacggggagccgaacccacgccgtcgagctcgtactccaccgccccctccacgccaaagtcctaggcgggaggaagcgctcgagagggtcgaaagatccgcgacttcgacatccacgggtgatggagaagggcgccgagatggggagcgtcgcctcctcgtctacggcgacggcaacacgccccagggtgcgctccaagctgcgggcgcgctcctacgccacccgcccgtcgtccctgacccggagtctccggcccaacgttggctggacgacgtggccaacttggtcatgacggcgcggcagcgcctagatgctggtgggcggtcctccgccaccaagacctctggtactgctgctaccggctccgcgtcgtcaagacggagggcgcggcgagcggcggccgctgttcgccattcggccgccactccttcgtcagcgcctccgacccgggaagatttgcgtggggggccggatgcccgcatcagtatcgagcgccggcgtaatggccgacgtgctgcccacgcaacggaaggcgcctcctcgtccggagtgtcacatcaacacggacgcggggatcagccctccgtgcccccggttggtggtgtcggctgtagagcctttgtggcgagccttcggaacgtccgttggcccccaaggttccggcccaccatcgccgaaaaatatgacgggagcgtcaaccccgccgagtttctccaggtctacatgaccgggatcgaggccgccgggggtgacgacagggtcatggcgaatttctttcccatggccctgaagggacaggcacggggttggctaatgaacttgccacccgcgtccgtccactcttgggaggatctgtgacaacagttcaccatgaactttcaaggcacatatccgcgcccaggtgaagaagcggacttacatgcagtccagcgaagggatgatgagtcacttcgctcatacatccagcggttctgtcaagtccgcaacaccataccatgcatccctgcacacgcggtgatttacgtgttcagggggggtgtgcggcacaaccgcatgctcgaaaagatcgcctccaaagagccccagactaccgcggagctttttcagctcgcggaccgagtggctcgtaaggaggaggcatggacctggaacccctccgattccggtgtggcagcttcggccgcccccggatccgctgctcagacagggcggcgtgacaggaggaggaagaagaggtcagcccattccgacgacgagggtcatgtcctcgccgtcgagggcgcttcgcgggccacccgaaaggggaggcctgcgagcgacaaaaagagggaggccagcgctcccagcagggagcgcccaaccggcaagtggtgcaccgtccacaatacctcccttcacgacctcgcggactgccgcgcagtcaaaagtttggatgagcggacgaggaagtgggaggaggagaggaggcaggagcgccgagagggcaagtccccggcggttccttccggcaatcggcgaagtgaggccaagcagaaggcccccgccgaggacatcgatgacggcgatgatgacctaggttttcaagagcctggggccaccattgccactgtcgatggaggagcgtgtgctcacgtttctcgccggagcctcaaggccatgaagcgagagcttctggccgcggcccctactcatgaggcgacgcgccgggcgtggtggtcggaggttgccctcaccttcgaccagaccgaccacccaccgtgtgttgcccggggaggacagattgcaatggtggtttcccccactgtttgcaacgtgaagctggggcgtgtcctcattgatgggggagcagccctcaacatcctttcccccgcagcctttgacgctatcaaggtcccggggatggtgctccggccgtcccagccgattatcggtgtgacgccggggcacacttggccgctaggtcatattgacctcccggtcaccttcggtggatccgccaacttccgcacggagcgggtgaactttgatgtggcggacctcagtctgccctacaacgcggtcctagggaggcccgcgttggtgaagttcatggcggcggtccactacgcctacctccagatgaagatgccgggccccggtggccccatctctgtccatggcgacctcaaagtcgcgcttgcttgtatggagcagcgcgcggaccacctcgccgccgcgtccaagcccgagggtggcgacgagaggcttggcacctccgcccccgccgccccgaggcagcagatagtcatatgcgacgaggtcccggtcaaggaggttgccctgagcgacggcccgtccaagaccacacggatcggtggtcttctggacggcaaataggaagacgcgctcgtctccttcctgcgggcaaacgctgacgtcttcgcatggagaccggcggatatgcccggggtccccagggaggtgattgagcaccgtctcgccgtgcggccgggcgcaaggcctgttcggcagaaagtgcggcgccaggccccggaacgtcaagccttcatccgcgaggaggtggcgcgacttctggaggccggattcatacgcgaggtcatccatccggagtggctggcgaacccggtggtcgttcccaaggcgaacggcaagcttcggatgtgcatcgactacaccaacctcaacaaggcatgtcctaaggacccttaccccctgcctcgcatagatcagattgtcgactccaccgcggggtgcgaccttttgtgttttctagatgcatactctggttaccatcagattcgcatggctagggaggatgaggaaaaaactgcattcattacccccataggaacttattgttatacgacaatgcccttcgggttaaagaatgtaggtcctacttttcaacgtactactcgaatttctttgggtagccaaataggacgtaatgttgaggcttatgtcgatgacttggttgtaaagacgcgcaaccaagagaccttactctcggatctagcggaaacttttgagagtctccgctccgcccgcataaaactgaaccccgataagtgcgtgttcggtgtacctgcgggcaagcttcttgggttcttggtctctgcccgaggcatcgaggccaaccccgagaagatacgagctatagagcggatgcgccccccagcaaacttagggatgtgcaatgcgtcaccggttgcatggccgccctaagtcggttcatatcgaggctgggagagaaggcgctacccttatttaagctcctcaaacgctccgggccgtttacttggatggaggaagctgaacgtgccctcactcagttgaaggcgtatctcagctctcccccagttctggtcgccccggagccaaatgaacccttactactctacttagcggcgaccccgcaagtggttagtgcggcgttgcttgtggagcgcgatgaggacaatcctcattccgcgcatccccaccctgtgttggcttggcccgggagagagcagggaagagaggcccccgagccgaacggtggcccaaggcccccgacgaccggagctggccctctgcccgcttgtcagacggtgccaggtgcccccgacccccaggatggcccgggggccactgtgggaaggctgcacctatcgccctctgaccccgaggctaaccctgtgccgactcgacccgggagagagcagggagaagaggcccccgagccgaatggtggcctaaggcccctgacgaccggagttggccctttgcccgcttgtccgacgacgccaggagcccccgacccccaggacggctccgaggccactgtgggaaggccgcccctgtcgtcctccgaccccgaagtcgtcggcacagaagacgagtgcgccccgcgaggccgcttggacaaagagcgccccagggatgtggcccctagtgaagaggatcggccccaccgaaaggtgcagcggcccgtctactttgttagtgaggccctccgggacgccaagacccgataccctcaggcccagaagatgctttacgctattctgatggcttcgaggaaactgcgccattacttccaagcgcatcgggtcacggtggttacgtcttaccccctcggccaaatcttgcataatcgagagggtacaggacgggtggtgaaatgggcaatcgaactttctgagttcgatttgcactttgaaccacgccacgctatcaaagccaggccctcgccgactttgtggcagagtggaccccagctcccgagcccgtctccattcccgaggccagctcgggcccctcgcagctgcctcacaccgcctacagggtgatgcagttcgacggctccctgtctcttcagggcgccggtgcgggggtcacgttgacctcgccgagcggagacgtcctcagatatttggttcgccttgactttcgggcgaccaataatatggcagagtacgagggactccttgcgggactcagggtggcagctggactggggatccgccgcctcctggtgttaggcgactcccagctggtcgttaaccaagtctgtaaggagtaccggtgctctgacccgcagatggacgcttacgtgcgccaagtacggcgtatggagcgccatttcgacgagattgagcttcggcacgtgcccagacgggataacacgattgccgacgaactctcacggctcgcttcctcgcgagcccagaccccaccgggcgcctttgaagaaaggcttgcccagccgtcggcgcgacccgaccccttaggggagacggacgcgcctgaccggcccccgaggcccgtcggagtccaggcctcgggacccgaggggagcgctcccagctcccttagattgattgcttggatcgctgagatccaagcatacctcacagataagactctatccgaggactgcgaagggagtgaacgcgtccagcgcatttccaaacgctacgtgctggtagaagggaccctctatcggcgcgcggctaacggaatcctcctgaagtgcattcctcgggaacaaggcgtcgagcttcttgccgatatccatgaaggcgaatgcggagcccactccgcctcgcgcaccttggttggaaaagcctttcgtcaaggtttctattggcagatagctctcaatgatgcagtcgacctggtccggcgatgcagagcgtgtcaattccacgccaagcaaatccatcagccggcccaggccctgcagatcataccactttcatggccatttgctgtctgggggctcgatatcttgggaccgtttaggcgggccccgggcgggtttgagtatctgtatgtcgcgatcgacaagttcactaagtggcccgaggcttatccggtcatcaagatcgataagcactccgcacttaaattcattaagggcatcacagcccggtttggagtgcctaaccgtattattacggataacggcacccaattcactagtgaactcttcggtgactactgcgaagacatgggcatcaagctctgcttcgcctcacccgcccaccccagaagcaatggccaagtggggcgcgccaatgcggaaatcctcagaggtcttaaaaccaagaccttcaacatcctcaagaagcacagcgattcgtggatcgaggagttgccagcggtgctctgggcgaaccgaaccacaccaagccgagcaaccggggaaacgcctttcttcctcgtctacggcgcggaagcggttctcccatccgagctcaccctgaggtcccctcgggccaccatgtactgcgaagctgatcaagatcagcttcgcagagatgacctcgactatctggaggagcgaaggcggcgcgcggccctccgagccgcgcgctaccagcagagcctgcggcgctaccatcagcgccacgtccgggcccgatcactctgcgtcgacgacctcgtcctacgccgcgtccaaacgcgtgctggattgagcaagctctcaccaatgtgggagggtccgtatcgagtgatcggcgtcccccggccgggctccgttcggctggccacgggcgacggcacagagctgcctaacccgtggaacatcgaacaccttcgtcgcttctacccttaagggggatcgggtgtcaggtttcaggctcgggccaaccccgcacccccctcgggcgtgcagggttggccgggggctaccacatatgcatatttttatttctcttatatatgtatttcaataaaagcattttcgatttcctaaaggctgtatctgtgctgttgtttccttttgaagaatcttgacttgaaataggtcactcgtattcaatcctgccctcgggggctcgggtcggctaaaatcgccaaacggggcccagaaccgagccgtgccccggggcgtggtgaactccgggggggaatcggcaaaaacccacaatcgggccacccataaccctcggtcaccacgctcccggcctggccagtctcgacatgtgtatctccccaggcactaaccccgacccgagccatttgaggactaggacctgggcacgagcccttgttcaagccaagacacaaaaggaccgcggcacagacatcctcgtctcatacacacagcaaatagaattgacacaaaaaatttcctctttatttgattgcagattaaattaagtctatacaaaaaggaggcctgaaggcctcggaagaagaaagaagaaactatttaaagatcggcgggggcctgggggctcactccgatgcacccgggtcgccagcctcgtcgccactgtcgcccgctccaccgtcatcgtcctcctcgtcggagttgagggcgaacgcgagccgaggggccgaaccctcgaagctgtggacgatgtggtcggcggcgtcccggacctgcgcgcgcgcgccgtcctcggtcccgggagggaactcatccagcgtcgtccatggggagaagtcagggtctctggcctggtagctcgccagtacgagctccaccgctcctcgggcgaggtccctcgaggaagacttaatcgtcctctcaagctcctcggggagccgttggagagtcccggccatctccgagaggcgctgggcgaggcccccctggttggcggcgtacttcacagtccgcccgccccagaggcctgcctgccggccggcgtgatctagacgggagacggcgtcccgaagcatgccgggccctacctcgcttgccaagcggagggcctcgacctccccggcggacgagtctagcgcgccctgcagatcggcgatggtgtgttcggcagctgcgaggcgggcggctaaatcgctttcgcccgtggccgccccgtcgctgcgcgccctcgtgtccagctcctttgcctgcgcctcgagttcagcggcccgctggttcagtgcggccctctcggcgcggacaccttccagattgcggcgcgcctgctcctcccgcgctgcctcgcggagggacaggctgtccgccagccgttgcgccgcggcttcggcctcttcgagagctcgctcccgctcggtgagcgcgtcctcgcggaggcggagcgcggactcctcttcggcgcaggcggcctcgtgcgtcgccagcgttgcctcccggatggcaacggcggcctcgcgatccgccaggtccctctccacgacgcaggcacgctcttccagcgccatggcacgggcctcgagggcttcttcgcgccgccgggatgccacctcggtctccgccgcccgctgttctcgggcagcggcagcgtcaaggaccccctgggcggcgtcgagcttcttccctagctccgcctcccagctcccgtattgaaggcggagggtgtcctgcgcctcgttcatcacggtggtggcgatgagggcagccccccgctcctcctccacctccttggcgatctcccccagcaccttccgacgggcttcgagctctgagacgtgccggcggtgtgccttgcggcccacctccaccatggcctccaccgagcgtcgcccctcttcgacacgcgcccatgcggcgtcgagctccgcccgctctgcttgcagggcctccacctgggcacttaacccgtccaacaccgtggtgtttgcgacggccaagtcctgcagaaggggttctgcgctcagtggggcgacggaaggcgtggggaagagccgcctcggagaagatgccgcgcggctcggcccgccgatggatgtgccggactcggggacgtcccccggacccggcttgtcctgagcgtcgcccgagggagtgggcccaagcgatgcccccgcggcctcgtcgcgagctgcctcggaagtcgtcgtcgcctcggcctggtggagtctggcctcctcccgagcagcttcttcagcttggcgagctcggacggccacctaggcagcttcctcggcatcccgaaggcgatccgcggcctcttgccggtcagtttcacgggtcgcctcggaggatgtcgtcgcctcggcctggcggagtccggcctcctcccgagcggcttcctcggtctggcgagcccgggcggcttcccgagcggcctcctcggcttcccgaaggcgatccgcggcttctcgccggtcagattcccgcctccgggcctctgcggtcgccgggtcctcggcctcagactggccggactgggaatggcgggagggacgcgacgggatctcgctgaaacagaagaaagaccagaagacaaacaagatgggtgagtgaaaactcgcgttgagagaatgaatacagccacgatgggcatgggacgaacctgcgagggggtcggttaaacgaccaccttggaggggaaataaggtttccccgggatggttctgtcccccccatcttgcggagccgtttcttcttccgctccccctcgggctgcgacgtcggcgtggccccctctgggcgcctgctgctgacacgcgccgccccgccccctcggggaggagatgggggaggggttcctccctgtttcctcttcccccgggcgtcggcggggcggctgccccccgggcccccgtcgcgaggcccagaagcacgaccccctcccggggtagattgttcccccctgcggctcccgcccgcgccatcgtggcctcgaggagcccgctcctccgacgccccgaccgcctgcatgatggtcaggatggaggcgcgatctggatcgctgcagagggggaggactccttggggaatgagggatgcctccacggagctgagattcagcacccgttggaccactatcttgaagtcctcaggagcccagtcccatctgactccctgatgggtcctcatgtagtcttcggacccggtgtactcccaggcgccccgggcgcgccgctggagcggtgcaatccggcgacgaaggtagtcgccgtacaccatggcccctgtgagcccctgggatcgcaggcccgccaggcggtcgaggacggcgtcatagccatctcccagatctaccggcgcccgccagctggaggcctgcgccgggggctggctcggaagtcggaggcgcacttcgtcggcaaggggggtgtagaaccagtcgctcttccagtcatcccacttcttgcggaggacgcaggggatgtagcggttcagcaccggcccccgcggctggaagtagcagccaccaaccaccgacggcggcgacaccgactgtacggtgaagaaccaccggaacagccgaagggatgggcgcaccccgatgaacatctcgcacaggtgcgcgaagatggccaatgtcattaccgcgttgggggtgaggtgcgccatctggagatcgtaaaactccagaacatccatgaaaaaagaagaaaatggcggaaccagccctgccattgcaaaagggaggaagaagacggaccgccccgggtagtgtggcgctgggcgtccctcgcccagcgtgactatctcccggccggtggcagattccggcatgaagcggcgcggcagcccggcctgcctctcgctcacgatgcgggaaggcggcagcacgctaccatcgagcagagcggagccccgtgccatgacgccggaggaagagatgtttgagagcgagcgcgtgtggcgaaggtagggcacaggaaacgcggagttagggcacaagcggcgaagacaaggggaataatggcgagaggaaggaagcaaatctcttcctcggtgtctttatacccttgtcaacgctgtgcccggctcctcgcttctcgcgcccactatttcgctccctcgtttctcgcgcccacgcttccactaatcccattcgcccgcttgcggcgcatgaggtggatatgcggaagtggcagtcgagatggaacatatcgtgcgcgcgttaattacgctcgccgaccgaagcgccatcaccatatctccaggcaaaacgaaccggctcgtccggattcgcgtgctactcgagtaatgtggcagccttgaagaggccgctcattattgacagtcgaattaccattgccgatgtgcgtgattggcgaccgttgggtttctgcccaactgtggagaccggtcccacctgtcaccaggccttaggaagtggcgtcacgcccgaccgcttccctcgaggagggcgatcgccctggcataacgccgggggctactgtcggtgacatgggaccgggagtatcatgactagaggcttgggcaggagcaatcacccacgaggcctgaccccctcgggggggtcgggcccgagggtgatgtggctgcccccctctttgtcttcccgaggggtcggaccactcccgtttcggccccgagggctgaggcgccccgaccccttgaaggttttttgcgccgcgtgtatgggttaggtgagcgcagcggggctcacctaaccgcatttattacggtttggacgggcgcgtcacgccgcatgtaacgcagtacagcgcgctcgtttatccggtctgtgaccagtcacagaccgatcagatcgtgggttaggtggcgacaggcggtctgacgcacgcctcgccccatcccgtcaggatgagagcctccaagcactcgtccctagccggagccggcgtgttagctcctggaggtggcacgttggacccggtcagatatatgtcaggcttcatcctaaccattacaggcaagatattgtatgaagaagggcgaacatgcagattgttaaactgacacgtggtggacaagaatgaccgatttgtgaccggtctgacactggtcatgtcgccagcagacagccatgttcccacgtcgcgcctgcctccggcggaagtggaggtaggtatgggccgtcccatcagaaggtcattcggacggcaaccatacaaatctccgtccattaatgaagagaagggaagttggagggaaagagaggagaagtccccacacaaaatagagagatggtgcatgtggtatccccttgagttataaaaggaggaccttgcccacttagagggggggggacggatcctgaacgatagaggctggattcggatcccagaacgatcaggggctagctcgcactttgtagcttcttcgtacacagatccaccaaaacacaggagtagggtattacgcttctcagcggcccgaacctgtatacatcgcccgtgtcttgtgtgtttccattctcgcgaaccttccacagaccgagagcttagaacctcacccagggtccccggccgaatcggcaaagggggacctgcgcggtctcccggtgaggagccccacgctccgtcaactataaatttggataattagtatatctacattcaaagtattagaatatgtcccatctaatcaaaactatttatctttcaggacggggagtgtggcagttaagagaaaaaaaacaatacgtgtatatctttttattggcttccaatggctacctggtcgggatgcgtacaagaagacagaaatatgccagacatgttgccaactgaaaaaagtctgcctggtctgcctgctagatcttgaaaatttgtgagaactgagactgttccttctgcaatggggtttaattgttcctgcacatggtttgggcatgattatcatctctttttttaatcatttgctgtactgaaatttggtttgggatttataacatgtgaacaacaatctctttgccactataggatctaacattcatatgttagcagcccaacgatagatcgacactattaatttttatgtccttaatctcaacaagattgtgcctttgagtttcaggataaggcgttccaatatttcttccgctacgtacaagtccctttaaagccattcagaaattatttggttctaatatattttttttacatcaaggcttctattctgttttaccaatttctgaattttggccatagaatgtctcagaaactggcagcatgtcaattctgagcaggttgttaatgccttttacttttagcactcaattactgtagcaaaaatatagagtacaaggaagcaatttgtcatccacattaggagctgtgatattcacatctggtctcacttggattaatacatgcagttaagatgccaatgggcttccaagcaaccacatctacacatgtgtcagcagttgggctacatcttgtcaagataagattagtgcttattgatagtatattgaatggtgtttcttcctcttacttgttctgttgttattcgtccagttccatatgtgaactgcaagtttatttggaaacttttccagccattgggttttaaggcagatgacacaaagctaaagtgtgtaggattggattattagctttatgcctgtatattatgtttttattccaggaatgccagtatcctctcttcctaaatccttaaacaaataaatattttagtgccatatttgacttggatcttttactgtaaatctataaattttagcggactctgcatgagacaggggttacactttcgatttcggcgatttcggtaggactgaaatttacgaaatttcgtgattttcggcacatttcggaacaaagtttcttgaaattttgacagattttaacagtttttgaataaactttgactaacttcaacaaaaatttgagaaaacctgaaaaattcggtcgatatattgatttgccagtggggtccgaaatttcgaaccgaaaatgcaatcactggcatcagatgagaggacaacacaggaaagggatgctataattgaagcttgatttataagaaaatagtagtcaatttgatggagttatatctacaaaagattaggcagaaaaggcattcatattttatttccttctcttcgatgaaataactaactgtaccttatttcagtcgtttacgtatgggtggatcaaagcctgccagatcgtgtaaatcaccctggtaaatctggagcaaccaggttgtgctggattagtggatcgagctgcaagaggagaaaaaacttactacttctcatgaccctccaattgtatttggtatagcttggataatgaattcggaagaaggttctgttatctaattcatctttgtccaggcttgttccagtatgcagctagccatgctcctttgagaattgaagatcttgctgcctacattcagtcaaacaatatggagcttgaaactacacgttgaaattaatgaaaggtttgggcgaggaaaatccatcacatcagacaatgcaagaggatacatgggctaatctatctattaacttattaaagaaatagaaaaaagaacatccatgttcgctctcacagcatagaaattctcatattaatcagagaaaaagaaaaacaaagtccatatagaaatacaatttagaaatacctgaaattcagaattaaaaaataaggaatattggaagaggagactagagtccatatagaaatacaattaagaaataatagaaattcggaattaaaaataaggaataatagaagcagagtatagagtccatatagaaatacaattaagtaataatagaaatttggaattaaaaataaggaataatagaagcagagtatagagtccatatagaaatacaattaagtaataatagaaattcggaattaaaaataaggaatattagaagtagagtatagagtacatataaaaatacaattaagaaataatagaaattcggaattataaataaggaatattaaaagtatagtatagaatccatataagaatttaaaactaagtaaaatttgaaataaacataataaaattaaaagtagagtttagagttcatataaaaatacaatttacaaataactaaaattcgaaattaaaaaaatagggagaaaagtataatttactaagttacttttataatttatataaattatttttagactttattaaatttacgatttactttcgtaaatgtatttacttgaagatcttctctacgctttggttatgaatttacttcacatagtttcttacttcaactcggttataatgtaattacttctaatggtatacatagttacttcttttgcatatctaagttacttataatattttaataaattacttttaaattaataaaatatttgaatatatttaacatgatcttgttttgtcacatatttttagtaaagtacaatgatgcaaatagatcttaaaaatgatactccctccgtcccataatataagggattttgagtttttgcttataatgtttgaccactcgtcttattttaaaaatttgtgcaaatataaaaaataaaaaattgtgcttaaaatactttagataataaagtaagtaaaaaaataaataataattcctaaattttttgaataagacgaatggtcaaacagtgcaagcaaaaacgtaaaatctcttatattatgggacggagggagtatgtgatttaaaaaatataaatcattaaagatgttaagaaaagacatgcaccatagcctaaaggggaatttgtatatttgatagagtggtctccggttaggactaacgtactaccgtgcactacatagttacatctaataaaataatatgttttatgttcaatagctaactatcatatatttttatgatgttttatagcatattcgcgttctttctgagttcgaagttaatggcatccaaaactaaagaaaggtcatcgatgattttcgacaatagaaaaaaaaagcgcaagaaacggaattaatcaaaggcctgagcagatttgatcaacggataggcaagatatagatagatactcctatcaatcagagatctgcggctgtgcgcccgtggacccagctcacatgcctctctcgtgcctgagccgacgagccgcttagccgagccgaagcgccaacctagctcatccctacgagccgagtcgagccaagcctaacataaaaaaggattaagggagtgttcgaagagaaggggattgaggagattgggaagatacgcaaaacgaggtaagccattagctcatgattaattgagtattaactattttaaatttcaaaaatggattaatatgattttttaaagcaactttcctattgaaattttttgcaaaaaacgcaccgtttagtagtttgaaaagcgtgcgcgcggaaaacgagagacaatctctcctatctccacctaacgaacactccctaatactagtggcactaaagttctcggctccgtaccaggtgggccccatgcgaggcgacacgcgtccgttccagctgtcggtcccagccacccacgcatcccccgcacccccactccctccccaccgacacgtgggccactacgtggttcggtcccaccctgtcagtgacacgggtacatagcaccccggtgcgtctggttttcgcgccgggggggggggggacgggtttattgtttggggctcaagtccatgaggcgccctggtcacaagtccgcagccttttctcacgcgtcacgtgtttacccctgcctcactgacagatcggcccgggtgatggcgggacccagtcgtcagtgggtgcgaggtgggttttgtgtggggtgtgcgatccccgcgcgcgtgctccttcccgcgccggttttgatgtttcgcgggtctccgttcgaaacagcgccggattttgctcagctaaatatgccgtcatgtattttcttctatctaccttttcccttttggccttttcttttgggactgacgatgggttgaccatagcataaatgcatcatcattttattcattttagtatgaaaaacatataagtggtgtttttgatattggtggtgtttggataggttaagatgaaaatgaagtcaatactcataaaatgaaaaaaaaatcattaaggctgtgtttagttccacgccaaaattaaaagtttgaaaaaattgatacgatgtgacgaaaaagttgaaagtttaaagaaaaaaaagttaaaatctaaacaggacctaagtaggagtaattgagtgttaattattataaatttgagaaatacatttatttggtacttaaaacaacttttataaagaaagtttttgcaggaaacatatcgtttagcagtttgaaaagtgtgctaacaaaatttgaggtaaaacctatcttaggctgtgtttagatccaggggtaaaaagttttaacatgtcacatcggatatacggacacacatttgaagtattaaacatagactaataacagaataaattacagattccgtgtgtaaactgcaagacgaatttattaagcctaattaatccgtcattagcaaatgtttattatagcaccacattgtcagatcatagagcaattaggcttaaaagattcgtcttgcaatttatacgtaatctgtgtaattagttttttttgcatatatttaatactttatgcagcatccaaacattcgatgtgacagagtaacaaattttgccggaagatctaaacatgccctaggctgtgttgttgtgttcttaggtgaggattggaaaacacataagagagttggtatttggaacacaaaaatagcaaataattcctttcttattcctgtattttatctttcttacttcgtttcaaacaagtctctagactttaaattttgttgtaaaacaaaccaactttatattcttgtctaacatcggtttagaaattttatttcttcgaaacccttatctacccatctaccaatacaacttttgtattaattaaagatattttgtttatttgtgttccttcttaagtcctttattaggatgccaagatttaattttttttaatagagtaggtttcgtatgaaatatgattaagctagttttgattgttttgaatacctggactctctcactatatttaacttcatgaccactccgcttactaagaatgcttacttaaagggacaattgctaatttagcctcgttttgaagcctaattatcaatctgatcttacttttacaagtttactcatttgaccttattttttaaaattgaagttgtcatctgaccctgttttctctacaccgttagggttccatttcatcttggggtgtgtttagttcacgctaaaattgaaagtttagttgaaattgaaatgatgtgatggaaaagttggaagtttatgtgtgtaggaaagttttgatgtgatggaaaatttgaaagtttgaagaaaaagtttgaaactaaaacaaggccttggttaaaatgaccaaaatacccaggagtacacctcaacaccatctccttgactccttcccattctctgtctgccccattcgctcgtgaaccacgtctcgcctccccatccgcgcacagaggcagagagggtggtggcggcgtgtggaggaaacggcagctgcggcgcacgggagcctcgacgtgcgccgcgcggagggtgcggcggcggcgacgcgtggagggagtggcgacggcggcggcgactgcgcgcggagaaagcagcgggcgtcggcgccacgggagctccggcggcacgcgggaacctcgagatgcggcgcgcggtggtggtggcgcacggatgaagctgtggcgacggcgcgcgaagaaagctgtggcgccaacccagtcctccgccccaggcgcttctccttcctggtcctcagccgtgcagctccactcgtctcagcctactccgtgccatcatcttcgtcacgatgccaacaatagaccagctcatggagttgtgcacaaattatgctgttgcacatggatttgtgctttgggatgtctttgttagacatgaattaacttatgttctttatcttttgacaaatattggtcaaatttaacaaaaatatgacaaatctaggtcaaatctttcttgatactccctccatctacttttgatagtcatatttccaaatctgaaaaatttatttttgatagatatatttcaatccaacaacctactttctctgtttcacaatgtaagtcattctaacatttcccacattcatattgatgctaataaatctagacat

SEQ ID NO: 24342 - DNA, 14932 bp, Oryza sativa
  unsure (1)..(14932): unsure at all n locations
caatatgaatgtgggaaatgttagaatgacttacattgtgaaacggagggagtatcatcttaataactttctcggatttaatgcgtgattctctattctttcacacaagattatctatatgggcatcgagaaatgtaaatattaatgaatcgcttgtttacgaggaatgactagtagcatatttaaatagatgataagtagaatatgactattaaaagtagatggagggagtatttcacaaatctttctcgatatgtccaatatacaaaaccagctcaaactaactaaaagctttgataaaataggatcaaatgagcaagggtaaacaaggcattttgtgctatatatagttaacaccgttacctcaccttaacataatagggtcaggctatatcttcgatttttgaaaagaatggttaaataagcaaagttagtaatagagggttaaattggtagttagccttcaaaatagggtcagatgcacaattaccccttacttaaatcgtcaagtttttgtttaaaaaagagttcatttgtaacttgttaggtaccctcgaaagttttatctcttgactactattgtgacatcctagcccaattaagataatgcatgtgtggcatatgtgagctatgtgcacatatttagtactccctccgttttaggttttaagaagttttgactttagacaataaaatcaaattgcttcaactttgaccaagtttatagacaaatatagtaataattacattatcaaattagttttattaaattaataattaaatatatttttataataaatttatcttgggtaaaaaatattactatttttttctataaacttggtcaaacttaaaacagcttgactttgactaaagtcaaagcatcttataacctgaaacagagggagtaccgtcttgctagtttagcatcagtggaaccaacttataagacctattccaaccatatcactctagggttaacccttttacacgaagcaaggacgaaagtgtaagtgggcccgcttgtcagatgggctggctacgcggttctggagggagggttgttacaaatggtatcagagccgaccctcgtgcttgcacgaagcgaggacggaattgtaagtgggcggagtggtatgtgtaagtgggcccacctgcaagatgggttggctatatatgtgcagccgtggatattcgtgtccaacgtttgaccgtccgtcttatttgaacaatgtttgtccaaaatttacatatatctcatctgcttttataaactataacacatatatgtaaattttgtaaacaatgttacttaacactttgtcggatgaagaaatgacaaacataaaagttatagatcttggtgagttatacaacttcattgttgatgactttttttagttgaaatcatttagtatttgaaaatgttgtttgaagttgtcatattttcaaattcaaattcaaactgctcaaaaaaaagttatttaaaaaaatgaccaaaataaaagttataaatcttggtgagttatacaactttgttgttgatgacttttttagtccaatcttcgtaagttatacaactttgttgttgataattttttccatttgaaatcatttagtatttaaaaatgttgtttgaagttgtcatatttttaaatttaaattcaatctattttaaaaaaggtatatagaaaaatgaccaaaataaaagttgtaaatctttataagttatacaactttgttattgagaatttttccatttgaaattatttactacccgaaaaattattttgaataataaaataaagtattatagtgtagtaaattattttgctacaggtcaactcacaaatataaatatttcatatgacaaatggaaaaaaaatactaagtcatctcaatcgagcattagtatagagtccatcacggatgagtcatccctgacgggcctatttgttaccgattgagatatggtcacacaggcctgagttttatgcacatctaacatgtctatgcgaccatatctcaatcgggcaattttttggcccgttacagatcactcatccgtgacgaccaactaatcacagatatgatagagaccgtcatagatggaaggttatgtactagtggtattatctgtactattattatcgatctgtggagaaaatcatcaaattacgcacaaccccatagttgatagatgcataccttagcaaatgaatcaaatttcacatagtgtggatcttcaaatttcacatggccagttttattcgtaagcatatagaggaaagttcaggcatgcattgtaggacatttaacatctcgatcactgtttatttttgcattggaagagtagtgtctagtattagtttcttaatgatgtgaattttatggaaactatgtctagtgttccccttttttttgggngggggggnttttngngnannanaatgnnaccgcnttgtantnttntnanaacccccccgaaatattttnttttnaaaattnaannnaatttnaaaatttgggggggnnggaannaaaaaggggtttttgggaaaaaangcgannanaccgccnnacatttctggaagggtataactctatatgaactaaatttgctgagcttgaaattagacatggtgaaatgcacttgtattaattgcattttgcatataatgtagaaggaaaaaagtagcgaattcggatttactctgatctgtaggtcttggctgcaaacattgcaactaaaattttttaattcacttcatctgcatcaaaaaggttttgctggaaacttatcactgagaattgagactgtcactgctggagaaattataaagttacatagcctcttctcctcgctggcgcaaaagaagccaaggacgctcgtccatgctgtttccgtcaagttcggtatgcaattccttggccccactctcctctcccatttccaatgtctcacgttggatacatcgcctccgctcttgcccccgaaccacataggctgtctttcctgccaccgatcctacacaacgccctcttcattcatacagctctaatggtgctccgaccctacacaacatcctcttcatccatatggctctaatccatctacatctatatctacatcagtgacttgatgaatagaaatagaaagaaaaaagaattttttatcggaattgctaaatgtcattcaacagaaatttaggtatgaaatcttatagattttggacagttggatccacgccaagattcgcgcgtcaacttcttctcctctaattccggtaggcttcccttcttctccggcgccaacgacaccccaaactttggcaaggagcatacgggttagtgtttgggattgcggttatgataggaggggggttggaggagggaggaggggggggggttcctcaggacttagagggatggttgtgggcggttggtggtggacaagagcgggttgcgaggcgccgtcagagccaaagtcacgggattggcagcaggtggagggccggctttggcggcgggagaaaacaacgagactggttaggaggcggcggccagtgatatccgacggtggggagccgctggagacgaggaagatggtggggcaggggcactcagcaccacaaccttgggggaggcctcgccagggccattaacccggcagggtagcagcgactatgcaggaggtggagcactgctcgtcgcgtgcgtgagcgtgaagcggcagcggttggcggactaagaagggaaggaggaaaagtagggtttaggtatgttgcacaaatctcaaaatatcaaatggtcctgaatttggaatatttggggagttttttctttgtcaaaatccacctagaaagtccttttttatagttagactgacattcactttgatgaagtttataggagctagtatgtcatcgatgataatgatttgagaaaagtttagttgctttggacaaggccaatgtttgtgccaccatgagcaataggagtggggtacactggaaagagccacaactatgtccaaatgtacaatgcttatgactggtaagaaaataaagtgggcctcgctgggttccaccaaaagaaagaaaatggcaaaaggtcccgcatggcagccaaatgactacaaataaacaatttaatgcaattttgtattttattagtatgaatagcaaccctatattttattgtcttgtgaccacaccttaagcttaggccaggtgcatcttagcttggtgatacttatggtgtatctccacaatggcaaatgtgcaaaacttagtagcattaaatacttaatgtgaccttttttcaacattgtggatgcccttggagcaggtacaatagcagactataagtaaactataaacacatatcgagaagataaaagaagagagagaaaagcagcgggctataaatttatagccagctgcaacacgaacttcaagatacaatgtgtgtatgatagctggggtctgttggtatttcttaacgacattactagaaatataattcccagcaatgatgcagaaatacttctggtacattattgttacagagttcatctgcaagcgcacggatataccattgtagcattttacccgagagtattccaagggtatcatatttgtttaatcccgtgagaagattataatagagagaactatagtaataatttatatattacttataataatccaaagtctaagcaggggttaatataattcagagagtagagtgacactaagcagaagcattcatactcttatttataattacctaagctaagtggaaagaatatagaaagatcatattcctatacttctattacgcaaacatattatgcatacatcctagttatatcattacttagctaatgccctctttccgatgtcctcttggtgtttcgagaagccacccctgattgcagagtttcttacgacaatccattatgaccattcaaccagggctaaatacagaggagtaccctccccaggaaattaacttaggactatatacacgcgcggaggaaaaccggtactgagctgtcaccatcagcggcccacctcgcttccacaacatataaccccaaataataatatccagtaatataaacaccacgcttaaattaccaaatactactctaatatcgtcgtcatgacatagagtcatcatatacacgatgattatacgcacaccattgcatctcctagataagctagcatcataacaaatatgacttggatatataataaagttggtattcatatactcggaaagtaatacaataccaaagtggtataaggaagaatattctaaataaagtacaagtcttacaaaagaaggaaaagctattagagccgtactcgaattattccgaagactccgaggactgaagattatattctatttctattccactatactctagagactatactaaacttatactaaacttgagagatgaaatgaacttcttgcttgaggtgtgtcttgaaatggagagactgagggggtttatataggctggtaatgacggttggaaaggtcggtaatatccaccaactgtcattgaagatcaatcccagccgtctagccaaaccctgcaaccatcggcgctgcggctggttcggccgaaccctgggctggcccaaccggcccagttcctagcaggcggcctcctctcctgttgctcacttcggacttgtgaattttggtccaattgatcgtgtcatttctgagttcttggtccatccttccataagtctgattcttgacatcgtccgattgattgaccatctatttttatgtcgattctcctctattttatgtttattctttgcaagagattagtaatcctagtgctagtggaatatatattatttaaatacaaatatgcattgcgagcataactagttcttattttagtaatattgacgggcgaaactgatcgctaacgaccgtcaacagggccatgtattagtagtgtattatatgactatatatgatttgaatagtagttagctatactattaaacttgcttttaggagtcttcatcgtctcactcaattggcatctcctcttaggcctagttctttccaaaaacgttatatcgaatctttggatatatacacggaacattaaatatagataaaaataaaaactaattacacggtttgcatgaaaatcgcttgacgaatcttttgagcctaattagtccatgattagctataagtgctacattaacccacatatgctaatgacagcttaattatgctcaaaagattcgtcttatggtttccaagcgagttatgaaattagttttttttatttatgtctaaaaatcccttcggacatccggtcaaacatctgatgtgacacccaaaaattttcttttcgcgaaataaacgcatctttactaaaccatggaccttatccatctacaatttcacatcatatttatttaatgaccgatgaacagaaatagaaaaagaaagtatttttttaagactaacattcgatatttagaaaattataatggcatggttataatttttttttatggttagccctgtttagatgggactaaaacttctaagtccatatcacatcggatgtttgaaaattaattataaatattaaacgtagactattaataaaacccatccataatcttggactaatttgcgagacgaatctaatgagcctaattaatccatgattagcctatgtgatgctacagtaaacattctctaattatagattaattaggcttaaaaaatttgtctcgtgaattagcttttatttatgtaattagttttgtaagtagtctatatttaatactctaaattagtgtctaaagacagggacttaagttaagtccctggatgtaaaaaccacctaacattcactccgcacctaccgaacacaccggaaagatccaaacccaaaataaacaacgaaactcgcacaaaaaagggaaaaagaatgcgccaccgtggcccaccgccgtgacctcgccgccggcgaggcctcccctgcccatggactccgccggcgtcatcctctccatcctcagcaagctgcagtctctcggcttctgcgcccatctccggatcggcgacgccgcggcctccggccccccctcggacctgttcgacaccgtcctcgccgcgttcctccgcgaggtctacccgggcggccgcgaggtgcgccctctcccggcgaagctcggcgacgggagccgcgtcgacctgctccgcctcttctccgccatccgcgccgccggcggctacgccgcgacgtcgtcgtcccccgccgtctgggcctccgccgccgagtccgtttgcctcgacgccaccctcgccgcgcccgtcaagctaatctaccacaagtacctcgccgccctggaccgctggatccagaggctcgtggaggcgcatggacccttcctggatggcaacgacgggaggaagaagccagagccattcttcgattccaatggaagggagaatgaagaaccactcttggaatgcaatgggggagatctgcagcatccaatcttgaagaggaagagggaggacatggttgggatgttggattgggtcagggagcttgccgagaatggcggtgaggcaggcaccatggctgccggctcggcgaatgggtactactcgttggcgttggcagcgaggaaggcggtgttcgcgaagagggctcgccgctcgagcatgacgatgaatggtgcactcatgcaggttattccaataccttcagtagcactttatcgaaatgtttggcatcattcatgttgtttaatcgtattttgatgtactaactgaattgaggttagcttaactatgatgattcaccgattgtattaaggccttgtttagttggggaaaatttttgggtttggttgtcacatcggatatacggacgcacatatgaagtatgaaacgtagtctaataacaaaacaaattacagattctgccaggaaactgcgagacgaatttattaagcctaattaatccatcattagcaaatgtttactgtagcaccacattgtcaaatcatggcacaattgagcttaaaagattcgtctcgcaatttatacgcaatttgtgtaatttttttttgtctacatttaatactccatgcatgtgtctaaacattcgatgtgacaacgtgaatttttttgttttgggaattaaacagggcctaaatctttttgctcaaatccaattgataatgcttgttgagaatagaccaacttattgacgcatctttgtgatatttggcattttagtgtaatttggagagtacatttgtatttcttagagattacactgatatgattgtttggaagatagtataatgccaacagaaagcctaggcgaaaacattatttccgtcaattcctcccttctgagccatagttagatactcgacataagttgctacctgagtcgggagttggctataattgttgatacatgctaaaatgatcattctaatcgtacctccaatacttgattatttgatatctatttatatgttctatagtaatcttgataagaagatgcataccttttcgctctttgataacttgataccttcacaataataaaatttagaggagtttaaaggttttctttgggttctgattgattcataaattcaattgagtttgtgagaatggttaagtgtctgaatttcaaaggatatgcattgcataaaaaacaaataaatccaagttttttttacatcaaaacgagttgtggaaaacagcaataagcagcactccaaattctattttggaagctttttatgatgggaaaactatcaatgatacttttaaagcttttttagttataatgaaatgaaattgtggaaactcccatagataggcaacttataattcacatgctatatctttcttaggtattcaatcttagctaagcttttcttgaatttctctgcttcttatctttctctggcattcatcactgtggaatttacagaacagtacagaattcagcttgaaccatgtttcgcacaggcaacagcaatactctgggtcgatctgcaatattattaaagataactttgaggaataataatagcattcggctgctatacggaaagttcttttttatgactaactcatactaactaattctctctcctaggcagatggattatatttttgactccacctaagactgatcatatgattccttgtttttgttccagcttctagggtttcctcttgtataatctcatttatatactgtaatcaatgtattcatttatgatcttttagcttaggaattgaggcctatgggggtctcatataattattgctttgaatatttgtgttggtggctgtaatgatttgttcaaacaaaactgtttttgctacaactcactgacacatcgtaatgctgttacaaataatttggggcctatccttttataattttcatggcactgaaacatactctttccttacatcctgctattactagacttctatttctgcaaaaatggtgcagactgcagcgtaatccacagactctgacccctccactaccaactttggttcactattcaatttggggatactgttcagtttagcaacagtacttaggaaccatatttatttttgtagattactgatccaaatgccatcatggatacaaattacagattatatcagattaatgataattatatcctctgaatgttttggtttatggcaaaaccaactcctactgcatagcaaatccttctgcacactctgatttcccaaaagctttgtttgaatcatcatcttggatgatcaagaacttcgatatctactgacaaagaagtataaaggctcttaaatttagtctacattgaccatcatacctaaaactcctagtttatgcataaatccttctgcatcctacaatttccttaaatcttcaaatagaattagattttaattagaatggaaccacaaatttagtttttgtttggtttccaaaggaactacagtatataaatcgatttgtaagccaattctaagggtcaatttgtgtttgctgatttactgtgctgcgctgttgttcttttgtttttagcatggaaatgcagatgtaaaaaatattgtagtttactttgtaaatcaaattaagtttagttaaattttgttatcaaactattaatttctcgaactcattcagtttttggttgccaaaggaaatgcaaaatccgaaatcaccatgacgttgtgattttcgtgcatgatattgtcctagcacctaatataccccttttttgttttctgtcgtttgcaggaaatatttccaatggattgcaagtgctgcatgagttccagcactactggaattgacacacaagaaaaatgcagtaaaaagattcaacttgtcattccacaggctggttcagatattaatgaattgataaatgttgtagaaaacataaatgtgccttcaattggaatggagcaagagaacaacattattggacaagcgaaatatgagagtaggaaacatcataactctgacaactggctttttacgagtcagcagaggaacaaaataccagtgggctctgagttccaagcacaagtaccacaatggactggtgagttgcctgtaagctatgataatgcagaaaccaggaaatggttgggcacaaaggtctggcctctggaaaatggtaacaggaaattatcatatttttgtaaccctgttggaaaaggtagagaaggtgtttgtggctgcaaccttccaggatctgtagaatgtgttaggtttcatgttgcagaaaggaaacttcagctgcgacgtgaacttgattcagctttctatgcatggggatttgatcgtatgggagagaaaatcgcactttcctggacagattaaaagggagcaaatttcaaggctttgcgtgcagcttaatgcccctttttcaggaaggaatttctggaagcgtctccatatgctttttcagtcaaagggtaggaaagaacttgtgagctactattttaattgttttctacttagacggaggtgttatcagaataggatgactccaaataacatagatagtgatgatgaggatgagacagaatttggattcttgggtaaccgccttggtcataatgcaactaagtatgacagttcaagtataccctttgcatcgaaagtacacactgcatggatctcaaccaatagtttctgatcagcattaatgaagatgattgaagtttagtagttcacttctcttgctgttgagtgtcttggataaggtttaaataggcggattggagttttggtgtttaacttctctcattgccaatggtttctgcgcgatataaagaagcttactgaaatttggcaattaatttcttccattgccaatggtttctgatcagatatagagaagccgattgagtttgataatacacttctctctttgcgaaaagtttctgatcagatgaatgctttcatccactgatttcttatgcagacggaaatgtaaatgcttaagtgcaagccaatcatttgaacaagttgcttaccgctgcggaagatttgaccgaagcttgcgattgaagttgggaggcaagttttgatagagtgtagtggcactgatatgtgaacaatcacatggattcattatatccacaaggtgaaaaagagaacagcggtagcatttttaccgatgcttccttgaaggtatcacatgtaccattttctagttttatcctttgtgtaaagtagttttgcatacattgcacagtagtatgattaactgttccttgctctaggctcccttttcgtagtatttatctagactaagggctcctttggatgcacggggagaaaacccctgggaaataatcccccaaggggatcttccctgtgacatatgaactccctccatttcctagggaagttgctcccgtgagggaaaagtcccctacgttcatttggaagactcccacgaggggaaattccacgctccattcctttgaaaatgctagctgctagggtttaaaatgcgtagcatgataaaatataaaactcacgataactaacgagcaggagaagataatcagggtgacaaaataaattcaaaaatttcatagaaaatttggaatatccacagaaaattccaaaaattcagacattcatatggaaaatgcatagcaaatttggtaaaaatccaaaaaattcacaaataatttgaaaaattcaacattcagctaatacaaaatatgaaaaattacaaaaattgaaccttggatgattggaatattttacataggcttacattaaaatgacagataaagcaagctaaaacattagtgtgatgtcttttcaacaactaatgtgcaatcattaacagttggcacacaaatagacacacatgtaagcaaaggttaagtggaaaagatataatccttggaattttcaaataatcatctcggtgcaactggtcttaatctttactcttgtcacttgttgatccccaaaactgcaatttcacaatagataatatgtcaatttttttctcaattaatggttgcaaatcaaaacacaagaaacaacaagggacaaatttcgcgaatcatcgctgaagtgctaatgtattgcatccacaattatgcttctaggattctatacaagaattatgtatccagaattttgagggctattttcatgtactagactaatgtactttctacatgcatactgtattatgttaccagaattctacagtgctactaaggtaagtttttcatgctatgctgcatacaaagtcaaaattcctgaatcatttcccattgcatacaaccagataaataaccaccaaacaattgcaaacggagtttttaatggacacttaacaacattggagataagaagatcattaaaaactgatagtgattcagaattatgtattgcttccagaattctacaccagaattatgcattcataatttagagagctattttgatattttcatgtattccaaaattctatacagtactagtcaagtaagtttttcatgctatgttgcatacaagtaaaacattctgcatcctagggaacttgacatagaaaattctgcatcatagggaacctgacaacaataatatctcaaattctcaatcaaccagaacttaacatgatatttcccattgcaagtatagcagggaccaatacgaaaaatagttcatcatcctctagtaaaaactttctaatttgctcgtttgcagagcccatcacttttctgttagaaaatcagactaaaattacaacaaaaaaataaaacaactgattggtaaaaaaaaagagagcaagattcatcatggcaaacacaaaaggggcaagaaagaattatgcaagacagcataagcaggtctgccactaaaattgacagagcaatactgtacgtaaaaacatctcaatacagccactaattcttcctgcaataagagcaggatgaacaccaaaacaggtttaattgcaacaatttctttgatgtgctatggttcactgtctcatattcagaacacaatttcaattcagccatgttatatactacaattcagtgattgactagcacagacaacagttaaatcagctaaaatacttcaatgaacagcctactaaaaaatcttatctgtacaatgtactttgcaaacaaaaatcatcatgccatatactgtgcaaacaatgaataataacattattagggatacacatgcagatgcagtgcaacacgtacttgtccactactatattagtactcatcatgtctgcatatagctataatagtacccatgagtgctgtgcacaatacactgtagatatgaaatcaactgaatcctgaatttctgatcatctctgatggcatatgcaaaacttatagctaagctgccattaattaattagacatactgttatgtggatcgatctttcggcgtatcgatgaaatgaacaagtcagtgctagctgtatataagctagtaattatatacagcaagacaaatctctgtgatactaaacagcaaaacaaatctagcaagaaggagatagatagtcataatcatctcttgcagtgcgttctcacaatccacagaccagaaactccattgaaccctagcacctgcgtgtacccatccctccacggattcaacgctcaagaacaacataaatctaccgggacaacacagaaccaagcttacagcggggaagaaactaacagagcaagaattctttgcgcgcgtggagaaacaaaccaaatcaagaaacaaaccaaattctttgctaccttggatctgcgcctcaacgcctcctccgccggtgcgtcgcgccaccttggatctccccccggtcctccgccggtgctgtgcgcccgtgctgccgaggcgccgctgcgtcaccgccgcgtttctgtgcctgcgatgcgagagatgagaccgaacggaggcgaaaaccctagaggaggagaacgggaaccctaggaggatgagaggaggggaaagaggagaagggcttatccttctcgccggaggaagagtcccggtggtggcgcgtctcaccggaggaggaggcacggcggcgcccgctcttggtcgctgcttttgcgcgagagagcggcggatcgggagaggaaaatttcctgacctcgagaggtcgggttcctttccctggggtttccccgcggattgggccgggaaatccctgcctcgtgggtttccaaatggaccagaaataaggaataagttcaccggaggtccctcaacttaacagcgatattttttgaggtcccttaaccacaaacccagaaatgtgtacccctaaactcacttaaaccgtttaccggaggt

SEQ ID NO: 24343 - DNA, 2775 bp, Oryza sativa
aaattttttgaataagacgagcggtcaaacatatgctaaaaagtcaacggtgtcaaataaaacgaaacggagagagtatatacgtctgcatgttatcgggcggaaaaccaacaagaagctagctaggctatagctggtcgtctccatgcatgcatatatatgctcgtacgaagacgcatgtacatgcggccgtctgtacccggcgtatatgcgtatgagctacgacgtcaagtgctaccgcgacgtcgtcgaagacgacgagggtcaccgcgcccgcgccgaccaccgtccacgacgccgatggcacaccgagcgtggacacgctcctgctgcagctgcgcgagctgggcgtccgggaggactatgggatcaggccggcgacgctgccgccgccaccactgccgctgtcgcggcacaggaggagcgcgagcgactggggtgcatcgtcagccggcacttcgagccacctatgcacggccactgcgacgcctggccgatgccgccgaacggccgcgccgtgtagcctcgcccacggcgacgacgacggtggagagccgatgatgacggcggccacggcgcgcggttgctccgcccgtagcctccgctccgccgccgcgctctaccgccgggatcacccgccgtccgctccgcccacagcctgccaccgctctgctgccgcactcgccggccgcccgcatccgcgctcggccatcgcggctgcgcccgccgccagcctgaaggagaagagagaggagagaagagaaaaaagaagagaaggagaagaaaagagaagaaaaaatatgtgaagctgacatgtgggccccacgtacttttttaattttttttgctgactaggatgccacgtcagcaaaaccgggcaaaaatactgccgaggtacctccagtgaacggtttgagtaagtttaggggtagacatttctagttttgtgattaagggacctcaaaaaatctcgctgttaagttaagggaccttcggtgaacttattcccagaaataataccagtggcaatttcccccgcgggcctttctcccagggattgggccgggatcccggtggtttcctgggctgctaaaggagccctaagggttagatccttaaaaagctatgagcatgtatgtagaggttagtcttcggaaactatcacttttttaagataatggaagctttattaagactcagtcaaatacaccaagatgatacattccaactgagcccacccccggcctctgcataaaatgcacacaaccaataaaaggacaaaactaaacccccatcacgaaacatagatattagtgactatcaatccatagactagattgccacccatgctcctgggtaaaaacatcccgtgccacctggtccaaatgtcgagatatcaccgcaatagtatcccgtaatcccggtttgtggaggatagcccaggtacgtaaccaccgggttactagagtaataacctgtagaggagaagaccctaacttgttatcaaaaataaccccgtttctggttagccaaatggaccaacaaataggtggtgcacccatcaaaaacagatttttcatttttttaggaacacatgaaagccaacgcccaaacatatgagtaacatttcgaggaggttgaaagttagaggccatatgaataacggaccatacccaacgagatagatgacattggaagaacaaataacgagatagatgacattgaagaccaaatgttgaatggtttcatccttatgacaaaagcaacattttttactacctttccaatttcgcttagctaggttatcttggttagaattactccccgacgtaagtaccaaaggaaaacttttacttttaacggtacattaatcttccaaatacgtctattaatattcgggacgcccatatgaacaagagctatgtaatgtgaattgatcgagaagacccattgggggtgagattccagcgaaattcatcttgctcttgtgtcaacaccaaagtaaggtttaaaagccattttttatgccagccgcttattttgcttccattaaaatttcttctcctaaaaggcttgaaggtttgtttgaagaattgtaatttgcgtttgtttatgcctaactataacagttatagagacaaggatattgatctctcaacgaggcattacccaaccacttatcttcccaaaaccttatttgagagccatccctaatacgaaaagacccaaaccgaaaaaaatcttgtttggccttcataagactatcccaaaaatgtgagtcgcctgctttccaataagcctgagataaaggttgtgatcccaaatatttgttacgtatcaactgttgccacattccgtttgtggtaagcaacttgaatagccacttgctaagtaacgctatattctttacctcgaggtcatgaattcccagcctcccttgatctttgggacgacagatgatgtcccacttagcaagctggtattttttcttatggccatccccttgccaatagaacctagatcgaaggtaatcaagttttttaagtaccccactaggtattgcaaggaacgacatcatatacattgggagactactaagtactgagttaatcagtgttagtcgccctcccaacgaaagaagttttcctttccagctacttaatttcttttcaaatctttcgaccacttctttccattccgcatttcttaacttcctacaatggatcggaatgccaagatatcgaaaaggaaaattaccaacctggcaaccgaaga

SEQ ID NO: 24344 - DNA, 1342 bp, Oryza sativa
tcactaaattgtcagctaccgagctaattggtttgtggcgaccttagtgaatattttataactgacatttaacaagcatattggtctatattgttggattcgatttgcttcttcaactttcggaataagagtaatccccccaaagtttagaccaaaaattggaaggctgccagagtggaatcctttaaataatctcagtagctcatgcttaatgacttcccaaaatttttggtaaaattcaactgggaaaccatgtggtccaggagctttattatgatccattgcaaagatcgcttcctttatttctttctcagaaaaggagcagtaagaaagtcattttctgcttgtgtggcctgagccatatcctcagttatgtgctcatcaagtgaaaatgagttttccgctggcggtccaaagaatttcttgtaaaaatttgtaatgtatgttttcaacgcctcaaccccctcaatttttccttcatcctgatctaggaagaagatccatcttcctatgtttgccattggcaatcaagttaaaatattttgtattattgtctccaaggagaacgtctgagacttttgagcgttggtaccatctaatctcctctgcacaaagtagtcttgcaagattatccctcgattgatcaagaagatttctttcttgatccgaaaggagtcacacctctgcagcgatatctagttcgtcaacggtccgttgtagatgagcttttttctatttaaagataccattggtatgagcagaccaacctctcagatgtcggcgtaaagcgctcatttttttattccatcgttggactgcattacgacccttgattggtttattccaaatttcgacaacacgatcatggaaatcgtcgcgcagaaaccagctaagttccatcttgaactgcttaaggtttccggcaaaggccgcttcccctgtatcaaggaacaaaggcgtgtgatctgacacccctctatctagtgcatgaaccgattccatagggtatttggattcccattccgtggaagtaagaaccctatctagcttctcatacgtcggtataaggagcgagtttgcccaagtatattgcctgcctgttagagcgatctctcttaagtcaaagctatcaatcacaacattgaagagaaaaggccagcgagcgttgtatcggtcattgtttatttccgcactacttctcaaaatgttgaaatcccccctattagagtggggagatgattatgctggcacgtgcgaactaactctgccaacaaactagatttaaaatcatcttgggccggtccatacactcccatcaaaatccatttaaagttatcctccc

SEQ ID NO: 24345 - DNA, 3317 bp, Oryza sativa
  unsure (1)..(3317): unsure at all n locations
tcctgcagccccctttggaggagttgtattttctgagttccttgccttcttatgcacctgatcatggtgaccatcccttgatgagtcatcttgatcttcttgtgtgtccccatcatgatccatctgatcaacctccataatcttagccggacgaaaactctcattttccaaagcataagtgatagggtatcccaactttccaaagacaacatccgttgtgatcggcaacactacactgctatgcatgaacaccttcattctaatcacccccgtgcgtctgtaagtgagcatatcaacctcctgtgtagccccaatgacacaacctaatgcccaaaaggccaagtaatgatgccatggggcgggcacacccgacacatgtatccacacctcatccaattcatatgccggtatcacatcatcaggagtcttccactcaattattgtcattgaaaccccgtgattctttagacggaattcaacgtcatccatcctctttaattcctcaaaagaagggaaggcgacgaggaaagagttgtcaccatgagggacagcttcccacttccagtccggccttatccgatgagctagctcggcctgaactatctctcgggacagcacgccaccgtgaatggataccaatgccatgggagcagttgagggtgattgcacattcattccaaagccactaatttggagaaaaccaaactcggttttaccgaaaccaaaaagtgagcatgtgggtttcggcaacttgagcactggacacttcgttgctagatgagaatccttcttgttgcaaatgtagcaatcaaggtccgctttgcatacctgcgccatatggccacttgttttgcacctgtgacaaacaggcggtctcggtttctttgctttagctgtctctacttgctgcgttggtatctccctctgttgttcttggtttgtcggcaccggcgctgtgggtggttgtaccggtctaacttggagggcagtccgcgactggtctccatgatcggcggcccgggattggctccctgatggaacttgctgaaagagtggtgctgcccttgagcagcccctccttgccagcgttgttgcctccaaatcttgggagatgtggacgctggaactgctgtttcctcacgacgttgcccagccatcgccgggtcgagccgccattgccgcgtacgagagtttgccctggactggttttttgggtagagattgtggtaccaaccaacgaatgcgaatccgaactatttcgatcccaccaccgagaggcaggggtcgggaagccaatttcctcccaaaagttgtcaactaatagtagagaatcggaatctcctgtttgagaggcagttttcatctcctcaccttcaaggctagctagtagccaactaccgagtaactgttctgaagcagggaaaagagacgtgctatccatggtcgaaagatgatcaagtccagacccatgttcttgatcgcacccgcttggaaaagctacaacgcccatcctcaaaaacatcagataaactatgtcgacgagaaggacgccgtgcatcacctccatcgatttgggcatcacgtgcaacaacagcgcagggcttccggcgccgacgccgatgacgagaccctctccctggactgaaacacgatctctgcctgacagggagaagaaagagccgccgaggaagacgatctctgcctgatacgttttcgtgattaggatgcagcgccgatgagggcaggaggcatctgcacagagcgtggatggcggcttgaaacagtgcccgaatcctgttactgaataggccagtgccaggagacaggaggaggatccggcgcctccgccagcgaagccccgccctgaaatcgcccaactatcgcccctccacaaaactcgggcattcaaatagatgaatactgtatgatatttctcatgttcggaaactatcacttactccctccgtccaaaaaaaaaaaagacaaaccctaggttttcgtgtccaactttgacgtgccgttttatatgaaatttttttataattcgtattttcattgttattagatgataaaatatgattaatattttatgcgtgacttgtctttttaattttttttataattttttcaaataagacgaacggtcaaacattggacacggaaaccagggtttgtctttttttgggatggagggagtaagatgttgttctttgtagattcagtatatatgttgataacacccttccctgtagtctcctttcgacttgcaatatatatggttgaaaaatgcccccattttattgtgttccagttcactaaaaaagttatcacctactgtgatgttnnnatnnggtacttctgatctatattcagttcatgtggannnnggcgcannntgtattgtttgtntnntgnttttgatatgaaatgatgtacgtaaacaggtcaaatgaagtaccgaaattccgtgctttttnaannatttnncnanaagaggttncccatnncgnctggtnnanananaggnnncnnccctnngncnantnaanaantngnnccaangggnggnttnttnggggatggtatatgcctctgaaaataggacttttgtgcttgttcagtatgttgcaacttgcaagaaaggaattgccagccaggctatattttctcgttgttactttatccttggaaggtaccaaacaaagtgaattttgcttttctgcatgtctgaaatgtctgttaaatttcatgacggaagtttaatccatatatatatggcgaacatacactggcttgaaactaagcattccgtttagtcttgtgtgaaagattgatgtttcttctttcatggagctccattattgaatcatataatgttatgtgaaatattattgtttcttcttgcaaatggagatccattgttgtatgtaccatgtattgttatgtgaaagataaagcagggaccaaagaaaaatactttgttgtgtaacgggttcttttgcatgcacctaatgtttgtaatggttccgttgcaatgcacgacgacttttttctttatcttttgctttcatttttttatggaaatgggcaatgtcttcattttccattatggattttttaacaacaaagcttggatgccaatgcccatctctttttttggggtggggtgggcgctcgtcattagcgctttaatgacctgtgctaatcacattaattatgctaataaatgaatagttaagttgagaagttttgtaatataaaatgaaagtttcccttatcggataacttagacttgaaagtttttaaaatttgagttg

SEQ ID NO: 24346 - DNA, 835 bp, Oryza sativa
ttctgtcaagtccgcaacaccataccatgcatccctgcacacgcggtgatttacgtgttcagggggggtgtgcggcacaaccgcatgctcgaaaagatcgcctccaaagagccccagactaccgcggagctttttcagctcgcggaccgagtggctcgtaaggaggaggcatggacctggaacccctccgattccggtgtggcagcttcggccgcccccggatccgctgctcagacagggcggcgtgacaggaggaggaagaagaggtcagcccattccgacgacgagggtcatgtcctcgccgtcgagggcgcttcgcgggccacccgaaaggggaggcctgcgagcgacaaaaagagggaggccagcgctcccagcagggagcgcccaaccggcaagtggtgcaccgtccacaatacctcccttcacgacctcgcggactgccgcgcagtcaaaagtttggatgagcggacgaggaagtgggaggaggagaggaggcaggagcgccgagagggcaagtccccggcggttccttccggcaatcggcgaagtgaggccaagcagaaggcccccgccgaggacatcgatgacggcgatgatgacctaggttttcaagagcctggggccaccattgccactgtcgatggaggagcgtgtgctcacgtttctcgccggagcctcaaggccatgaagcgagagcttctggccgcggcccctactcatgaggcgacgcgccgggcgtggtggtcgaaggttgccctcaccttcgaccagaccgaccacccaccgtgtgttgcccggggaggacagattgcaatggtggtttcccccactg

SEQ ID NO: 24347 - DNA, 2709 bp, Oryza sativa
ttttcacacgcaaatagtagtaaccttctgccaactacgcattgcatttcgtgtaggcagtcatttacaatcttacatgttttcagctttaaaaaaaaactgtcatctgataggccccttcattgattaaactatacataatagtatgccaactaatcatactactccgtagtagtagtagtatgctagtttgagtatgccaaccatttcatttcatctcgtatttggcaatttgagtatatgccaacttaaaacatacgagtattaccagtttgagtatgccaaccatcctatttcgtatttggcaattttaagtataccaactcaacatactagtattatcattttgagtataccaaacatttcatttcgtatttggcaatttgagtaggccaactcaatacactagtattgccaatttgagtatgccaaacatttcatttcatatttgacaatttgagtatgccaacctaacatattacttcatcatactttttaagctaccaggcctaatatatagctaataaaattaaagccacactttaactatatattagcgattctaatcaactgattcctaagattgatagatgagcacggtctcgatcgactctcgacagcacacgacacgcacatggtgctgaactaagtgtgtaggtattatcttcttctgcctaccatgttgctcctatatatataaggcggacatccatagtggccacacgtctccaaaagactcgggagaagagatctaacagtcaactcgtaaaatactccctacgtttcatattttaaattatttgactttttttagttaaacttgttaaagcctatgtttataaaaaatatattagtattttaacataaaataaacatattataaaaatatgtttgagagtagaaacagccggcgaagcgtgacgatggacgctcgacggcggcggctgtccccggtggtggtcgtagcggcttttcttttcttccccctgttcttcggtaaggctgcgatttccatctctctcttcttcttttctttttccctttttttacattttttgtttggttatgtcctgaaagggagccagccggcggcggcgtacggcgaggcttcaggcgccggcggcatgacggcactgcagaagcacgcggcgttcttcgacaaggacaatgacggcttcgtctccccgaccgagacatacgacggtgagcttcaaaggccttctaaatttctagtactttctcgtttcgcttgtgaactgaacacgatttggttggtcttggtctgcgcgtattttcgcctcattttatcctctcatggttgcatgcatcgcagggttacgcgccctcggacttggagctggcttctccatcttaagcgctgcgttgatcaatggcgtactttcactcaagaccagacctgtacgatcagtatctctctctctctctctctctctctctctctctctctctccggctcaaaaaactatctgaagtttttatcgttttatttactgaatttaaggtgcctcactagtcactacaatgacgtgccgttttgagagttgttatcatcgcttaactactgatgacaaatactccctctgtccctaaaaaacgaatctaaaactgaatatgacatattttagtactatgaatctggacatatgtatgtccacatatatctagatttgtagtattaggatttatcattcagtactaagttgatttttatgggacggagggggtagttgtgtagtgttaggctatcaactcagtagtggcttagtatagttcgtgtgccaattttttttagtatacggatacatatttgaagtattaaacgtagattaataacaaaacaaattacagattccgcctataaactacgaaatgaatttattaagcctaattaatccatcattagcaaatgtttattgtagcatcacattgtaaaatcatagcgtaaaagattcgtctcgtaatttacagtcggactgtgcaattgtttttttttcatccatatttgatgctctatacatgtgtgtaaatatttgatctgatgaaaaagttgaaaatttgaaggaaaaagttagaatctaaacacggccagtattgaaaatctaacccttccatgtacttcactgctactgtcctgatcagacctcaattctggacagccgcttttcttctacagtaatgttctataattattatttttttctctaagatcgttagaacgtctctccatgtactcgttttaggttataagatgttttgactttggttaaaatcaaactgctttaagttttaccaagtttatagaaaaaaatagtaatattttttaccaaagataaatttattataaaaatatatttaattattaatttaataaaactaatttagtaatgtaaattactatgtttgtatataaacttagtcaaacttatagaagtttgactttgaccaaagttaaaatatcttataacctaaaataaaaggagtatgtttttaagtgaaccatttccaatgaatgacacattacatacaaaaaaaaaaggcgtcaaattaatcgttggatcatgttgaattcacgcaggacaatgcaacatcaccacgcttagataatgggaacttataaaacccggcttctacaccaacggggatgtatacagccacagaaaatccgaccaaacaagctgggctgcagga

SEQ ID NO: 24348 - DNA, 1183 bp, Oryza sativa
tcctgcagcccattttttacaaagagtttcaaatctaactcctgattagacaacagttggacttcagccttcttttctagcttgtctgctttgctatcaaaagaaccttctccctcttgttcgccccgctaacattcttcgcccaccctctcaaaaactgtcagagcctacgaatcttaaattgccatttttccaacatattagaccctctactttcctttctccaaatgtctgctactagatccacaaagccatctcttagcaaccatccaagctcaaacttgaacaacagttgtttattagcatgtgtcccagcccccgtatccagcaacaaaggagtatggtcagagagttctctattaagagccctgacagttgctaacggatacttttgttcccattcagtactcattagcactctatccaacttctcaaaagttggattgtgcaacgagttggcccatgtaaattttcgaccagagagttctagttctctcaaatccaggctgtctatgacagcgttgaacaaaaaaggccactttacattaaagttattattattcttttcactagccttccttatgatattgaagtctcctcccataagaataggtatagactctttattacaagcattaacaagctctacaaggaaagcctccttatattcttcttgtgttgccccatacactgccagaacgcaccattggaagccatctaccttattttgcacatggaactttacatagaaatctccctcatctatacttgcaacctcaaagaattccaaattaacccccaaaagaatacccccaggtctccccttcggtcttgtccaatgccacataaaatctttaccaccacaaatattttttagactagaatatgaaaaatcatgttttccagtttccaaaagagtaatgaagtctagcttccactccttggaagtctctgaaaggaatctaaatttagccaagtcacctagatctctgctattccaaaaaattcctttcatgacatacttttcttatttttcaagatcactttcaccttttgtcccttgtttcttttgaagaatgacttggacttataaaccttgaaacccttttttaagtcacaacttaggtgatcgggttcttcgtccataacttcgtccactaagccaccacataagtgaccaagg

SEQ ID NO: 24349 - DNA, 9301 bp, Oryza sativa
cctgcaatctatagattgcagactgcttatgatggaagcctgtttgcgaagctggtgaaggcgaggagataggagcaaaaccaggcatgattgttgacagctgacgagagcttctgcattgatcctcctaattaagcatctcagattatgtgccactgtgctatgtgaacggctgactgtgtattcttttactccctctctaccaatatacgagacaaagcttttgccctcctttaaaaaaaagagaacaattgagattatgtccttttttttcttttcgagaatacgaggagacgatttgtaccggattttaaagatgagggaggccctatacttggttgtgtgattgatgcttgatgaggttattcaaccagcagatagaaatcagggatgctaaatagacttattcagcaaatatacgcttggatgggttgttatcgtattacaatccgttggaaaaggcccattaccaccgggaaaactacctcggagcccacgcaaaaattacgacagaaatccgacccacactgcgctcctagtcttccactcttcctcgcttcatccgctctgcgcctctacccctctgatacatgtctgggaggtctttacctgtataccattaagggctcgttcggattataggataggaaaaacttaggataggaaatttataggaataggaaaggaatttaagtgtaaaatagaggaatgaaaaacaaaggaatacaaaagttgagagcattcagatcacaggaaattgattgcctaggatttgcatgcagaaagcgaaaaaaaagagctcgaggtggatggattttcctgtacttttcctgtgaaattagcatcaaaggaaactttcctttggatttcctacaaccagttttcatgatccgaatgacaggaaaggaacaaaatcctatatacagtattcctccaaaaatcctgtgaagttcctctaatccgaataagccctaagaaagatggtgcctgcctctgtgccactaaaaagtttgaaccttcctctatgccatcgtcgaactttatcacgccctccacaccattccgtcgctattctgtgtgagtttaaccgtttggcagctctgacatgtgggcccgggcaggaaatgtcgctcttgcccttttagtgtctgcttcgtttcaaagagaggccaggcggcgtggcggacaagcagccaagcgcggcattgaggcaagcgaccggtgtggcgggcggcaaccagccgagggacggggtggtgtggcggccaaccgacacgagcagcgaggcagcggatgaggaggtgaagaggcccgtcccggaggagaagtcgaagcccgtcatcgtaagtagggtgctggtgcagacctcgatctacacaaaggaagaggtgaatgccatcctgatccagtgcggccggctcagccggagctcgtcatcgtcggggatgcgcctcgtcgtcgaccgtcgatcccatcgtcgtggcgcaggttggggctgacgctggtaggagggtcgtcgtcggggatgcgccggctcctcgccaccatgggggccgccgaggaggccgcggcgtccgcggccgccgccgccgccgtcctggcgctctttgtcggtggcgcccccgtcggcgggatcgatggtctcatgggcctccacctcagtggccgtctcgtcccgcgcttcaaggaggtaggctagcgcgcgcgctctctctctctcaaccctaagggcaacaaagtcatttggttgcgctgttacccgccgttgggacaaaaacggacggaatggtgtggatggcgcgataaagttcgatgatgacataggagaggctcgaactttttagtagcacggagacaatactatcttttttaatggtatataggtaataaaaacctcccagtctggcagtctcctccgccttgggctcgtgtctccgtgcagcgcgccgcctctccccaccgccgccgcctacacacctccccacaccaatacaccatcatcccgtcgccgccaccatgctccgctagttcgctctggcctaaggctgctcggctcctctcgacatccccgtcgcggcagcctcaactgccctcgccactgtcgaggcggcttcagtccatgccaccgccgtatagacggccttgatctgcaatgttcaaacgaggtctcccgcccccgcctcatctgtgataatggcatcggtgtgatgaccacagaggatggtcgctggtcggcatcggcggcatggctggacagcatcggcggcaagactggaagctgcccacgcccaggatacatggtggcatgctgatctatggctctaagaatgaaattggcagtagctttgatttttggtctgcaattcgatgagatgttcttgattttcgattaccaatgttcttgatttccagatgcttgatattatccacccaaacggtatatacgaggggttcttttactttaccggtaattatgagtaacacaaagttaaacttatatttggattacaagggtataaaggtccctatcctgctagagtgtttgtctgtttgataagcaaggaaaaacagggctgaaatgaatgatccatatttaccaaggaaatcctcggaagtcatatgcatttgcgtggggacagaaacttagaaaccgttcaccaaacggtggaaaagcagcggccgtaagaacaacgtggttatggccttttctggcttcctcacacgaacaacctggctcatttgtatttaagccgttgttgttttctcgctgtcacggagcccaatcagtaattgttactctcctcaaacagccagtcaaaatagtaaacctttttccaaccatttaatttcgcgtagccagtcatgcacactatacaaattttacaggtttcctattcagcgagaaaaacccagtcatctgatagacaggttcatcaattgaaacataacaatctgacgagaaatctgtgacagatacagaatgacagcgattctcgccaattgattccattcctaagattaatggatagatgaatggctagattggtgggaggctaccgtaaacatacaagagacacctaagaaggcactccgcactttgatgttgttggtcgcctgggagatatggaacgaaaggaatcgcagaaccttccaacagaatgagctttcagctacctcccttttagccaagaacaagaaagaggccaaaacttgggccttaacaggagcgagaagttttaatagctggctttcttttagttagctcggaccaaaggtcctagctcctttctttttttcttttactttataaagttccccttctctattcaataaaattggcgctcgtccattcgttcaagaaaaaaaattgagcactgtctcgagagtacacggcacgcagcaatgttgtttaagagtgtgggcattatcctcttccaaatcgtggttaaggcctggtgtcaaaaaaaaatcgaggttaaggcagtgtttagttccttcaaactacaaaaaattccgtcaaatcaaatgtttggacatatacatgaagcattaaatgtgaacgaataaaaaactaattgcacagtttgcatgtaaattacgagacgaatcttttaaagcctaattacgtcatgatttgacaatgtaatgctacggtaaatatttactaataatagattaattaggcttaataaattcgtctcgtggtttatagacgaaatctataatttattttgttattagtctacgtttaatacttcaaatatacgtcgatatatatattttggtacacgaagtaaacccggcctaagctggcgagttagggacctgacatatctatcatgttgctcgctatatatagcgcggatatctggacacagaggccacacgccgtcgagactcgagagattcaggaacagaaaccgccgagagagttcgtagcagtcaacgcgcgaggcagggccgagaagaaaccgccggcgacgcacgcgcgatggacgctcggcggaggcggttgtccccggcggtggccgtggcggcggctcttcttttcttccccatgttcttcggtgaggctgcgatttccgtctctttttttttgtttcgttttttcagttttgttttgttgcggcgctgtttgattttgctcgctcgcttctgaatcctgaaagggagccatacgccggcggcggcggcggcgtacggagaggcttcaggcgacgccggcgtgacggcgctgcagaagcacgcggcgttcttcgacaaggacggcgacggcatcgtctccctctccgagacatacgacggtgagctccccatctcgtttcacttgtgattttatttgtgaactgaacacgatttggtctgttcatgccgtgtcgtccttccgaattttcgcctcattttttatcctcatctcggatgcaccgcagggttacgagcactcggactcgggtctggcctctccagcttgagcgccgccttcatcaatggcgtcctttccccaaagaccagacctgtacgcttccctctctctctctttctctcactctggctaaaatgttactatctgaaagtctttatgtttttattactgaatttaaggtgctttattagcctgtaattacttgcagagaattcttgcttgtttacatcactacaatgatatgctgttttgaaagttgtcatcagcgcttaactatctgatcacataattctgtattaggctatcaacttcagaagtattgaaaatctaacccttccttgtacttcaccactactgtcgtaatcaggcctcaattctggataagttcggtatagacagtagggtgtgaattgtgatgtaggcgtgacatattgattaggattagctgctactatccttctttttactgtgatctatagctattttttctctaagattgttagaacgtctttgtacgtatatcgatataagtgatccatttcctatggcatacgaaaagagatgttcaattaatcgttggatcatgttgaattcacgcaggacaatggaacagcaccacgcttatctatctacatagagaacatctacaaggggattcatggaagcgattcaagcgcctatgattctgaaggaaggtaattaagctgcggttgcagactactttctgctttcaccttggctcttcaatttgacccttctcatccaaagatcattcgattcatttcacagactattttcactccggtgtatctatttcagtatgattgctaatatttcaagttttcaggttcgttgctgaaaagtttgaggagatattcgccaagcacgccaagaccgtgcctgatgctctgacatcggacgagatagacgagctgcttcaagcgaaccgcaagcccggtgactacactggatggtagtaattaattttctggctattaccactcaaaatattaatgaactttcatgtgatcttactactgtatatgctgctgttcttgctcgaattgaaatgcagggtcgcagcatcgtcagagtggaagattctgtacaagatcggcaaggacaaggacggccttcttcgcaaggaggccgtgcgagaagtctacgatggaagcctgtttaccaagctggcggcggcaaggataaacgacgaaaaccaagcatgattggtgacagctgatgggatcatctccattgattctcctgattaagcatctcaaatcatgtgccactgtgatatgagaacgattgagatgatgtctgaacacaaaaagatagtcatgcaagatagaagtatgaacaagtgtggacagaatctgcagatggggatggatcgtttagttctgtccttttttgttggtttcttggggatattgaatgtttatattattatacctgcaaatggttggcagtgcaaggctgcaagcaatggcacactatttatacatttggcgtcccttagcccgtagttgcccgtgatgccgtgatgcttgtcttatctgaactctgaaagtctgaatcagttagcagcattatcttcgtgtgtgcttggcaggtcgaagagcttccgttcctttctctacttgcagatcgtgatcgcctggtactgttaacaaatcgcagtgtttctatgctggcaagtcacgcacaaggggaacacattagttgtcaatcatctcatcaggtggagcttctatgcaaaatagttgtttattcagcgaattaggtgggttttctactgttaaatggcgcttagagatgatgaggcaaattaaacaaagtacatttaacccaaaaaaaaaacagtatgcaaaatcctacttgttctgttgtgcaggtgaagccgaagaaagtggtccaggttgaactgtgcaggccagctaatacagtacatatggtccatggactcggataatgtccatatggtccacgaaacgaatggaatttccatggactcggaccagtcaggcccacaattgttgcgctcagcccaaccgcgacatcgcgagacgcaaaaccgccggacgcgtgggcctgcacacggaatctcgcctgatatcaggcccatctcacgcgatccggcctacctggctcgcctcaaccgacgtaaattcccgcacgcgcacatgctgctctaaaaactcttccgctccagaggcttcacagctttctcctcccgtagagccaagccaaccaagcgggagcagcatggctacggccacgtcgacggcgacgagcgtggcggcggcgctcctcctctcgctcctcctggcgcgcgcgcggggcgacgacgactactcggggttcgtgtacgccgggtgctcgcaggggcgctacgcctccggcacgcagtacgcgtcggacgtcgactccgtgctcacctccgtcgccaacagcgcgccctactccccctacgccaacttcacctcgccgacgtcgaactcggtggtcggcgtctaccagtgccgctccgacctcccggcctccgtttgcaccggctgcgtccgctccgccatctccaggctctcctcgctctgcgcctgggccaccggcggcgccgtgcagctgcgggcctgcttcgtgcgctacggcaacgacacgttcctcgggaagcaggacacggccgtgctgttcaagaagtgcggcggctcgccgggggacgccggcggcgccgccatgcgggactcggcgctcggcgcgctcgtggccgccgcggcgcccgccgggggaggctaccgcgccggcgggtccgggggcgtgcaggccatgtcgcagtgcgtgggggacctcggcgccaaggcctgctccgactgcgtctcggccgccgccggccagctcaaggccggctgcggctacgccacggccggcgaggtgtacctcggcaagtgctacgcgcgcttctgggggaacgggggcggtggattcagcagcggcgccgccggggacgcgtacggatctgggcatcgcgtgtccggcaaccggttcgttctctccgtcgccggcggtttcttcacttccttggcctatatatttgtactcatgtagttactgaattacagttgcagtatgatcaatgatcgtgaactagactactagagtgcctgtgtctgtgtgctttatgcgtggtatgtaaccactaatcagcatatctgcatatgtgatgcgatgcaggtttactccttgtgcttgaacaaattaaacttgatgctttctaacttaaatggacttcttatcaagtttgtaactgtaaatttgatattctaaaattgcagtatgtgtagctcctcgttctaaaatgatcaatcatgttgatctgcatttgcagtagagttcctttaattcggtggtgctgttaaagttccacctcgtgcacaaacagaaactcacaaattgacatgcagcatctccctctctgtctgagcgtgtccacaaatgacaaaaccataactctaccgcgctaagtctagtcttgttgaaatttcactggccagctcagatatcataccttcagttgtttaatcgactaatcaccagtatctaacaattcgaacgtgctgtacaccaattagaacactgcagcataccctcctccacatagaccctgaatacctggtctgatcgtctggtgtctgaactgataatgcagtgctcaaaggcatgctactggcaagaagaccaaaagtgctttaattctcctcgcctttatctttgctctgagcttttcttgataggaaacttttgacatggacttgctttatcgttgtgatcactatgaagttttagtagaatatctcaaaggggattcaaatgattcagcttttcgcttgattagcattgaaatggagggatatcgctggtatccctcacattgcgagcagcgtagtgtggtttgctttttgtaagctttaggaggttaagctgccagccctttcactagttactaggcctgttagctactactttggattaagttaatcagtactactactatcccgctgaatgccgtatctgtttaagtttcaccgtacattattgtcacctctccagtataagcttgttgcaaggtcgccagcttgcatgctatgattggatcataccggtggctttttgctggaacgccgcctttccttttgctgtccttgttcttattaccatacatgccttctcttttggtatgcaatgggtcaaaggaatgaacaccaagcactagggctggatggaacaagctagagaaaggactccactccactgtgcttcatgtggagagaagatccagctagatcacatagctttctagccggcgatgccacccctgcatcggtagtggagaaaatttgtttgcaagcaatacactttaactttgttaggatagttcttctccttactttcgccgggagatagttctccatacttgttcaaggaagctagttcactagctgtttcaggctttcagcttggacatgccatttggaccagagataagggggagatagagaggtggggacgctgatatgtgagccctatatgctaactgttgagttaatcggttcgaccagatcaatgagtcatgtcaacaaatattgctgtaaatagtgttctgaaaatcaaattacattaacggttaggagatcaaatattcagtattagagttgagagatacaaatcagattgaacttatatttgagagattcaaatgaacttgctcctttcactctttcagtgcagtgctgcagttcagacagtggtaacgggcccacggcctgacccaacttggccattgacagttttagcccgtactggcctggcccaactgcactt

SEQ ID NO: 24350 - DNA, 1404 bp, Oryza sativa
tcctgcagcccgacaaaattgaaaataacagtaatggtttacagccaaatatctctcttttcaagaaaatgtatccacctcctgaattatgagttgtggtgttactatgtagaattttctacacttaatcagtccatattgcctacccagaatctaccggagaatttcttttccatgaattctagatctaccaggcaatattttatatcaaaagcatagtgatactttcatattccatgaataaggacaagtaccaagtaccttttgtcatttgtctccaccactcatctatctgtttgcctttctgaagctgatcactgttcaaatgctctctaattgaagtgttgaaagaccaaatccgcaaagtttggctgctacttatgaaatcaagaagaatactttgaggactgatattatttggatcaaggctcttgtcttctttgtggaacgaaattatcttccttgtagtttcaacctggtaacagaagaaataccagaatggtatatagagttatagacggtaaattaagacaaccacaagacatcatgaaaggaaacattagaagtattaccaaaagtttgtatgtatttaaagttttatagcaattggatgtgagattagtttagctgagtttgtcgatcgctgttattacttgttagtccttgcagttcccaaaagatgagcacgaaacaaaataaagcactctgaatattttcatgaggaaatctttttttggtaccaaaatcatgtcatcaactaatcaattgaatatgattcaccaaaagaaagaggtgtttgcagatgatcttagaaagagacatcaccttcttgggtccgaactaagggtgttcatcacaatctcaatgcggataatctgtgcgagtaaccaagtgacatgattactgcgaagaatctgttgatcactatttgttactcgagatgcaagcttgtccacgaaatcaagaaaatcaatacagccacttttcatcagaaagaaaaaaatgtcagcaaataaaagccaatcttgccagcactgagtctctgcaacagcataaaaaagaaagaatgaatataggcaacagacagttaccaaagacttgcacatatctgacaataatggtaagcaaatttaatttcttgaggtaaaagtttcacgttctaaaagaaaaaatagtgaaaagggtgcatcaatagaacatttgaaatttatattcccatcagctgtccacttgaaaaaggaactttattatattgacaaggtaaatggttaactttcaaattctaacctgagttcgtgagcctcagtagttcaattgtcctgtcagcaactgcctcaccgatcatatcaggtgagaaaacagctcctggcgttgatgattgttgaggatgttgtctataacaag

SEQ ID NO: 24351 - DNA, 8952 bp, Oryza sativa
tcacctctagctgtcagaccaagctgtccagggctagagaattctgctcccttaatgggtgagacatttgcacctatgggttggtcgataccagattgagtgggagatcctatagtgttcattgctgacaatggagatgtgggatttgaagggtgaaagcttggggcatttggcactgcaatagctgatgaagaagatgttgccgggccaccagtagtcacagaaaccccttgccccattggtacctccacggaggaaactacattaagtagagaaggaaggagactgtcccatcgaaggtggcctcgagcacacaggcaacgtgtggcaaagagcaagaactcagattgtggggcgtggctactacactgcaggacaaatgagatgagaactgattccgtaactgcctgcagctgctcttggtcctgaagaaacatgcaaatcaaataataaatttgttctgttctcatgacataaacaaaagtacttgcgtaatgattctgcttactgggaactgcatgtgcaactgctcaaaatccgaaatgaattgctcatctcggggaggcagatctctgttcatagcagttactctcttctgcaacttgttcctgaggaaattcaatgcccattatgcattacagttttagaaaagcttgctgaattgacttccatcgtcaaactaccatatcaaattttgtccaaaaactaccatatatcaaaatgaacaaggcacgaaaaaccgctagagtacagcacactagttccaaaattgcggcaataatctccggatattccagaattcctttcaaaaaaaaaatctccggacattgcagaagccatcgccttcaaaggtaaagttgaacaaagcgcgaacgacaaggacaaaataatccgacctaacctatcataatgtttcatgtgctcgagccctcgagcaatccagctagccctaaaaagtaatccccaattagaagtccaacaagtgggaaatcaaacttacgaggtctccctagttggatcctcgacccgctgcttcgagttcatctgcaaatcacagaaacccagggtctgagctagcgttcacaagtgcaccacggttagagattggggaggagagacaaggcacgcacgccgaggtatagggtgaagagatcggcgatggacgaccgcgccgggtggtggtggtggtggtggagctgcatctgccgctgctgcgggagcaccgccgaagcagagatcgccggagacatcggctgcctctgcccgtgcgccccgtccatcgccgatgcgccgcttccgtcgccggcgactggagtggtgcggtgggcttgctccgaccgagggtttaggagtgtggcggacctgacctgatgagctcttgcagtttgggggaaagggaacagatcaacggacggtgggatgtgtagtctcagctgcatggagacggatccagaccgctggtatgcattctacctttctcttgggtcgaaaaattgaaattgaaacagaacaaaaacatgttctctggtatatttgtggttcaaattagtggccatataatcgaaagctaccaaataccatccggttatatactcctttcatttcttttttctttaacgtaggtggaataggtagtatcatgcttggtctcattattttacgtacagctaattataagtcgtgatgattttatattaaaactttaatatatttgtccttactagaaaaaatacacgtacattgcaacaagtaaatgttattttaattttattattgttacacaatttagctaaggtaaaattcaatgtgggaattcactttgatatttattgtttaaaaaaaatcatgagctgcaattaggagtctgtatttcatctcaagttagcatgcgagttttttcaaaagattttttatacgattccttctatacttccaaaaggaaacaaggttaaaatccaactcaaatacggatatgtatttccaaaaacgaacgaacttaaaaaccgactcaaatacggatgacgtaccaaaataccggcaaaaacatctttaatttttataataatagagatagagaagagattgaataaaaaccaatgctgaaaataaatcacgataaaaaaaactactatgaaattaaatttaaaattttaatttttggctttgagtgataaaacgaaaagcatcgatgctaggactcttacaaatattggagtatattgaactcaaggatgatcctacatatcacacatctgatatgtcccattgggatggtcccaaaaacataatttgaacgaattttgtgaattcgaccagctactagtacccagcaccggcgcttccaagaacaatccgcgcgaacgagcacgtacggcgctacaaaagtacacatcacaattgacacactacagtacgtcgtgatcggtgaactaaggcgcccgagacggcgacggcgccggcgacgcggcgagaggggtggtggcggcgcccccgctcccggcgctcggcatggcgtcccagaggaggtcggcgatgacccggttggcggcgtcggaggtgtggtacgcgtcccagaagacgaacgccttgcggtcgctgcagggccgcgagttcggcaggcacaggccccccaccgtcgtgtccacgttgcagcacgacgtgtgcgccgtcgtgaaccctgcacacacacacacgcacacacgcatcgccaacggtgagacacgcccgccgacacgcgccggaagtttgcgttgattgattgattgattgattaattaccgtgtttttcggggtggacgatgagctccatgacgacggagtagcagtcggcgagcgccatccgcgcgccgggcagcttggcgttcatgccgtcgagcagcttcttggcggccgcgttgaactccacggcgtagccgttcacgtggtccaggcacttgccgttgccggagtggacgcgctgcgacgggatgcagcccagcggcggcagcgagttgaacaccaccttcctcgcgccgagcccgtacagcctctgcaaaaacgaacaattcaaccaccgccatggacgatatatcaggccacctctttaaaattggctaatgggggggtcactgtcacggcgagattggtgggtgttctgcctttagttgccggtccagagtggtgatgaggaggcggatgaacgtgtcgtgcgtgtacgtctggccgtccgccatgaacggctgcaagaagttgttgatgtagtcgttgctcccttcagaaacagcagtgtatttcacgtcatttaacggctaaaaatccagctaactatctgatcaaatgcggtcaaaactcaaaaggccgatcgattcacgagaggaaaatattgtaccaagtccaatttggaacagcgccgcattgacggcaacctcggcggcctccttgccgatcttggcgatcatcgccttcttgaccatctcgaagcacgatatctgctggtcgaatgagaagtactgaacctgcaaatcggcacgccacgttcaacaaacagtgccaacaaaagtaacaaatcgtaaagcataacgatgatgcgatatatgcgacttacaaagtagacgcccgtctcgttcagaatgccggcgccgccggacgcgaagttgacgccgccgaggacgtcgtcgtagaccattgacagcgacaggaacggcggcggggacgggacgccgaacttgtcagctgcatcaaccgaaatactgaatcaggtcgaatgcgcgtgtggatcatcagctagttatctagcaagttgaattggttttgcatttacccatgtagtctccgatggttcttccattggtgaacctcccggtggcgacgccgttggggtagtcgatgccgtaccaggggtagttggacttggcgagggagagcgggaagtagttgttgttccccacgtccgacatcgagtcgccgaacacgtatgtcaccgggcctttggccggtggcggcgccgcggcggcggcggctgattgggcgagcacggcaatggccacgacggcggcgagagcttgagctgccattgttgcttcggcttatcagtatctgcgcctctgtgaatgtgttgtgcacttgtgctgatgctgtgcttgtgttgcatgacgaggtggcacgcacggatttttatagcgcgcggatgtacgcggtggcgtggttaagtcgtgccattctctacaagtttgggttaatctaagcgcaccgtttcaagtttcccagcttgtcagcttgagtgcagtgatgaaccgtgcaacatatatctattcgtgtggccatctgaagaacgaattcagagaggaattggcatgtgtggtagctgaggtggttgaagaacttggctctctttgctctatagagcagctttgacggtttaaatcggtagtgggaagggtatcagcgacctttgcaatcaaatagaccatatgactgaacaagaggtttccctttttctctgaataaatttccccaaactatagaatttttaagagttctcattttttaattaaactattacagaacactatatattcaaaatgaaacttaccgatttaatatcaaacttaatactacaaactatataattaagctggagtgtcgcaaaattacaaatttagtaatcaaatcaacacataactatatgtctaggtgtcagtttaataacaaattttagatgtttataactctaacataacattagtgatggtgaattaaattctaaaacatatagtttgtgataacattattattaaatctatagttttgcaaaccttaaacatttatggtaaatttggtattaaagctgtacttaataatttgatcgaagtaatagatttcaaatttaggcactgttcttttctccaacaaaagttgaattaaattttggatactcgtggcacgcttttcaaactgctaaacggtgtgtttcgtgcgaaaactttctatatgaaaattattctaaattataagattaatctattttttaagtttgtaataattaaaactcaattaatctcacgttattatcatctcgttttgtgtgaaacacttcatcttcatcttcaggagattgcgtgaaactcctttactagtagaagctagcatctcatacccagcgtgagcctgacctgggctggggcaatgcctggttttctttgggctaataatccagtacgcagcagcccattacggcccctataactcccatacacggccagacagatcggccttggactattttgggccattatttcccagttctaacagatgagatggaccgaaaatttccgacacacgaaggccgataaaaaatctggaaagcaagagagccccccgtcgcgtgcgaggatagggagagaggtgaaagagacacggaggagagggaaaccaaggcggcgaggcctccgcctcactccggtggcgacacggcgggctcgccgccatgacaggagctctggcgatgatgccatccacgtcctccccctaccctctcctcgctccgccgacctgctcctcccgcctcccgcctctccgctgcttcgtcggcctccggtggtccgctccccgcatccaggtaggcccgtttccccgttccccttcttccgagaggagcaactgctgtctgaccacagtagttatacagctgggtaatcgtgaggctagcctaggtggcgttaccgttcggctctgttgtttgattctagtggctgcttggtacaggtcagggagtatccggatgcggttgcagggattgccaagggtgcgggtggacgcggtggtcgattcaggttggttcacctatctgctccatgaactatggcaacgtttgaaaacgttcagttgttagattgctgctactcggacgaattcatagtaactgtgtcgtggtagtgggcaatggaagatggttggacaatatgtattggttcccattgctctccacaaactaacaccagcgagatatgtacctgttgttttagaagtgtcacttgatgtggtaaaagaagcgtgaaagttaagacatctgtcaggtgacagaatgggctgtttgcgctttgtcacagcgatatcctgaacatctggaaatataaactgccatgcttgtcaaagaatgcaaatatgcttggtttgctagcccatgtcagaaatcaatcactttgtccaactccctttttgtcaacaatctctgttgttaattcatctggtcacaagcagaccacaatttttttttctacttaggactatctctagtgaattttgttgagttgacattccattttgtaaaaatgtaactttttaagtaatagctgtgatcttgatgcggggtgatatttcattctagggtttagtagagttggtttagtggaaattgaatgtgttatagatactacctctaggatcttatgtcctgattatttccatttaatgtcttttttccttatatttttcagagcacctgcttcaagtatctcccaaccttgctctagaaccatcatcatcacaaatgaacatgttcaaaatgctgattttccacctaattactcgaaaagagagaagaaaccatttccaataccagtattggagttaagacgccgagcaaaagagagggcaaagaaagctgaagggaaacccaaacgatctttaccacctccaaaaaatgggatgctgatcaaaagactgataccagttgcatacaaggtgtataatgcaagaattttgctgatcaacaacttgaagaggcttatgaaagtaattccagtgaaaggatgcaagtaattctcctgttccatcccatcctgatcattatatacacagatcttgtttgtgttaattccacatgcattggacaacagaattgtacttccatcttgacataaaccacacaacacattgggatgcatacaacgcatagaacaataaggaagtagaaattattctataaaacaagatgtaagaaacttcattatatatcaatttgctgacttgtatttgtatatggcataaattatgaagatattcagctgcttaatcgatgtattgtgccaattctctaatgaggctttctattagacatagatcattcaagcatcaagtccaaaatgaactgcatggcatctgtggtgactcctctattattcatagttgtattttatctgattattgattgaagctatgaaacagtatctgttccaagaactcattaattgttcgcattgagtacatgcatttctataagtttagatattattagttccagataagcttccattttgctttataaaagtctgcattttggaatatctgcaattattttgactatagtttctgtttagcgtaatttaaatctcacgaccgccttggataaactttctgactattttggcttatgatgaggccatcatgctcatgatcctagtactgtttctacttggtagtaccatgttccatgatccatcattttgagtttgtaattttgacaattgtgtaccttttaattgttttatgttaatatgcacttttcagttcaccgacaagcacctctttcaatgaagattgtgcacttctattttgtgggaggaaataatgtgtgtttatcttgcagacattgcagtgagatacatgttggatctgttggacaccctttccgaacatgcaaaggaatgtcttcagataaacgtagggggcaacatgactggggaggtactttggttgaagctgtttttgtgccggttgaagcctaccatctagaggatcgcttagggaagcgtatccctcatgatcagaggtttgctgtacctcgcatccctgctcttgtggagttatgcattcaagctggagttaatcttcctgaataccccacaaagcggcgaagaaagcccattattaaaatcggaaagaacgagtttgttgatgcaaatgaggatgacctaccagacccagagccttacaaacttgagcatccaattcttgaagaactaaatgataacgagattattgccccagcaagcccagaggagattgttgctctagctgaggaaacactcgaagcatgggaggtagtcaaggatggtgccttgaagcttatgaaggctacgcggagcgggtttgtggatactgcccagaggttcatataggagcaagtggccacaaagcactgaattgtggtgccttcaaacaccagcagaggaatgggcagcatggatggcaagcagcagtgctcgatgacttaatacctcctagatatgtgtggcacctgccagaatccggggaggacttgcagagggatctaaagagtttctatgggcaggcacctgcgattgtggagatatgtgttcaggctggtgcaaaggtgccggagaagtacaaagccacaatgagactagatataggaattccaacaagtttgagagaggccgaaatggtcgtctgaacaaagacgtttctattgtcacctcaagctccagtttgtctgaccagaggttcacagttttactcatgtatataccaggaaggcaggaaattagctcaaacagaatttgtctaggtctgtattgtttgtaccatatgctcgctatcatttaccaaattcttctttgtatgaggcatggatgtttcttacagcagttcgagatgcatttgctaatgctgatatggtttatatggtgagctgtgttttgtgtgaaaagtgaacaccaataaaatatcctggtattaacacagtcagcaattcttgccttgaacaacagaaaatgagtcacaaactttcatctgattcactgcattctgagggattgcatgacaatatacacccatttgtgctccctggccagcttctgttcctatctgaccatccacaaggggcgacagaaatgacagaaatctaaggtacaccgcattcagccataaactaacagaatcagggctgcagga

SEQ ID NO: 24352 - DNA, 7662 bp, Oryza sativa
gcatttgggatgttttcacagcataaattcatgaactaactgtctgatcttcacaatgcggttggggctccacggccgtcctgaacaacagtatatagaccttatcaacggaaaagtacaagaatccaccccgggcatgggtgacatatgaaccgaaactcgtccctacgatgcagtgccaagctggtccataagcagtgtcaaactcctgcagcgaaggataagctcccatcatttatatagtattgcatatggaagtagatgaacatggacaaaatgacgagttatagaatttgtggacaaataataggaagtgcggttgcttgataagcatggaccaaaaaaattgtggaatggtcccagatttggttgctgattggttggagattgtgcaggattcaggcacgcggagaagattttagggttagttaggtccaactagaattgcaggatgaaaaataaaatgttttgcctactggtcagcatggtcaaactaagccaataagctaaatagctaataacacgtcctatgtaaaacattcggttctgttagatcccttatccaaggtacagatagaatttggacgttattctcacattgggcaagaactgaatatttatgagtggcagacaaaactttaccaagatatgcaaattaaagttctataggctgtgtttagatccaggggtgaaaagttttggcgtgacacatcgaatatacggacacacatttaaagtattaaacgtagattaataacaaaacaaattacagatttcacatgtaaactgcgagacgaatttattaagcctaattaatccgtcattagacaatatttattgtagcaccacattgtcaaatcatggagcaattaggcttaaaagattcgtattgcaatttacacgcaacctgtgtaattatttttttatctatatttaatactccatgcatgtgtccaaacattcgatatgacagggtgaaaagtttttgcgtgggaactaaacagggtcataatcgagtgatgcattcccatgctcaaacttgcaattccttttgcacaagacaaagagtcaatgacagatcgacaaccagatgatatgaccacctgattgcgcaacgtattaatgctagcaatggtagttaggagtacatgctagattgcatgaggaaatcttagcacacccacaacgaagagccaaagtttcattcagcttgaccctactgcttaggtgttcagaaactgatacttgagctgcctatgattctctgacccttccagttttgccatgacaaacaacaggccaatttgggtttcaggtgcatgaagatagctacagcctacaggggctaccaaaatcatcatttacgcaacaaccaaatggggtgatcaatcagcatggacatgaatgcacttgacaaacatcttaaatccttatcacggtaagccagtaataaggccccgacaaaggatacgtgctactggtacatcagttatgactgcgttgccgtgagaagcatgtgcaagcattgtgcgaatgcatttactccaagaaccaacactgctcgacgcgatcagttaagcacctactatcggaagcttaattagtcatggcaaggaagattctgtcctcactgaagaacagtctcaggtaatctaatgaacaagtggagaaaaacagcagcggacaaatgattaatcagttaattccattggctaatgcatctttgggagcaaactgactactcgagggccctgttcttccagatacgcaagctaactctacaaccaatttgcaggtacagtaatggagttctggtacttacgcaaggtaagtacaccggctaagaaatgtactatactaaccttcttgagggcgagggcgaggcgcttgggctcgagccgccgcggggagcgcggcatcccggcgagctcgtcgcgggcgcagcggaacgcgcgccgctgcagcgcgggcggcatgtcggccgccaccaccctcaccaccgccttcctctcctcgccgccgccgtcccccgcccccgccttcctcggcaatcccccctcggcggcggcggcgccctccgcgatcgcgccgaggccgagcagcgccctgacaaccccaccccggcgccccgccgcctgcaggccaccctcctcctgctccctcatgctcggtcgccgctcgccgttcccgccggccgcgccgggagctttgactcaccggaagcagagactctctctcactctcctctctgtgttactgtgtatgtgtcagtatgtgtgtgtattattattattatttttttggcgcttgggcagcggttggggcggctttatcgttcgttggggttcgttaaagttggcgtcgtggcgtctccgcttttctttgttttttgttttccctctctgcccggggagcgcgccggcgggatcaccgaccgcgcgcgagagagagagcgcggcgaattccgggtcgcctcgcgttcgcgtacgtattcagcccgccgatgcacgcggccggtcggctacacggcctccgcgagatcgcgaccgagcggaccgttgctcgcgcgggacgggggacgagcactagcagcgcagcctgcgctgctgctccgtgccagtgtaccgctgctccgggtctatttactgcgagaccgttgggacggacggacacggagagcctgagaggcgttgcgtcaccgtgggggtagcagtaaactcggatggagttattgctgtgcgcctgtgctgttcatgtggatcccacggtgcatcgccctcgcgcgatgtggcgatcaggtggacggcgtgggtgacgtatacggttccgttagttgttgggctttgggatcatggcccggatatggcggatgggccacttggtggtagcgtccctcggtttatccgatttggagaaggaataagttcactttagatctcttaatttatcgtcgagtgtaaaattcgttcctaaaccgcaataccagatatggcttgtccgtcaactcttaaaactagtgcaaataaggttagcagtttggatggcagttttggcaaacccaacatcatcacccccaaccccctatttcccttcttctcttccttcctcctctctctccctttccttgtcatcattggtgcacccgcagctacggcatcggcaggaccgcatgagcatggtgtcagcgtcggcgcaggaggagggcatcaacggcgtgggagcatctccttcgaccacgtgcctcattccccttccttcccccgcggttgtgtcggcataggaggagggtgtcggtggtgcgggatggcgggaacagctcccccctccccatgctcattgggttggccaagttctttccacgttcgtagctgcctgacgagtttatcccccgcacccggggtcggctaggtccttcctgcccacgccatggctagtgagctcctccccgtctgcatgtacatccaactgccctcctccgagcgcgcggatgacggatccgaccgagaagcgatggcgtggcacggatgtggttggcggacgatgagtcgggagaggatgaggaaaaggtcgccgttgtcgagctagtccctccatggctagctcgttactccatggcgagatcgtcctcgcatgccgtgccctgcccgtgggagaggagcggtcgtggcgcctttgtcgcggcgaagcatacgccatcgctctgccgcagtagctcagccatcaacatgtgtggggaggaccgacaaactgctccctgttgatgtagacgaacgacactacgggacagacgtagcagcatatgtgacttcggatcgctacagctcgcgctgctcgtgcagcaagagatcaagcagagaatagccggagcgtcaccatcgaccagagtctgcagaatagggggagaaatagagtcaccaccgccgctcgaggatcagacccgggctcgccaccaccattgagaagcaggaattcatcgctaccgtgcccctggctaaccaccgccaaactctatctctatctctccctaactaatccatgtgtgtgtcgatcgccatttccagtccggcgctctctcatgtgccgcttgcccagctcctctcccgccacatgttgctcgcatttggggagagatattgagggaagaaggcgcgccaacccagaggagatagcgaggggacgaggtgaggtggatgaagtggggcttattaacatgtgggtactactattttttatctttctatttgatttctccatatttttttaatcttgcttcgaatgccacgtcaacatcacgtgagacgaggactaagtcaaaccagccacctaggtgccacatcagataaaaacgccatccaaaccgctttgggacctcgtctgcactggtttgaaaatttgagggacgcattatatctattatgattcaaaaatatgatacaaactctacgtcatgatgagagatctaaagtgaacttattcgtttggagaactaatggatcattgggctggtttcattcattcgtgaccatacaggcctttcagattttgcaagcaactttgccgaaaggctcaaataggaacacgacccaacaacagccgacagatggccatcacgtgctcacggcgccggtccctcctccagtcctcctcccaaattttttccaggttagactcgattcttgcagcactactgtactactagatggacagtgacgtttgctaatgaacaggaaagctgccaatccaactccagcaatattggcgctggataatgctttttttttctttctctagagggtacaaacgaacggatatggggtagacatttcatgccactaatgacattatctagtatgagcatctttcttatgcaacatataaccccagcggcgtatttagaatttatgatatgggtggtccaacttataaaaatttttaaacattgcggatataataattttaatatatacaatataaatataggtaatagaaccatttcttccgcatcttgtttaaagtatactcttctgtcataactaggaaaggaagtagagtaattcagaagcattttttttacatgtttctgaaaatgagatgaaatatctacatatctacgaatgtttcaagaatctacaatacaatagtataattttagatgtatgagttgggtcaaaactgaaaattgaatgcctaatatggttctaatctgctaatcagtaggagtaattaattgctctttgttggttccttcccttgcagctcgcgcagatcccagttggccaatgccctagatgcaggcgctgatcgctgcacgtcgccgtcggccgccgcagccgcactagcactccggcgcccttgcttccttgcgcttgttgttggcccatcgtcacttgatccccaggaagtagggaagagaaggagcagccagcaacaaaccgccgtgctatgcacgcgtgatggcgccgctgctacaaccggtcaatcgcgcgaggagaaggagatggagtcgcggtagcggagagggagcggaaacggcgtcgcttcgtttggaagcttcagcctcacgggatttttttcctttttcttttttaccaaaaaaaaaatcatgttgggtcgctaatttttttggtggtctggggaccaccggaccacccattagatccgccgttgtataacccgcgatatttttgaaaatgacaatataacccataatctcgttgcaccaacaaagttagaaatgtggtgagaatggaaagtgggaaggaagctcttcgggttcttatctagttttggaagtactaatgtgtacttaagggggacagttcgttctgatgggggtaacctaggatgattaggcagcaatgtgcaccccatggctctgtggccaatctccttgcaatgtgctttatttattagccattaaccttgctgtatcatataaaatctatagcttttgccgtgccaaccacaatcgtccatcactgtgtgctactgttttactgtcgcatgacgataggagccgctcgatccattgtcagcctccatccagccgtttgttttttccattgcgttccaccagcttctaggtattcccacgagtgtacgcatcgacgccgccgccgcggcttgggacgattctccgtatctgctcctgcgagttccttcgcgtatctgccatcgccgctccactgtgctcgcctttcccctctccaccatgccaccttgaccttgctccccgacgacctctaccacgccactgcttgtcctactgaggaagcggtggcggcgccacgcctccaccaacacccggcgcccgtgggtgcacgccgcgccgtcacggacgcgggacgccgttcctcgcatcgcctcagcgcctcgcggggagccagcgacggtggccaactctctccgctctctggccgggcggccggcggcagtccggctctccgcgactccgcctgtccgccactcggacgaggcggcaactccgcctctcctcgcgtgtcgttgtgcctcgccggtcgcagccgtctccgctcccactctgcctctcctcgcccgcataaatctctgctccaactcccgctatccgtcgcgccgctaccgcctagccagccaccggccgccgataccgggagccagggaggtcgtggcgtgtagcacagcaggcagtagcagtgcgccggtgccaccttcggccttcgcccttcgattccggccttcccctgcaggtactttacaggtctgctcctttacctaatatgctctatactgatttttaattgaaacttgctctgtgctatcaatttgttatttttgattgtcgatttgtgattgtctattagactactatcataatgtcattgccgatttgtgattagtgaatatgcattttttgtgggccattccatagtcatgaatatgtggttacaacatatgtttgcttatttacacggcaagattattatatcgtgtgccccaatgacaggaaaaattagtgcgtaaaatgggaagtgttttacctagcctatagtgcttacttctttaatcagtagattgggagtttaggactttgcctttctgaatgctcaaattgtattctcagattgcatttaggtgcattcacaatcttttatggcaatatgtcatggttaattacatattctgcatgtagcatccaacctgaaaaccatacaattactgcagcatttattcctagcaatagagcatctctgcgagcagatgatgacatctttgtgctgtaagctatttctgtagaagtatatgtcttaaaagttatactatttggtaatgtttctaaatctatccattttcaaccttgagttcagctttctgcagtacacgatcccttcaaacaaaattaaatagctaataatttaattaccggtattcagaggacactttgacttttgtacttatcactgatggaaaattgagaacacttccctttttctggatagaatctctgctttgacctgataactttattataacatgttaaggtatggtattgcatatacacattgaaaaatattcccgagataaccaaacatggttactaatgaaaagtttgggaatttacaacctgtctatggctattccttcatgtcctgctaaacaaaaatcaaccatccaattcaatat

SEQ ID NO: 24353 - DNA, 8502 bp, Oryza sativa
taataatttcaaaaaattttgaataagacgagtggtcaaacgttacaagcaaaaactcaaaatctcttatattatgggacggagggagtatatgtgtggagctttccaagtccacaaaacatttaagttttcttttacctatcagtatatgctatattattctaatatgtgcatagatatatcttactccgttgcaatgtctctttgtaatttcaaatttatttttgtatagttcaaataactaatgtggttacaagcattacccgcagcaacgcgcggggccactgactagtttctaatatgcacacatggctctgtggccaatctccttgcaatgtgctttatttggcctttaaccttgctgtatttctaacatgcagagaatgtttttttttttgaaggaaaaaatttggaatactaagaaggaatttagcattcaatattgatagagaagaaattggtgagaaaacctgcgttcgaagggattcgaacctaggccagcacgttgctcctggcagctccctgccagccgagctaggtgccgttctcaatatgcagagaatgttgcacctaagcatcttaacaagactggtcgttccacgagggcaagagcaatacaagctcctcgtaagagggaccttgtgcctaaaaggtgtgccatgtggtaagagggaccttgtgcctaaaaggtgtgccatgtgggatgacgctactactaagaaactcagttcacaatggagatcaactagatatttctattttcctctccatctccctctcgtaggttcccctatccgcctccctcttgtgcatcgctgtcgctgtgatcctcttcgctggtcgcgctcctcccctcttccatatcggacccccgtgcatcccctcctccattccggccgttggctatccttcttttctatgccgccaagtcttcctttcctcctccgtgcatggatccatgttcattgttaccaaaatgagtttagacggcgcgaatcgttcttcggcagtgtgaattgagctcgggtggggcgaagcaatctccaatagtgctaatcgagctctaacggtggatcgagactgagcggtgtggcagatcaatctcgggtagcatagagaggtggacaatggcgagctccttaccgcggtggtgcagttcgagggatgacaggctccctcccaagccgtcgagacgagctccctctccagccaccaagacaagctctctctccggcctccctctcccttccccttgcggtgcgggatgtgaactatgggtcagacctgacgaatcctgacacattctaacgaggaacgtgtgctcagactaggatccgcagacgtggcatagaatctttggcgtggcttgttggtgcagaatgatacctactcgcattgtgaaagccctgagtacatggtccagcgataatgtgcagcatggtaatctttcttgagccatttgcgtattgtggtgttttccgtgaacacgtacgaatggtctcggcatggccaaaagcaactcgagaacatacagttccggccgttggttggcactcaacatgccatttcacctactagaaagtacgggcaactttccaatcttatagactcggtcacgactcacgagctgtctcggacgttcttaaacgcacgcaccaaaactgccgttgccactagtgatatcactgcgcgagccgcaggctgccaggctcccccaccgctccaccgccgcgcgctgtgtccgtcaaaagcgtcgaagcgtgcagcgacgatctttccgtcttttcccggcaagaaccttgcctagctttagctagccaagctgcatcagagcgtgcaagccaagtggcggtagcctcaccgaactggctggacgcgaagtggacgggaactcgtctctttacttctctagccgttggatcgatcgatcagccggtcagatatacgcggacacttgccatcgcccgtccgtcaatgcctgcaaaattccaagaaaacgggttttgcaagggcaggccggcaggcattctccttccttcgtcatcttcttctccaggtctgctttaacggctctccgtccttcgcctcagcaacctagtaactgcactctcactgtgccgggggatccatgctacggtgccctttgcatgccccggcccaacggtcacatttaacaaaaaccgccggatctcatgacggcgatggccgaaatgccgtgggaccgggtcgtcagctcctctgtctctgccgtgattgatggtgtcgtagattgcaatgcacggatcgatctaaaggtctactgtgcttatggatgtttggcacgcgattaaagcctagaactacgcttgttataaggacagtatgcatgttccagattatgggcagaaatagcggcattagcgtagaacaaaaaaatagtggcattagagtaacaaactttcaacggagacgctgagcagattttatctcagtgggtaaaaatactgaaggacgagcaaggtgaaaagtgaaaacacgattgatcacggggaggagcaatgacccggcattgaaaaacaacacaccacgcagagctgtataactaatggaatgaaatgtaaaagtcgaaactctagctgtcgcttgtagtactactcgtttcaaagagcctgtttgctggagtatactactgatcagtgatcactggctgcccgtacgcccaaatctggcaattacaacttcggatagaacaatccaaggtttccaaaaggtcagacttcgtaggagtaaaatacattcccaggtactaagggggtgtttgggagagaggggctaaaccccctaaaccgcaccattatactccagctgcagtctttccagaggtccaacggccgaaacgaaccaaactaaccaaccaacctttcacagcacagtacgcctcctccgccgcaacgttcgccgcatccacgcgtcggcgcctcactggcccttgccccagcatcctaggctgttttttctccccatggtccaacggtcccacccgtcattccgtccgaacatgtctgcggccgtcacgtgcagtatttatccgccgacccgttcggctccggctcactggcatccacctcactcgcctccctggcattattaaaccccgcctcgttgccaagccgatcactctgtgcaacaccgtgcggtagcagagcaagagcagcaaaaaaaaaaaccaccacgcctcgttcagtcactcgcacgctcgctcgatcacccggccgccgcgaagcgtcgaccgaagtgtatcgcacatttcgaaagttcttcgcgggcaacagaaagcagtttgtggtgtgcattgccgatttgccattgcgttgggttcatttcttccatcggcaatgctggcggcgtcgttgagagtcgaggcggtggcggtggttgctgcggctgtgctggtgctgctgctctcgccggctgcggtggtggtggtggccgggcagcatgattacggcgacgcgctccataagagcatactgttctttgagggacagcgctccggcaggcttcctcccgaccagcgtctccgctggcgccgcgactccggcctccacgacggcgccgccgccagcgtacgtattctcgtcctataacttggcgttaagaatgtactactggtgaagcagcattgtgatttgtgagtaacctgctgtggccgcgtgtaggtggacttgaccggagggtactacgacgccggcgacaacgtgaagttcgggttcccgatggcgttcacggcgacgctgatgtcgtgggggctgatcgacttcgggcggagcttcgggccgcacaaggaggaggcgaggaaggcggtgcggtgggcgacggactacctgatgaaggcgacggcgaagcccaacaccgtgtacgtgcaggtcggcgacgccttccgcgaccactcgtgctgggagcgccccgaggacatggacacgccccgcaccgtctacaaggtcgacccctcccaccccggctccgacgtcgccgccgagaccgccgccgccctcgccgccggctccatcgtcttccgcgacgccgaccccgcctactccaagcgcctcctcgaccgcgccatcgccgtaagtacaccagtgcgcgccaccgcggcagcattgatttcgattgtttcctcatgtccacgttatctgcttcgtgtactcctaggtgttcgagttcgcggacaagtaccggggcccctacagcagcagcctccacgacgcggtgtgcccctgctactgcgacttctccgggtacaaggacgagctgctctggggcgcggcgtggctgcacaaggcgtcgcgccgccgcgagtaccgcgagtacatcaagaagaacgaggtggtgctcggcgccagcgagtccatcaacgagttcggctgggacaacaagcacgccggcatcaacgtcctcatctccaaggtaaatgcaccattcctccatgattttactactgtgtgccgatgctgacgcgcttttcaaagaagcctcgtcatttttggcagcttcattatgccttcgtctttcacaaagagttgcccaaaccgcaagttatccggtagtactcttgaaacctctttttactgttaataataaagatctactaatgactgcataactgactgcgtacggaattgaaccttttaagttttaacccttttagctttacatgtgggctcaatcaggtttgttctgaacttctgatgcttgtctttgaatactcaaagagtcaaagtaagccagtacaccctgacggccgtgacaggagaactgatagtatcacgtagagtacgtactccgtaatactatactgctagtaatagcgtactttgactagcagcctaatccatcatactccctccgttccataatataaagtatacatgtatgtaagtaattaactatgacttattctctattaattattttttaatcctctctcatgttctctaattttaagagcacccgcaatggtaaagtaaagtgctctctataaaacatgttcatctcagcaatagactagattaatagtaaaccacctcaatagtatgtctacatgggtatctatacctctctcatgcattgcctcgtttttctctatagattatctctaagttagtagatagctttgctctctctattcatttaatatcttccaagtaggaaaatatgctgacatgaatctcttgtagagagcttatagataaccattgtgggtgccctaatggatgcatgcaatgtatttattaggatgatccatactacaatatgataataattattttttggtatttgggttaagggtggttatgccttagaacaagtataatagtgagctataagcctactataagcttaggtggataagagagatactgaaaaatcaaagttgtgggctctcatgcaagagctagcttatcacaagatccaagacaaatacattaaatgcataagtgagagatagagagaagataagaaaaatataaccaatcttatagctaatctattatatatattggctttaagatgaattaatagtaggaactgagctagtatactgctattatattttggaacggagggagtactagtagagtagtagtgtacgactactgtatgagcatgcttgtccgttgcactgcactcctcctatgatagcctcctaggtccttgtgctccggttgctgcccgtgctgcagtctactgtagaagtagcagggaagaacgcttttcagtgctcacggtcacgggtcgatcgattctctcgtgcaatgtccaaaacaccctgagttctagccttctaggggccagtactacaaacaactgtactaccagtaggagtattactgtactgcttacgttaattaatcttgcgttactccaggaggttctgatggggaaggacgagtacttccagtcgttccgtgtcaacgccgacaacttcatgtgcagcctcctcccgggcatctctaatcacccccagatccagtactccccaggttaatcaatctctctatcaccatctctctctctctctctcttttctcagctagaaccgcagctcttaaatttgttgtgttggcattgcaatgcaggtgggctgctgttcaaggttgggggcagcaacatgcagcacgtgacatcgctgtcgttcctgctgctcgcctactccaactacctgagccacgccggcgcgcgggtgtcgtgcggcgcgggcggctcggcgtcgccgacgcagctccgccgcgtggccaagcgccaggtggactacatcctcggcgacaacccgctgcggatgtcgtacatggtgggctacggcgccaggttcccgcggcggatccaccaccgcgggagctccctcccgtccgtcgccgcgcacccggcgcggatcgggtgcaagggcggcgccgcctactacgccagcgcggcgcccaaccccaacctgctggtgggcgccgtcgtgggcgggcccagcgacgccacggacgcgttccccgacgcgcgcgccgtgttccagcagtcggagcccaccacgtacatcaacgcgccgctcatgggcctcctcgcctacttctccgcccacccaaacccagccgagtgggccgacgactagaacaacccgccaaagtatatcagctatacgggcctgggctattgtttgttttgtcagggccgaatcgggtgattattgcctggttgattgatactacttgtgtaaccaaatatagttaacttcctctacaaaaccccaacaaagtatagttaactgcagccacctcctttcatgcgaaaaatatcggccaggaggaatgcataggctttattaggctgctactcctactagcaatgttgtaacagtactgtagacatagttacacttgtactgctatggttcagcgagtggattatatataaagtgcaccaccgacgtttcctctgaacaaatgctgcaccctgtgtactgaattcaccctgtcagacgctgactcaggcgactagtgacaatccaatggaccagcaaaggcagcagaggcggggatcacatgtcgagcttctgttcacgggtgaaatccgtgaatctctccgctgcgtacttgtgctggcacctggcgggcatcactagaacggtgtggtcggtgggtctcgatctctctcaatcgtcatgcctattttcaactacatcaggtgcaaatttccaaattcttggtagtaatttcaatcacgaatacgcaggaaatcattgttcatcagtaatgcttgcttgctatcgtaagttcatttactcaaacttaaaagcagaacaagtgtaatgacaaatcaggctccgccgctgcagatggcggtgagcagcaccggcagcctcactagcgacgacgacgtcgcctgcgccgacctccgcagctgccacttggccctctcctcccgcgcaggcagcgctctcccgttgtcgaacagcggcgtcgacgacttcctctcctccacgccgtcgccggagagcagcccggtgcccgcgagctgcctctccatgtgcaagaagtggcccagcgacgtcgtgccgccggcgtcgtccctgcaaaggcgccaccagctgccgccggcgccgcgccagcgcctacgcctccacctcctgcgccaccgccgcccgtcctcctcctcctctgccgcggcggcgcggggcctctcactctcctcccctccgtcccgcgccgcctccccctgctgctgctgctgctcctcgtcgtcgtcgaaggaaacgcccatgagcgtccccagcgtcgtgctccggtcccgaaagaacgacgaccccgtggactacaacagagcaacatccacacccatatcaagatctccaaaacaaatgaaatggcacggctaatgattctttgtgtacctcggtgtcgacatcggaggaagagggtgacgtctcggcggaggacgaggtcggtatcatgccagcgtcgccgtccatatcctctccttccggccggcggctcaatgggtgaagtgtgatcgtgatgtgctctagaaaaacttatctgcttctcccgtcgaatcgagggaagtatatggccgcggtagtggtgttttctatgcgggctgcgactgcgagccgcagacgcgggggtcgcagtggcgcaaggcaacaacggtcaagggaaatgaatgaatactccagcttgagctttgagcctctgacagtctgactgaatgtggggtagaggcaatcaggcgaagagcgtaggttccctacaataagcgactttcaaggcggtgtttgactgaactgttaacaaacagtgagctcctgccgattatattaattaagacaccttctaatcagactcgttggattagagcaagtttaatagtatagcccactaataactctaattcatatatagccaatctaatagcaatttatacaatagttgcttactatactattaatatatatacccacttgtcagggctgcagga

SEQ ID NO: 24354 - DNA, 12571 bp, Oryza sativa
ttcctgcagccctatttatagttggctaatagtattctattatacctgctgctctaagcacgtggatactgaatgatcgtacagcagaaaagagctgcaagcgggtactatacaggaatacatgccaccactacaccgctacgcaaggatggaacgtatcggtatttttcagcccgaagaatcaaatcatcagcggtgcagtgccagtgcgcacgatgcacacatggagtcgacctgcaatggcctcacgtatgatggatttctcacgggcgggcacgcatgggcggagcgtcacgcgtccgttccttccggtgcgcggagccgtgcaaaatataataaccgtgtgggaatcccaaagtcaataggcagtagtaaaaaaagaggaacagtcgtgcagtaaaaacaaaaattagttgctcacctttaacttcggctcatgcaaacaaaacgtaaacgcggtaatttggagtagatagatactcctcgttatgtggtggctgtttaagcagcgagaggaaatcaactaagcagttaaaagtttttaaaaatcaactgacaagtatggttattctgttattctgcaccagataggtccttgaaacgatcaatatatcaagcagaatgaatcaaaaaaacatttatcaagccgaaaagcaatactcaagtttgcatacctatttcattgaaatttcccatgcatttgggatcatgcattggcatatcaccatatcagtattcatctaactgccctttcagccaaaaaaaaaaaaacccgctcgtttcattgagattttccaatacatttggactcatccatatcagtattcgtcaaattaactatgctttcaccaaaaaaaagtcccaagtagtttcgatctgaccactaaaaacgccacacgaactaccaaaaaagtcccaactagtttcaatctgaccactaaaaacgccacacaaacttagttgggtgaggctaatagatcgaagcaattagaatgcgaaatcctaaagcgaatcctgattaacaactggggctaagttcagtagtagtaggtacatacgacgatgcgcggcgagtgacgagacgatggccggtcgggtggatcacgcctgcttgctcatcatggccttgaactcgtcgaaggagatgaccccgtcgccgtcgctgtccacggccgcgacgatctccgcgcactgctcagccgtcagatccatcccgtcgaggttcagcctacgcagcgcgcggcgcagctcctccgccgtgatcacaccgttcccgtcctcgtcgtactcgtcgaacgcggcgcgcagcgcgtccaatcccccgccctccatcaccgcgcggagctcctcgatgctgacgaacccgtccccgtccctgtccgcggcggcgaccatctcctcggcctcgtccaccgagcacccgtagaactccctcatctccgcggccgagatgaggccgtcgccgtcggtgtcgaagcagcggaagacgcggatcagctccggctcggcctcccgctccaaggacaacggggactgggagggatccaggacagccgggggcggcgagcggctgcggctgcggcggaggcgaccacatgaggcggcggcggaaacgacgagacccatggcgagacagatggtgcggcgcgcgtttccgttttgatcggtgtgtaggtttgggggtttggggctctcgggcgatggggttggttttggtcctcttttatttagcgcttgagtcgcttgaccagagatggtcttcaacggggcccacaaaacttgccgctgtgtgtttggctggcgacaagggtagtgccaatctgtgccatgctaatattttggaagtttgaaatatcattttggtagtatttggattgtgactaatttttacatagctaataataaatctactctatcaaatttagtagtgccaaaacttagtaccaatattttggtagggcctcaaaccaaatctagattacggccagcttgaaactggtaaatcgaccacaaacattgttgaagcgaatgatattggctaagagtgggtgacataagtagatagaaattactatatcaaatttgcgttgaggtgaaggagatataagataaaagagaaaaatatggtctataaatttcaaccgtatcacggactcgtgggttagatattaataatttagtatatatatccataacaaacagttgtatgagtatatctataccgagctattatataactagactataagattgacaaaatatgttaattattacatttggtacgtattaactataccaccgatcttaataactcttaaggctctcttagtttcatatgtggtatgctattgttgccatcaacgaatagagctttacattaaatgtgaagagcttttttttttaaaaaaaatgtgaagtaacatatatccacccgatgtacgaccagggagacgggtgatgcgatggtgctggcgtggtcgccactcgcactatcatgactgcttctaggaagaggtgtggagtgttaggtggaatagttggttgccatgcagcccgaccaagccaatgactcccttgcacgtccttttacttgaggccgacaaagtggacaccacaaacatccgcaagtacaccggttgccttttccatatcccatacgtgcgcggaggacgtgcaacacgcctccaactcagctggcttgaaaaggggcctatgtggactcaagaattgggttcacttgtcaataaggtacaagaataatcatacctaacccttgtgcataagaattcatttgtaaggagatggccaatgtggtatctccatgaactgtgagggtaatagcaatgtttaaggtcttagaggaaataagttaggtcccaccataccctatgtttatgacgacaatgtttaaggtaagaatagatgttaagatgggtcccgcgtttatgtaaacaaattttacattaaggtgggtcccaccataccataatctattctcatcctctttagtgtgcatatgtgatttatctcattattttattttttaaggttgagccataaacttatggctatttttagcatttaatgtctcatggctaatgctcataatgtatatggctagtcataagatcttatggctcattattatggcacattgtggatgccctaagaagagaggcatgaccacgtagaaaggggaccccagatctaaaccaagaaaaaaaagaataaggaaaagcaactcttaactcttgactactaccacaaatccaaaaaaggaacaccacactagggtgttatttatgcttctcagttacctaaaccaatataatttctttgctctcgcttgcatttacaccatgattactcctaatcatgaactcctgtttcttgggctgaacttagctgcgacgagagggggtggggtggggtcatccatttctcgctagagtagttcaatttccaacaacggcactcctccgccctattcgatcccctcctcaccccgccgttctacgtctaaagtgtaaggataatttgtattttcccgacaaggcccccgcgtcgcctcctcgtgagggcggcacgggcggcgacaacccgagacgccgtcgcaacccagcgccgtcgccccctacctcgccgccgcccgaacgaggtgccggcaaagccagcggctcgcgaggacggcagcggcggggttcacaactcccgtttctccagatccagcgcgggaagatctcgagacggaggttggcggcaccgtttcggcagcgggtggagacggcggcttgcgaccgagagcaggcgacggggtgggtggaggtagtgagaagcccggctggcgacggggcggaggagacggcgctggtggctgtggcgccagcgccggtcggcgtgtagcccgacaggcaacggagagggggagacgacggtggcggggtagaggaggcgggggcagcgacgggacgttggaggaggtgttgcgctgtggcttccccctagccacgctggcggtggaggaagaggccggcaaatccgcgccttgatctggcgggcaggcatccggcggcgccccggtggttgactagcggcggcggcggctgcatctgtggatgcggtggccggcgtcggggcaagttgcgggcgtcgatggctgcggctggcggtggagggagcgtcggcgcggcggcgctggaggccgtgatggccgtggaggggcaggaggccacgccctcggcggagggcggcatgcggggggccggcgtggtggaggcgcggctggcggctcgaccaagagcccgtctttgccattgtttacgaggtatggtacttgcgagtcattatgcgagaccttctatggccgtcgatggggtgcttgtgtgggtgatatgaagacgctggcgaaagccttgccgtgcctttggccggtttgacgacgacgcccgtaggcgccgtttcccttcttggaggtgttgtcgtggcgtttttcttctatatcgcccacaaatatctaggtaaaaaccttgttccggtttcggacgagcggcgccgatgttatgcatcatgtcctccttggcggcatcgcttcagagaagttcctatgaatcgatgactgttgatggtctttctcggtcaaaagctttcataccttggtgttcggcgaggcctttgtcttcttgagtccacttagttcttgtggtgggcaacacgctcttcggttgtttctactgatgaagtcggagctgctcgttgatggggtgcggcgatgctcgacaacgatgacatgctgcagtctcttctatggagttggtgctagccgtgtgaaggaagtggctccttggtggcttggctgatgtccatcgttagatatcggagctgtttttcgctttggcgactttcgtggcttagtgtcactgcggttgtgaagtcggcgctgctagattgcttgcgcgattagctcggcaacgataacacctcttctgcgatgtcgaagccgttgagtcgcttttgtgattagcttggcagcgatgtcctgcggttgggctccgccgtcgttgttagttttgtagctaggtcccttgctcttctctgcgtggtgggttttagccagtttcccacaattaaccgtgcaattgtttgtttttcgggtccggttttccttataaagtgggtcaattctcttcttcttcaatacaaagacaccttgcgtggtttcaaattttttttcccaacgacgacaatctaaacatgtatcaaatatcaacctcatcgtaatacgacttattagagattgcaaaaataattttaagagtatttttttatatactccctccgtttcaaaatgtttgacaccgttgactttttaatacgtgtttgaccattcatcttattcaaaaaatttaagtaattattaattctttttatatcatttgattcattgttaaatatactttcatgtacatatatagttttacatatttcacaaatttttttaataagacgaacagtcaaacatgtgctaaaaagtcaacggtgtcaaatattttgaaacggagggagtatttgttattagatatttaaaaacaaatgttggaaaaaataattacgttgaaaaaccccaaaattaagtcttaaattcagttttagaatttaaatttacgattttgcttttatgcggaaggcggaacgatagggtgttatcaaacttaccatgttttggttttgctaaaatttagatgagttcattttggcatcaaattaattacacttttagtgcaaggagagacgcgaatgacttgttctatgacagtgctagtagtgtgccgaaggacgatgatatccacatgacgatcatcagcaaccaagccctgatttcgacgattctgtacacgcatttgaaactggaaactcgaaatcgtatgactaggcagaaaacaagaccaatctatcaagtagaaaaacaatatctcctctctctctctctctctctctctctctaaaaaaagcaatatctcttgatcgatcgattcgagtttgcatatctatttcgttgaaaattccccatgcatttgggatcatgcatatcatcagtattcacgtaactaattaccctttcaccaaaagaactgtccgtcttcgttgaaattttccaatacacatttggagtcatccatatcagtattcgtccgattaactacggttgcaccaaaaaggtcccaactagtttcgatgttcgatctaaccactgaaaacgccacacaaacgaatcctggttaaattggggataagttcagcagtagcaggtacatacgccgatgcgcggcgagtgacgagacgatggccgatcgggtggatcacgcccgcttgtccatcatggacttgaactcgtcgaaggggatgacgccgtctccgcgtacttggccatcatggccttgaactcgtcgaaggagatgacaccgtcgccgtcgctgtccgtggccgcgacgatctccgcgtactcctcggccgtcagatccaccccgccgagcctatgcatcgcgcgccgcagctcctccgccgtgaccacaccgtccccgtcctcgtcgtactagttgaacaccgcctgcagcgcctccgaatccccgtcctccatcactgcgcggagctcctcgatgctgtcctcgtcgtactcgtcgaacaccgcatgcagcgcctccgaatccccgtcctccatcaccgcgcggagctcctcgatgctgaggaacccgtccccgttctgcctatccgccgcggcgaccgtctccttggccttcccgcacccgtagaattcccttatctccgcggccgagaggtgtcgtccgtcgccgtcggtgtcaaagcagcggaagacgcggccgcgctccggctcggtctcccatttccagaacgatggatgaacatccagcctatccgagggcggtggcggcgacaggctacggctacggctacggctgcggcagaggcaaccgcaggagaggacgagacccatggcgagacggatcgtgcgccgcgcgtttccgtaatgatcagtgcgtgggggttttgggggctcttggccgatcggccattggcttcagggtttaggtgctctttaacggttttcctataaatttgtttaacagattttatcctcaaaatcacacgatttttttgggttaaccacgtcatgacgtcacaaccagattatgtgaaaaaaattgataatttaacacttttttcgttgttcaattgctctaatggacacttgtgagaatgacatgtgtgaccatataagcgaatgtaagtgggccatgatgtcaaataataaaaatccattttaaggagtgttaaattatcaaatctctatattatgggtatgtttggagagcttgaaattttgagaaacagttgattggtagctagcttttaaaaatttgtttatggcttctaatttatttttagattatacaactacagatcctcgtaatctgaacaagaagctagatggtgtcgtttgtttcccagatttgtactacatgttttaaccgtacaatgtgcattgagatccgtgctatgtataagtcgcgggtacgctttttaattaaaccagggcactatgtatttaggtgaacaaatttatcatgtaatctactccctccgtttcataatataagagatttagggtgtatatgacactcatattaatataaatctagataggatatgtcacatgacacatcaactaaaaatctcatctcttatattatgggacggagggagtatatagtttgtcggtgacatgggaccgggagtatcatgaatagaggcttgagacagacacaatcgcccacgtggcctggcaccctcggggggcgtcgggcccgagggtgatgtgttcgccctcttctttgtctccccaagggggtcggaccgctcccgcctcggccccgagggccgaggcgccccgacccctcgtgggttttcgctccgcgtgtatgggttaggtgggcacagtggggctcacctaaccacatttattgcggtttggctgagcgtgtcacgccgcatgtaacgcggtgcagtgcactcatttatccggtctgtgaccagtcacagaccggtcagatcgcgggttaggtggcgacaggcgatctgacgcacgcctcgccccatcccgtcaggacgagggcttctaggcactcgtccccagctggagctagcgtgttacctcccagagatggcacgttagtcctggtcagatatatgccaggcttcatcctaaccattacaggcaaaatgttgtgtgaagaagggccaacgtgcagattgctaagctgacgcgtggtggacaagaatgaccgatttgtgaccagtctgacaccggtcatgtcgtcagcagacagccatgattccgcgtcgcgcctgttcccggcgaaagtggaggtaggtgcgggccgtcccatcagaaggtgactcgaacggcaaccatgcaaatctccgtccatttatgaaaaggtagggtaagtccccacagagagggggggatggtgcatgtggtatccccttaagatataaaaggaggaccttgcccactgagagagggggagttttttcttggactggacttttccagattaggaacccagaacaagggagaggctggctcatactttgtagctccttcacacacgaatccaccaaaacacgggagtagggtattacgcttctaagcggcccgaacctgtatacatcgccggcgtcttctgtgcttcctatctcgcgaaccttccacacacagattgggagcttagagtctcacccagggtccccggccgaaccggcaaaggggggccagcgcggtctcccggtgaggagccccacgctccgacatctggcgcgccaggtaggggactctgcgagtgatcttctgagctcttgcactctttcgtgtgcgccaagcttttcctgttcagcctcatggctgagcaagcaaaggcgcacaacctctctccgagtgtgagtggcgacgacggggagccgaacccacgccgtcgagctcgtactccaccgccccctccacgccaaagtcctaagcagggggaggcgctcgagagggccgaaggatccgcgacttcgacatccacaggaggtggaaaggggcggcgagatggggagcatcgcctcctcgtctatggtgacggcagcacgccccagggcgcgctccaagctgcgggcgcgctcctacgtcacccgcccgtcgcccatgacccggagtctccagcccaacgctggctggacgatgtggccaaattggtcatgactgcacggcagtgtatagatgctggtgggcggtcctccgccaccaaggcctctggtgctgctaccaccggctccgcgtcgtcaagacgaagggcgcggcgagcggcagccgccgttcgccattcggccaccactccttcgtcgactccttcggcccggaaagatctgcgagggaggccggacgcccgcaccagcatcgagcggcggcgtaatgaccgacgtgctacccacgcaacggagggcgcttcctcgtccagagtgtcacctcagcacagacgcgggaatcagccctccgtgcccccggttggtggtgtcggctgtagagcctttgtggcgagtcttcggaatgtccgttggcccccaaggttccggcccaccatcgccgaaaaatatgatggcagcgtcaaccccgccgagtttctccaggtcttcacgaccgggattgaggccgccgggggtgacgacagggtcatggcgaatttctttcccatggccctgaaggggcaggcgcggggttggctaatgaacttgccacccgcgtcagtccactcctgggaggatttgtgccaacagttcaccatgaactttcagggcacatatccgcgcccaggtgaagaagcggacttacacgcagtacagcgaagggatgatgagtcacttcgctcgtatattcagcggttctgtcaagtccgcaacaccataccatgcatccctgcacacgcggtaatctacgcgttcaggggaggcgtgcggcacaaccgcatgctcaaaaagatcgcctctaaggagccccagactaccgcggagctttttcagctcgcggaccgagtggctcgcaaggaggaggcatggacctggaacccctccggttccggtgtggcagcttcggccgcccccggatccgccgctcagacagggcggcgtgacaggaggaggaagaagaggtcagcccataccgacgacgagggtcatgtcctcgccgtcgagggcgctccgcgggccacccgaaaggggaggcctgcgagcgacaaaaagaaggaagccgacgctccctgacctcggctacttggaagagcgaaggcggcgcgcggcccttcgagccgcgcgctaccagcagagcctgcggcgctaccatcagcgccacgtccgggcccgatcactctgcgtcgacgacctcgtcctacgccgtgtccaaacgcgtgctggactgagcaaactctcaccaatgtgggcgggtccgtatcgagtgatcggcgtcccccggccgggctccgttcggctggccacgggcgacggcacagagctgcctaacccgtggaacatcgaacaccttcgtcgcttctacccctagtgggggttgggtgtcaggtcttgggctcgggccaactccgcacccccccggcgtgcagggttggccgggggcttatcttttttctcttccgtatttcaataaaagcattttcgatttcctaaaggctgtgtctgtgcttttgtttccttttgaagaatcttgacttgaaataggtcactcgtgctcaatcctaccctcgggggctcgggtcggctaaaatcgccaaaaggggcccagaaccgagccgtgccccgggacgtggtgaactccgggggggaatcggcaaaaacccacaatcgggtcacccataaccctcggtcaccacgctcccggcctggccagtctcgacatgtggatctccccaggcactagccttgacccgcgccgtttgaggctgggacctgggcacgagcccttgttcaagccaagacacagaaggaccgtggcacagaccatcctcgtctcatacacagaacaaatgaaattgacacaaaaatttcctctttatttgatcgcagattaaatcagcctataacaagaagggggcccgaaggcctcggaagaagaaggaaaagctattaagattggcggaggcctgggggctcactccgacgcgcccgggtagccggcctcgccgtcgctgttgtccgcaccgtcgtcaccgcactcctcgtcggagttgaaggcaaacgcgagccgaggggccgctcattattgtcggtcggttttcccttgctgatgcgcgcgatttgcgaccgccgggattctgcccgaagagagagagagagcagggaggagaggcccccgagccgaacggtggcccaaggcccccgacgaccggagcaggccctctgcccgcttgtcagacggtgccaggtgcccccgacccccaggatggccccgaggccactgcgggaaggccgcgcctgtcgccctctgaccccgaggtcgtcggcacagaagccgagtgcgccccgcgtggcctctcggatggagagcgccctggagatgtggcccctgacgaagaagatcggccccgccgaaaggtgcagcggcccgtctacttcgttagcgaggccctccgggacgctgagacccgataccttcaggcccagaagatgctttacgctatcctgataacttcgaggaagttacgccattatttccaggcgcatcgggtcacggtggttacgtcttatcccctcggccaaatcttgtataaccgagagggtactggacgggtggtgaaatgggcaatcgaactctctgaattcgatttgcgctttgaaccaagccacgcgatcaagagccaggccctcgccgactttgtggcggagtggaccccagctcccgagctcgtctccgcccccgaggccagctcgagcccatcgcagctgcctcacaccgccctctgggtgatgtagttcgacggcacctgtaggaaccggccccacctgtcaccaggccttagaagtggcgtcacgcccgaccgcttccctcggggagggcgatcgccctggcataacgccgggggctactgtcggtgacatgggaccgggagtatcatgaatagaggcttgagacagacacaatcgcccacgtggcctggcaccctcggggggcgtcgggcccgagggtgatgtgttcgccctcttctttgtctccccgagggggtcggaccgctcccgcctcggccccgagggccgaggcgccccgacccctcgtgggttttcgctccgcgtgtatgggttaggtgggcacagtggggctcacctaaccacatttattgcggtttggctgagcgtgtcacgccgcatgtaacgcggtgcagtgcactcatttatcccgtctgtgaccagtcacagaccgggcatatcgcgggttaggtggcgacaaggcgat

SEQ ID NO: 24355 - DNA, 4607 bp, Oryza sativa
  unsure (1)..(4607): unsure at all n locations
ccgcgtcgcgcctgttcccggcgaaagtgaaggtaggtgcgggccgtcccatcagaaggtgactcgaacggcaaccatgcaaatctccgtccatttatgaaaaggtagggtaagtccccacagagagggggggatggtgcatgtggtatccccttaagatataaaaggaggaccttgcccactgagagagggggagttttttcttggactggacttttccagattaggaacccagaacaagggagaggctggctcatactttgtagctccttcacacacgaatccaccaaaacacgggagtagggtattacgcttctaagcggcccgaacctgtatacatcgccggcgtcttctgtgcttcctatctcgcgaaccttccacacacagattgggagcttagagtctcacccagggtccccggccgaaccggcaaaggggggccagcgcggtctcccggtgaggagccccacgctccgtcatagttagtccctatattaatttagcaccaaccagagtattaaaggtggtcttcagcgggtccaaacaaaacgggtggggctaattggctagcgtttgcgggctgtgagcctgtgaatgggtcccaacaacctagcaacctattagccccaaatctcctactctctcgctaccttttagtcttcccattgtgccaataaagaaagtcttcttcttatgttgattatgaaatatgccaagagtgacctttcggctttggcggtagagtaggatcaggacgtatggcgatggcatcgacaatggcctctctttggtgaactccctctgctctcccttttgcgcgaggtccaaatcagaaaaaaattcccccaaggggncctttnttnttggattttcctcgccttcttcgttgccaccacctggcttgtcggagccaaaaggcatcaacgtgccgccgcagctccgcctgaccagccttctacctatcccctgtgccgccgcagctccgcccgacaagtcttctacccatccctttgtcctttttcctctccttcgaccggtccacgttagaaattgttgtatatggctatctatttagatttgatggggtaactgtaaaatttctaatacagtaactggggcagcagattcactatcaccatcactacattattccttcttctaaaggagtatagatacacatgcttcttttaagaaattgtagaactctcgaaggagtatagacatacatgcttcttttaaacgaagaaattaagaaattatataagtcgagaaaaagaagaactgatttcttttatggtataaaccaaaacatagtaaataccccgacaaagaaattgaggtgtggcacaattttacaacgaaaatttttgattggagaaatacgtgcttctgttctgtgcgtggcctaattggcacacctgaacgcttgatctcgagttggacggccgaagatttccagtaaaaacatgccttgaataggtcagggccagccaaacccggcccaaacctcactttatccgagagcccgtcgtctcttccaggcttcaagccatctccacccccaaccaaccccactgctctgctcttcgcgcgcctccaccgccgaaccccatggccgccgccgccgccgcgggggcgacgccggcgacggcgaggaaggccctgctcacaacaaccgccaccctcctctcctcctcgctcgcgcgcagccggcgcagcctctcctgctccgcggccgctgcctccgccgccccgcgcatcgcgcctcagccgccggacctgctccgatgggtgcagcgggagggagggttcgtgcaccccgccctccgcgtggtcgaccatcctgagcacggcctcggggtctccgccgccgcggccgagggagacattccccctggcgacgtcctcatcgcgctacccggccgcctccctctacgactccgccgccccgccggcgctgcggacgcggtcctcgtgcagctagcggaccaagtacctggtaatggctctcctagtcctggctcagattttcaattacctctgttagtcacgttgtggaaaccagtgtggtagattcatgtttgtgaagagttgctaatgcatcaaaagtaagatctatttctatataagaatcaggagcataattggtattgattctgctgttgacgtcggatcaattgaactgacatcctcctagtattgcgttttagttcagtagcaattttttcgccagcgcgcaaaagctttgcacgccaatatattagagttcagtagcagttgggttttacaattttgagaaatgcggttgtcctgaacacctaatgtctaatggcgaatgctgttttctcgtgttaaattgagtaagattgagtcaggttttcctataatttacgctacacaacctaatcctttgtgtagctaatgttgtattttgacataattgctgcacgatggaactattctacatgtgcactctatgatcctgccctcttttagtgtatgagggactttacattctagaaaattaggctaagtacccttcagtgactaacaaattcaatcctgcgggaagcatgtgacagaggaactatgggctatgcgactgggcttgaggctgcttcaagaaagggcaaaatctgattctttctggtggccatatatcgcaaatctgccagagacttttactgtaccgatattttttccaggggaagacataaaaaacttgcagtatgcccctcttctccaccaggttgttataaattattgtagttcttattgcatttcccctcttcttttttgacttattatatttcaggtgaataaaaggtgtcgcttccttctcgagtttgaaaaagaagtgaaacataagcttggtacagtgcccttggaagatcatcctttttgtggacaagatgtaaactcatcttcccttggatgggctatgtcagcagcatctactcgggcattccgtttgcatggtgaaatcccaatgctgttgcctcttattgatatgtgtaaccatagttttaacccaaatgctaggattgtccaggaaggaaatgtggatagcctgatatgtcagttaaggcaagtatcctgaattgtttgtgtacttctgagcccaagaaattttgtatttccttaagacaatttttgttaattgaatgccctctgttagtagctttgtttatgcataacagcataagtgacatgtgaatgcatttatttaactgaattcatggataaatgtagccttttatgttatcttaccatagatgcaagtaactctgaccaccttgaccttgcttataggttgttgctgagacaaaaattgatcaaaatgctgcggtaacactgaactatggttgctaccctaatgatttcttccttcttgattatggatttgtaataacatcaaattcgtatgatcaagtggaactgagctatgatggaactctcctagatgctgctagcatggcagcaggagtttcttcgcctaacttttcagctccagccaagtggcaacaggatatcttgtcacagctaaatctgtatggagagggtgctattctaaaggttttgcacacattcttactgatcctatttattttttgcaatctattgttgaattcaagtcgtccagtatccatgcagcaatctgaaccttcttggttttctgtgggtatcacttgtaatttcttttcaggtcagcataggaggtccagaaatagtagatgggcgcttattggctgctttaagggttattattgcagctgatccggacgctgtgagtggccatgacctcaagactttgatgtctcttaaggagaaagctccattaggcccagctgttgaagcttcagcactccgaactgtccttgcactttgcacctttgctctacaacacttccacacgaagataatggaagacgaggccatactaaaaggagaaccacctcttactactgaactagccgtgcagtttagattgcagaagaagctgcttctcctggatgtgatacagaatcttagtcgcagaatcaagatgctagctctagacaaatccaccgtgtaggatttttcacgttttggaattgctttctcggacaatcaattaccctattgtactgattctggagatgacaataaagccccaaattttgtcctgttttcttcattgtccagatgccagagtccaatatggcacggatggttaacaatcagattgaattgatcgcaaattataatcaagtattcgttgccagttgcatgtgctctaaaatctaaattatatgtttttcactgtaaaagtatgttttctttagacaaaccggttcatcggagagaggaagatcatcaagaatgaatgcatcacagatgcacaattcaaaatagctaggctacataactttagtatttacagaaccaagatataactttccattaatcctaagaactgaaatttccttgtctcaacgacaacgacgacgacaataaaataaaaagattaatgtacgcagtacagccaaagaatgatcctaaaaaaacatctgctcatgttcggctgctcaatcagtcgggtctaaccatgacgagagaagaaaact

SEQ ID NO: 24356 - DNA, 6005 bp, Oryza sativa
ttaggattcgcttttggccagcgaatgtgcaagctttgattcatcatatttacgtactgcaagcaaatactccatttggtcaggattcgctgcaggacggccgcgcggcacacggctgacacgagcgcacgctgcgcgagcggcgaacgtgcagaaaacaccgttcaatcgatgcgcccggccacgcgatggccaggcgtatgacacgcacacgctcgtgacagcgcgagatatcatcatatcaagcggccgaactgccaaaataccgtactccaacacgagatgatttcaatctctccccgctccgctaatcgtttgcataccgagattaaaaaactccgacccccggtatgtgtggccgaagttctcttttgtaaattgtaattaggagtattttggtaagggatgcaatgggatgtgagttttaatctcggatcctcgggagcggaatttcgtttgtcacttttttcaagcgagggcaaaaggagaggccagaattttttgtagggaggcgagggggttcggactccggagtattgttccccgaactccatggatcgcatcggatggtcggattgacacctcgcacggtcgcacctaccgcgcgcggaatcaccacttgacggcttcaccccacgccactccttaaccagcgagcgtatcggatggccactccttcaccagtcagccgtgctcacacacgactgacacgagcggcgaatgtgcaaaaaaaaaaaaaaagaccgtggaatcgacgtgcccggccatgcgagtactcggtgtgtatagcccattcgtgacactacgagtacgagatatcaaaccagccgaactgccgcaaatacctaacacgtatgggtacggcaatacgaatccctgcaaacgcgacgttcgatcgtatcgtatgtacggtgtgcttcagagttcagaagagctcgcgaggcagctgcgtcgtgcatttgtccattgtctctggacgggatggacgtgtgtttgcggcttgcagatacgatttggcattttttgcgcatttggtagcgatgtttgataagctatggattagcataactgtgcatgatttggtagcgatgtttgataagctatgaatatatatgtgcgtggcattcatttctacgcaaggaaaacgtgtcgtgccggtttttacacgggataaacgcgtcaacttaattacttagcactcgtatgtgatatgtggccgacagggactcctgaagaaacgaaccaatggcaagtggcaaccgcacgagagaaacgtgtggaattgggacagagacacacacggagccatggcaagctggatcgatctctaattgcagtttccggtaaatcacgaaattaaagcccatgggcttagctcgtttagagcaccacgagcagaaacggacgggctttaaggccgataggcccggctgaatgctacgttgcgactactaccattcacagagccgagtctccatcgagctagtttttagttattttagttatttttacaaacgagggtacggtggtttaggggctgttcaggttgatgtcatttttaaccatattatttttgacataattgttaaaaatatatctacgtttagtttgttgtcaaactttgataaatatataagaaatcctgccaaaatttgtaaggtttattttagctacaatctaaacagttacttaatcttcaatccacgaaagccagaatttctattgttaattttcgatctagagaaaggcggttggagttggcctggtttattaattacgtacatcgagagagggcacaagtcggagttttcgggtctattcattttgatgtcattttcagccatactattttttttataaagttgtaaaaaaatatctacgtttaatttgttaccaaatttggtaaatacataagaaatcttgctaaaattttagcaatattaccatcttgccaaaattttagcattgccaaaatttggtaagatttattttgactacaatatgaacatgccattcatctcccccattcatctccgaacccccccccccgggagatggagtccccatggatcacatctggatctggtcatcggatcgaagccttgcacggaaccaggcgagccacgcagaatgcatacgtgaaacgtaccgatccagcggtctacaggattacaactcgcccatacgatcgaggccaaggggttcggagataaaggggcgttttggtttgatatcaaaatattgccatactaatttttttagtttaaatagtaaatgtgatgatttggtttgaagccaaatatttggtaatgcctatactcagtttgtcacaattctagaatattcttcaaaacaatttaaaattggctctcaattggcataaatctaaagacacccatttacaattctaccctaccaaaatattggtagtgctaaaacttgcctagggttcggcactaccaacatattggtagggtgctaaaccaaacaaacccaaaaactccgaaccctaggacggatgattgaatcgaggccttgtgcagaatcatccctgcgagccgatcggattggatcccccacctttctggagaggattctacgcgcagtcaacacacacaagtcgctggccatgtcgtgcactggcggaggtatattttcgatgcttggccgacagtgatacaggcataaagcctaccaggctactagcgctgcaagtttgtgatcgaataatgacgagtactcacgtgtacagagaaggcgcacagcgcagtactcaactcaaattgtgtgcaaaacgtgcttgttctactaccaatactcaccgaatcaaagttttaaaacaaatactcaccgaatggcacgttgaatcgagaggatgcggacctccacgtcgccctctcgcgcgggcggcacggagggcaaaccctagcccccgccgccccctcccttcctctcccacccctcgccgccgccggagcgcgccgacagagttccgcgcggccagtcgtgagggcggcggcgaggcctttccccggcgacgcgacggctcagcacgaggacgacgacgcggcgcgcgatgggcgggcgacggcgacggcgcggcgcgaagtttcggatccggcagtgccgccaccggatctggcacccccgtggctggattcggcgccctgccgctggacctggccggaggcgagcgtcattgccgtccgcggcggtgtgacggggcgcggagtaagtggggcggcggtgcatgtgctggcggccagcggggtggaggccggagtggatccgggacctagcggtcggatctggcgttgtcgcctcgtcgcgtggcgcggtggacggcggtggcaggagagcggcgctgcgtcgaagcggccccggcgccgagggcgggttccggccgacatgtgcctagggcggcgtgcgacgcaaggacggtaacggtggtcggtggcccagccctcggtcgaggctcaggggcctgcgtgcctccggagatgccttggccggtggtgcgacgacttggcggtgcgtcctgtgggtgccgtcgccaccgcaccctcgtcttcctcttcccctccccctagtatcctcgtttgtctagtatcctcgtttgtgtgccctcttccccctagttccaaacatcactagtgatcttgcccttcaacttcttctcaatctagcgtgcttgtttggaaattgtgctcctctagtagctcggattgttgcggttctatgccctcctccaaagttgccgttgatgtccttcctctgtaagaatccccttggccatttctccttctgtctagcccctgctcgtctacaccctcttcctcgagatgtccaggaccgcaaggatcagtgtttctccctcctttgaggcttccttcccttgaatagcgttggagagagttgatctaacaagcaacttgataaagcctgattaaagaagacttaatgcgggtggcctcgagccacaaccttcagtggccctccctcctttggggcttccttcccccaaagggcgttggcgagctctgatccaaacagcaacaagatcaagtcagcttctggatagcttcatgcgggtggccttggacttcaacagcattcccttggcctctcttctcttccgacatgcttgtggctgtgtgaggaattggatgttgattagttggggtttagcagtaggtttggaatttggcaagataattttgcatgtgtcgttcatcaattgtaatctttaggaggttttttttctctgttctctcctcattgtattctccatgtattctgttctactatcctccagggtcactgcgcttgcgtaggtaaagcttgccctgtgtaagatcatttggctcaatatatttaggtggggattctctccccccgtgatttagtaaaaaaaaaaaatactcaccgaatctcttagcttttcggagaggatttgctgccggtcgccgctacctcgtggcggtgacatggactggagtcactggacggccgcgcggcacacaagcgcacgcgcgccgcgagcggcgaccgtgcaaaagagaaaaaaaaacaccattcaatcgccagacgtataacatgcacgcacacgctcgtgacacggtgagacgatatcatcaacatcaagcacccgaactgccgaaatactgtacctaacacgagattattttttaatctccctctgcgcagctaatcgtagcacgtatctaactatgcatggtttgcataccgagattaaaggaaatggctatacatgttacccgtgccatgtgtacaacctgcattcgactaacatgcacaagcataacttttgcttgcgtggtcctacatagagagaaaccgatcatggtgattggtggacgtagcatggttggacgcatgttgtatacaacacagttgtacgaacagcaggactgcaggagttgagattaaaactccgacccgcaaaggctgatcgaattttattttttttttgccgttaggagtattttggcaagcgagacaaggggatgtgttctcaaaaaagacaaggggatgtgagttttaatctcggatcctcaggagcggaatttcgtttgctatttctttaagggaagaggcattcataggcgtccagaacattttgtcgttccgtttttcattgtttcaagctgatgcaagggggttgggagttttattgtccgacccccaagcccaagggatcgcatcggagtcggacagacggatcggcacctccaccagcaggctgcgcgcggcgattgtgcaaaaaacaccgcggaatccacgagccccggccagccatgcgagtatgtgacagccaagcgtatagcccagtgacacgacgagatatcaaacagccgaactgccgagttaccaaacacggaaacacgaatcactgcaaatatggtgtcctaattcataagagctcgcttaattggaacctttttctggtcgccttttcccagccgaattttgactcgcagctcatatacgccttttcaggctacgtagaaagagtggaagactgcttccgacgtactagtagcagacaaaagaacggcgtattagagtactcacaatgtctgatcaggcagagctttcagggttcaactattcggaaactggatagccaaagcccaaaacacaggtccacggcaagctactggccacactggcaagcgaatcagcgattggctacagctctctgctcggcatataggccggcctagctagtggcacacaaaagcgggccgcactggtcaagacatttctccagagactgaccgtacgtcgtcgtcgacgccgtcgccaatatttgattggtgaccggtcctgcttggcaaccttgtacgtaagggtgtaagtgggtaggcttatgaacccatttctaatataaataaacaggtaactcatcgattatccgtttatttgtactataagtaaatttatagatttattcgcttgcacacttacctgtaacatcgatc

SEQ ID NO: 24357 - DNA, 4738 bp, Oryza sativa
agaagagggccttgtccacatcgcgaggacccgttcatcccaggcatgctggtgatgacaacgaaatcatcccgatctctctcgactcctccggtcctcccccgataataatcaacaagattatattttactccctccgtctcgaaatatttggcgccgttgacttttttaaacatgtttgaccgttcgtcttattaaaaaatttaagtaattattaattctttttctatcatttgattcattgttcaatatactactattattcaagtttttgaataagacgaatggtcaaacatgtttaaaaaaagtcaattgcgccaaatatttagggacagaagggagtagttctgaaatgaaaaacattactcccattttaccctaccctctagaattgtctgccatagaatgttgttcagctacacaataaaacgatcaatgtccatccgcccggtgctactgcacggtagagtacttcagcaacccaatgtccactcggtatgatcttcatctagaaggaactgaatagaggcgcggctgagcttcttatatcctatgctttgtctctcataactgatataagccgtaaacggtttatcaacaactaaaaaattaatctatacataaatgttttatatattggcgtgttcggatgagagttttgcagcagcgttgcggctgcagaatggctgcagcttgcagcgattttcaactgccgcaggcaatgggtgccaaacactcaccatgtatccttatcgatttaaaaacagatactaagaatagactatgattaaaaaaatctcaaatcaaaataaagaattaagtttcaaatttaaattttgatggcaacttataagctgaaacacacacacaaaaaaaagtagacatgtagcaacacacaactgttgaacgaacaacactgctaccataggtgccggttcctaatggcccataggtccggattttcatccgacatcaattagtcggcaccaataataacaaccgacatctataacgaaaatagaaccgggacctttaccattgctcgagccagagagagagagagagagagagccggctcgaattcgagaagaactcaccaagcgccgtcaccgggcatgcgccccaaaccccaaaatcatccacaaatcatcaacaaaataaattgaatcacataatgaacatattcaacaacaaattcacacagacatcaacaaaaaatctacaatagactggggagaggcgtagaggggagggcgccaccgctgcccgccacctgtcgcctcccctcccgccggatccagcgaaggggagggcgccgtcgcaacccatcagctgtgtcacaccctgaagtttcccccccttttcttgctttaaaaattggttaaataaattgcccgaagaaattatcttcattaacctagagctaaatccctagttaataaatgcaattaataatcagaaatagcgtggtggaatttttcttgagttccccatgctccaatgcattaacaagatttttagtggaattttcagagccttggaaataattttaaccaattaaaaatcaccaaagtgcaattttaaatcccaggaaaaatcctttcttctttttctttttcttttccttcttttttctctattgggccgtcggcccactccctaccgcgctcggcctccttcctttgggccggcccgttcccctttcccctctctccgggacgctgacaggtggggcccacctgtcaagtcgtccccttcctccagccgcctaccccacgacggcaaccgtcgccgaaaccgtccgcgccgccgccttctccgctccacgccgcgcccccactccgcgtccccacgtcgccgccctccccgccattcccgcccgcacgcgcgcccgcaaatgggcgggattcgatttgaatcccccccactctctctctctccccccacgtcgccggccaaatcggggggtttcccggccatgtccacccctctcgagcccctataaagcttccccgcatctccctctcccttttccccttttcgccgcgctctcccgtgcctcctaccgccgccgcttccggtcacgcgccgcagccgctagagccgccgccgcgccaagccgccgccgccattagcattgccgccgcgtgagccacctcggccgccgttcggtttccgctaaaccccaccggagcccagttctcctcgcacaccggtgagctatccattctccttcgtctccggccaacaatggtggccgccgtggtcaccctctctactcctaatccttctcaactccctccgtaggtgccgccgccgcccgtccgcccctccttatcgccaggtcatcgccgccaccttcatcctccgctccggccgccatactcgccggtgaggatcccccctccctcttcccctctctctcgtttgcgccgactttctccacgagctcgccgtcgccttcggtcgacgccgccgtcctttaccctgtccgccgtcgcttcttgcgccgccgattgccgtcgccggcgaccgtgcgcgtcgccgccggttgccatggccggccggccggttttgaagccgtgccgagccgtgcctagctgccgccgtgccgtccgatcggcctcccggccgatccggaccgtcggtcccgtggaccggcggtggaccacccgcgtggtcccggtccacggtagaccggccaccttgagccactgcccgtggggcccacatgccggcgcccccttcctctcccctttgagccgctgacccgtgggccccgcctgtcggcgccgcccccctagatgacgtcagccctgggtattattgcgcaataattaattaaggactttttctttattagtaaaaacacagtttatcttctaaaattcataaataattcatccgagctccgtttaagtccattcaagtctcagtaaatcaagaaaaatgcaaagaatccattaaaaatggttttgtttcctgtttcagtagtcttatagcatgtttttcttgtgtgatttgtttgtagagtttcggcagtttcgtcgatccgcggtttatcgaagacgttgctgaggtctcatcagtttgagagcaaggcaagtcatgcaatacgtttgatcatattgtacccaatttaccaatatcccgcatttctattaaatgttgcattcttttacaatgtaatgtgggatgagtcctattcctcagccacatattggttaccttatgccattgataacttgggtatcaaaatgactagatgttggcttaggaaatgcttagccatgcttagttcaactagtacacaaatggagatcacattattacatagactctaactattggcatagctttagattggtgccaccgcaagggtgtcagttaattaaaatattctgaatggcgggctgtgagtgcatggttttgctggtcgcacctatggcagttaaggaccggttcacgggaaaccctgggagacttaccgtgcttaccacaagcgggaatgggtaactgcttgatctgaagtatagctcgaccctttcctaggcaccggtggcgagggtgggcgtgatggaattgggtcggccgaggtgttcggttgtccagctgccgtattcaccgcggcgcaagaggggaccgcccactgccttttgaggggtgggggtgaaaccttagcgtggtgtggatggttaggggagggttatgtggagggtcttgtcatgatttccccctttgcagtatcatggtgatacttcggggcatggcaacatgtgtggaatcgtgtcttgtgggtacagttgtacacctctggccagagtaaaactattcgaatagccgtgcccgcggttatgggcgatcaaccagattcaccgtgattagtctcacccctagtttagcttaatgaactggtgtagttcaggtggatggttgggcctgttgcaacgtggtgtagcgttggacagtgattggttaatattgattaattactacagctgttttactgctttcaactactgctttgaaatgcctgctttatgcaaaagaacccctagcttcctttggttatatcctgcatcatacctcctcttccggtatgacttgctgagtacagtgggtagtactcaatcttgctctcttttcccccacaccagagttgaagttcttctcagttggagccgtctcagaggttggttttgttgctgccgtcaaggtttgcctgtggagtggagtcgcccgctgctgaagtcaagcttcccggtttagctcgcttttatctttcccgctgcatttgtaatcttttatatttttgtaagacgtgggtctgtatatcaacaattgtcgtttgtgtaccctggctggtcctggacagggatttaatgcacattcagcttagaaattctggtgtgacaagctgccgcctgccgcctcccctcccgctagatccggcggaggggagggcaccgccgccgcccgccgcctgccgcctcccctcccgccggatccagcagaggggaggccgccgccgcccctctagccacagccacacgctgagagatgtgagagagccgagagagagagggggggcaagagagagagacagacgagagatgtaacgccccgattttcgttcgggaataaaaatcaattaataatacattttctagaaattaaataaaagttaaatcaacttaatcaagtgaattattgagggaattaaaaatttcctttaaaa

SEQ ID NO: 24358 - DNA, 2652 bp, Oryza sativa
tccctcaagtctgttctgcctccccagccggcctctccctccctctctcttcgacaggtgggacccgtggaccccacctgtcatccctttcttccagctccaactgccgccatggccgcctgagccaccccacgacgccgcttcctccgcgcgcctccacgctcccgcgcgcgtgcagacgtggtccaccccacgtcctccccttcctccactttctcccccatttcccccccaaaaatcggcgccgttcgagccccactcgcccacgtcgccggagctccatccgccggccgttgccgcccgccatggccacgatctccccctccggggcctataaaaatgcaccccgacctcccctcatccgtttccccaactcactgccccctcctgcgcgctctctcgagctccccacgccactcccgtgtgccgccgcacgccgacgaccctccagccgcgcgccgtcgccgcttccgtcgcccccgcactgcgccgctgccacctatagcattgcagcgtcccaccgcaccccggcatccgctccatttcccctccccgcctctgaaacaccgtcgccacgcgcaccacctctctccaccgtctttaccacctccagccgccgcttggcgccgctcctaaccaccccaagcagcgccgccgccgccgctcgcttcgcagcgccgaggagcacctcggccgccgcttttcacggccaggatcccgccgggacacggttcccctcgcgccggtgagcatctgccgcccgttctcacctccgaccagcgattcatgccgctgggaggcctctttccccctcctaacctctcccccatcctccctaggtccttccagccgccgtccgctggttcccgctcgcggaacgccgccgggccgccgttccgccttcgtcccgaggagcgccgacgccgagctccccgcctttccccgccccttgtcgccgcgtccttggtgagctcctcctctccctcctctgtctcccgtgcgcgctgccgcgccggtggccgcctgtcacgcccagaaattcccgagtagaattccaagtagaatgtgcattaaaatccccatccaggaccggccggggtacacaaacgacaatgttgacattcagatccacgtcttacaaacatcataaaagtcttacacaaatgcagcggaagaaaagaaagacgacaggagctacgccttgactagaactgcagcgggaacaccactccacaggcatcctcgacggcacggacgaagcctactcctcggagaaaccttcatctgacacactctcgtactctgggattgggaaaagtagagcaaaactgagtactacccactgtactcagcaagtcataccggaatagaggcatgatgcagggaatcatcaaagaagagctaaagtggttcatttgcataaagcgagcatttataaacagaagttgaaagattaaacagttgtcacatttaattagtattaactatccactgtccaacgttatcccacgttgcaataggcccaaccatccacctaaactatccaaattccaaaagattacactagggtgagactaatcacggtgaatctggttgaccgcccataaccgcgggcacggctattcgaatagttttactctgatcagaggtgtacaactgtacccacaagacacagccccacgacacgttaccgtgcgccgacatgtcaccacgacataccggaaagaggccgtgacaggacccttcgcataaccccctctaaccaagcacaccacacctcaggtttcacccccactcctcgcaaggcagcgggcagtcccctctcgtgcctaggtgaatccggaagcgacagaggccgtcgcagggcccgccccgctccatcacgcccacccttgcctggatgcgtcggctcgaggagagctacactacaagcccagccgttgcccacgctggcttgtggtaagtacgataagttcttccagggcatcccgcgaaccggtccttaactgccatgggtgcgaccagcaaaaccatgcacccacagcccaccatgtgatttattttaattaaccagcatcaaagcggtggcactaatccaacaatctgaacattaataagattttccccattgtgcactagttgaactaagcatggctaagcaatccctagtccaatctctagtcatgttataaccccaagctgacaaagggacatggtacaacaatagcatggctatgacaataggtaaacaccccatagtaacattataaaacaatgcaatatttgaaggaaaaaaatagagcatttgcaatataggatcaacatgttcaagtgacaagcatgacttgccttgctctgctgctggaggaacctcggcgactatttcgaagtacaccggagcgtcggaggaaccggaatctagcgacatacaaggcaaacattgcaaacaggctataagactactgaaacagagaacaaaaccatttttaaaggattctacacaattttcttgatttactgagacttgaatgggcttaaacggagctcggatgaattagttatgaattttagaagattcactgtgtttattactataacaaaaatccttaaatattttattgcgcaatattttcccagggctgacgtcaacac

SEQ ID NO: 24359 - DNA, 644 bp, Oryza sativa
ttcaagcctctaactgatatattatcttctgataatttcttgtgttctatgtccgtacaagccattaggatgccaggctttgtggatttggagatatttgtttttttcaaccattacacatctgtcattgtgccaatttggtttcaatggaagtcatgaaaacttagcttgctgccttactttagccaatttgtgtcattatgctaatttgtcttttcaatgcagttacccccccttttttgatgacattgctgctcgtctgcttctagtcatcccgttgataatttataggcttattgagaacgatgccacagatatcgcagatagagtccttgcagtttattctacctttctggccttccatcctctaaggtttacatttgtgcgtgatattcttgcatatttctatggtcatcttccatccaagttaattgttaggatcctcaacgtgctgggtgttagcactaaggtagaccctatatactctttgagttattatggtgcttcctcctgcccatcttggttaattctttactaatgtgtgcaatttatagacacctttctcagaatcatttgcccagtatctagcgtcatcaaattcatctatttgtccaccaccggaatacttcgccaaccttttgttt

SEQ ID NO: 24360 - DNA, 1665 bp, Oryza sativa
catgaatggcttgaatctacccataccgtcatcaagcatcttcggccagtcaactcagttgccatgttaagaattgctttccgcatattgggtcccttgttgcctcgtctagcctttgctcgacctctgttcatgaaggtattcttggtttgcttaccacttcctgatggttagatttttgcattaataaattggaattgattttgagttaactgctggggacaacttcgtatgatattggcgctttgaactggatcaatatatgtttacttgcaatcagtagctattacaggatcgtgctttgtctcttaacatcttcaaaattttatttaattacatcttttggtggcataacctactaatcgaacacagaaaaaaaacattatgtagttttctgtattgctttgtgttgtccttttatgcaattaagctaaaaaacgaactgcagttcacttttgctttattactctatggtccatgtacatcctattacgagatttgttcatcttgacctacacaccacagtaattctatatgaagaaactactgtcttccgttctctactaatttagtatatgctgctgggatctacagaccttggctttgctgttcaatgtgttgggggatgtatttgggaagaattctcaggcttcacctcctgtggaggcatcggaaattgctgacataattgacttcttgtaaggcgcacttcatcttttccgcacttgtcatcttccctggcatgcagtttgtttcagttctccttctacactaattgttactgcataactcattctgcattatattctcactgcatcgttctctatatatagtcttataacagttattttttttctttgttgctaaaataggcaccatgcagtcatgtatgagggtcaaggaggtcccgttcagagcactagcaagcccaaactagagatattgacgttatgtgggaaagtaatggaaattctgaggccagatgtgcaacatcttctatcccacctgaagactgatccaaactcttcagtttacgcagctactcaccccaagttagttcaaaacccatcttagtattacaaggccatggaggagaactgacatatttcagtcggaaagatgggaggttgttcgaatgtgtttctagaaggcgagattctaattgccgctgcttgttaaatgaaaatttgcttgctccttatggccatcacaaattcatgaatgaaaattagcctgttaaatgaaaattacaagttcatgaatgttgtaaaatagaccagacctcatcccctagatcttgctggagggataaaggttgatgatttacagtagttgtaactaatagcttcattaggccgggatgtagattgagattgccctagtggttagagagagacattattctcccgatccatgttttcactttgtagctagcgttgttgtacatgaatgtaaaatacttgattcacaatttataacataaacaccaaattctatcaggccaggcataccattattcgttactccattcaagttgcagctcgtcagagctgtatttatttgcacgacctcaggaatgcgcggcaatcagtggagtgatgctattagacaagcacctggttgatggtcaaagtcatgcctcgccatccatgtacggttcttatc

SEQ ID NO: 24361 - DNA, 5650 bp, Oryza sativa
ataacaatgcttcttatctcattcccatgaaatgcaacttaccacatgcagactgtaaaccaccacgaaagacatcaaaaggaagaagtgaatacctccgtgagaagggaagcttcaggagtagcgtcgacattgcattaatcatgtctggcatgtaaatgaactgcatgatcacaatctgcaggatccaaaaccacaagttcttcgtaatcatctcagcagcgtgccttgcaatagcatgcccaacctacaacaaaaggcacaactgtcagttccaaatctccaatccaccgcaactaaccaaaatcacacatgaacccggaaatcccaagtccacctcgtgcccaagcacagtagcaatctcagcatcagtcttgaaatggttgagcagtccagtaaagactacaatcttgccaccgggcaagcacattgcattgatgaggtcatctctgacaacgatcacctcccaattgagcccatcaagatgcctcgtctccggctgtgctccccgtgccttcccacggtcgcggctctcggtgacccatctgtcatccagaacctcctcgtctcgctgggccgcggcagccacgctcgcgttcttgttgccacgggaccggccgagcatcacgtcttccgcgccggcctcgtggttcttgatgacgacgtcggtggagatgtcgccgtaggaggcgtcatccgcggcgaaggcgtcgtggtgccttccagcgaggccgcggtggacggcgcggacgacctccgaggcgatgaggcgaacgcggatgctgtcggggtgtagcggggggaggatcttggggcccagctccttcttgagattgttgaactgggactccccgagctggcgctcgagcgggggcgagaggaggatgaggtgggtgcgattggtgtaaggcacggtctcgaggttgccgaagtagacggccgccgcggcgccgcccgagacgacgaccaccgtggtgagcttccgcgggtcgtggtaccaccgggacccgcgccggcggttgaagtggactaccttctgccgctgcggggaggtgtagaagtaccgagacggcggcgcctgcgcaggccgcggcggcggcggcgggcttcggaggagcactcggccgaagcggacggcctccgggcgactcggggaggtgaagtagtacccagcgggaggcgcctgcggcaacggcggcgacggtggcagccgcgggcagccggtgggcttgtggcggaggagcctggagaggacggagcgcgagttcttcaagtaattcatgttcttgttctatttttgccccgtattttggggatttttcgggggcggcgtttgatcgctgcggggaatgggtgagggggtttcaagaggtttgccaggtggcatatggcggtgagtcgctgggcccgggagaaacttctaggcgcgccgcccaagtcgctcatttcgggccgaccgctcatgggcccaacaatgcaatttccggcccaatttggggtagcgctcaatccagtcatacgaattgttgcacctctattaattacttaagctcgagctagctcgtaatctctaacgagctttgaagccagtttggctcgttaggaaattcaaacgagtcgagctaagttgagcctagcttgtcatgaaccgagcgagctaacgagccacgagcttcctgtccattcctaagcctacctcatggctgagcaccgtggctgctagatcggcgtccttccggcagaatctcctgaggtaccaaccgaataccacgatcagtgttgatcacacgcaccctccagttgaggccgcggacggcactatacatgctcggtcctctccgacagccgatccgctgctcgaaaacctcgtcctcgcacgccgccgcgatgatgtgggcggccacacgccgcacccggactcgtgtcggggtggccgtccgggagggcacgggttaggagcctaggagcacctcgtcgcacaatgtcaagctcggcctactcgcggagactttgctgatctccttgcgcaaccagacgaccgcgcggagccgatcgacacgactgccgccgcggccgcaacgcgtggaaggagacgacaagccaagcacctagggctgcagtgctcgtgttgttgtgactcaaaaaacacacggagaaaaagcggaacaaagcggactcaaaacacacggatacgacaagccaagcacctgggccccgctcgctcgctcacatcgtgctttgctcctccgcccatcgtgctcgctcgctcgacgacgacggcgcgctcaagcgacgtccgcgccggatttggtggtggtaaggggtcgacgcgcaatggcaaatccgtcggtgtcggcatcgaatcagaagtcgggcttgggagacggcagagaatccggcggtggtggcggcgaatagcaagcaggggagggcggggatggctaggtggcatcggcggagaatccgaatacgcgctcggacgacgccggcgaatccggcggcggtggcggtgaatccgaagccggggagggcggggatggcttggtggcggtggcggtggcaaatccccgtcggtggcggcggtgaatccgaaggcggggagggcggggatggctcagtggcagcggcaaatccacatcgccgttgtctctgacgtcggcgctactcctccttccgcccgcgccaatggtcaccgctcctccttccacccacaccgccggtcgccgtgccgctccgctccttctgccgtggtgctaacgttactccaaacgacattcatcccatccctacccatcccttctaccaaataaaaaaactagattattccatccaataaaccaaacaagtaaataaatggaatcaatccatctctaaaatcaggatggtatcatcctatcccacgtagtctcctaaccaaaacactaccaggctagcgatcgagcctctgtcgggccggtctcggcatcctgtttggaacttttgattcgaacacgttctgcggtgctttgtccatctttccgatgttttggttccttcacaaatttgcaagtgcacggtctgtgattaattactgaccttaaaaatagaggctacgttacatgatctgacagaatctgctggcacttgctcttccagtcctacacaactacaagagaacaaaacatacatgcttgagagcctaagattatggttgacatttcataaagctatgttcggcatagagggttagcgactaacggccttatttttccagttatgtttataattatcagttaaaatttaaatttttaacattaaatttgaagttgattttgggggtcttttcactgtttatttattagcctatgcttttagatcattaataacacgtgcataaaaattttattcaaaaataatttttcgttagataagtattagctttaaaaaatttttgaaaaatagattaatatgattttttttaaaaacaacttttgcataaaattttttcgacaaaaacactcagttcgttaagcgtgtacaaaaaaaaaaaactataggtggaagttaggaaagtggagcgccgaacacactctaaatgatcaatagctcacggcgatcagagatgtacgaaaacataatcagcatagcccgtaccgataaaaaattgtatatgtacaataatatcagggaacaatatccctagtggtttggttgagtgctcgccttgatgaccagctatgtcagaggacgacctcctcgagcggaggaccgtgaggcccctcctttgttagttcggccgagggcagcgagtgaaaattgaggaactaggaggattgggagagatcgagggccgggagtcgggcccccgatgaagatgagacactagggagttatccaggttcgggccgctaaaaagcgtaataccctactcctgtgtatgatgatttttctgagtttacaaagtctctgaatttctggtgtacaagctagggctaagcgttccacctcttttttcttctatccccctcttcactggacatggacctccttttatactccaaggggttcccacatgcaccgggtgtgcttcccagtgaagagggaaaatattctctatattaaatgtttgtctcgtgccacaatctggaagtcatctgagcatcggctgctgtgcagggcccatcaaatcatgtcggctgacgtaggccgacacagggaggatccccgtcattcaccatttaatagatgtagacttccggcgcgcacgcactggaacacgatccccagtgtgtccaaagcggtcaagccaacttcggatggttgagaggcgttgtgcctcttatcatcgcgacgagacagggcatacctgccgcacgccgcctaacaccaggctaacgcgcacgtggcttcccgctgtcctgtctgtcattcgaccggccacgcaccggtcacaatttggtcaagcgcgcagcacgccgcattcaatgtggcgtggtgcgcttgctctgcccgcactaaaagcggttaggtgggcgtagaggggcgtccacctaacctcacttgcatgacggccacgtggtgaccgtcccgatgggtcggggcagcccagggtcgggctagggaggggtggctaccacctatccacgggcccgacccctcgggggaaaacgccacgtggacattgggggggggggggggtaatcttctaaagttggctcttctgctaactttttgattgggtccacatggcacccctccctttgacgaaaaaaaatcatgaattcatactagagaaaataatctgagaatcaccggtgagaaaaaaaataaattcatcaaatatactatgcctactccaaaactatcttccccttacaaatcacacaaacttccattcatttgccttcttcaaatatactatgcctactccatagtaggcctaaaaatcttgtggaacaaaaggaaataaaaagaggtcttgcagatgcaaagaggaaacttgattgtggattttatgttacagattgcgttgcaaaaaaaaagaactcttaatatactaaatgtttgctctttcaaatattcaaacctacaagtgtacatgttggaaccaattaatttaattgaatcttaaatttgacttgcatatattttctcaaaattgacgtttactataaacatggcattaaattctatccttttgcttaacattgcatacgagtttatatttatttatgataaaaatatttttatttctatgcataataaataaattatttatacatacatatttttttcaataccatatgtaccaatttgtcaaaaccaaaataacggttcacaatttcatttataaaatatttgatgaaaaatatcaaaattccaaaaaagaaactgaagtatatatatgtttcaaattagtaagcgcacccctagcgtgtttattttacaaaagataaaaaataaaattgtcgcccattttaatcatgtagtatctgttaggtgatagaatcatcttggatttttggttctaattatacttttacacccaaaaggcataccagcattctggttgctaagataaaaaaaagttcactataatattattacatgctacactaaaaattaaaatatcactaagaggccttattaaaaataaagtgtatatttttaa

SEQ ID NO: 24362 - DNA, 1030 bp, Oryza sativa
gagactcgccgagagggagggagagagagagagagtgagagaggtgaagaggagagagagatagcatattggcaggtgggccccaccatgtttttttaaaagaaaatattgactgggctgccatgtgtgcgtcacgtaggataaaaccgctttagattacgttgagggggggtaattcgtccgatattaaaagttcggggtgagtcatatctggttttcgggtttaggggggaattcggccgaccgcgatagttcggtgggggtaattcgtactttttccataactaaataaagcaacttttaacatgtatatgaagggaacatattctatgcaaacaagctttccgtgcacactaattagcaaatgtcacgaaaaattctataaaagattgtacacttacttcaaatagtattgcacctacatgtgaaattttatcttcaaattcattatattttagccataataaaaaagacaaaattctgacagatttttgcccttaaaattatcagatttttcactttttttattacggtaaaatatagtgaatttgaagtgagactttctagatatgtgtaatatgaataggagtaaatgatttttttagaatttttcgtgacatttgctagttggtgtacacagagtatgcacgagaagtttgtgtgcatagaatatgttcccgtacatggacaaatatatgtttagatgaaagttaaaagttgctacattcttaaacgaccgaatgcgggggggggggggggggggcgtatttgccaacaacatacctcgtggccgagcgtcgtggctaaatcgtcgtccttctaacagtacgcgttgaggaacccagtgaagaccaagatctcaccgctctccaaacaacccgtaaggctcttgtcgtcgttgatgacgtgcaccctccagttgatgccggggagaaagcggtgcccgatcctctccgacagcctccgttgcccgaacaccgcatcctccagcgtcgtcgaaacgatgttggcggccacccggcgcacccga

SEQ ID NO: 24363 - DNA, 9788 bp, Oryza sativa
tcctgcagccctaatagatcgctccgttttccgtgcggagtcactatgttcccatcatccacatgcgaacacagccttagtcgtcattctccttcgccagtttactgaagaagctcccgtcgtagacggctctgacggtgtccttgcgaaggatgtcgtccttgtccttggcggcctcgaatgtcgcccgccactctgttgcagcctggagcctgcattttctcgatcttaggccgagtttactttcaaaatttttctctaaactttaaaatttttcatcacatcaaaattatcctacacatacaaactttcaacttttccgtcacatcattctaattacaaccaaacttctaattttggcatgaactaaagacacccattactccaacaaccacaggtgaataaatatatatagttataccatttatgattcttgaagcactaagttttctatttgatagactaagttcctaattaaaatagttgtatatatccggttggatatagatgccgggtaaaaaaataccctatgattcttgaagcaacaagctagcaaaagattaccatcctgagctgtctttgtgctctgtatgatctgcgtatgcatgaagcatctcgtccagctcgtctgatgtcaggccgtcgggtacagtttttgcatgcctggtgaatatctcattgaatttttcactaacaaacctgcatagcagaggcctagtctagtttagttctcaactttttctttaaatttttaacttttctatcacatcaaaactttcctacacatataaactttcaacttttccgtcacatcgttctaatttcaatcaaattttcaattttagcttgaactaaacacacccaagttgagtatagccgtatttaggtatttttttgtggggcttcctcggaatacatgaattttgcatgattctcacatgaaaaagtttaaatccttaaaaattccaaaccagataagcctttactagtttaataatcacaaaatgcatgtggcatctagtactcgtttataatctagacacgttcccaaatggatgaggagagcacggtgtaccttccttcagaatcgaatgcacccgtatcacttccatggatccctttatgaatgttctgtacatagatagaaaaccatgacccatctgcgtcttcctgcatgcatttggaaaagttcaactcttgaggttgtcatcttaaatatgaggtgaattatgcgttgaatgagaacatatatataatataaattatacaaaggcgtcatgcgctgtgtatatagaaaaaaatatgtggtgcaaactttatgtatattgtgcaaagctgaaaactatcgtaggataggaaaatggacgtataagatttatctgtctccatgaataaactatttactctatgtatgtatgtatatatgtagaggttgcactacatattttttttatatacgttcacagggcataagagagatcatacaggtctagttttggggccgatgtcgccattgatgaaggtagcactcacggtggcgccgaaaatcccaaatccgagggtgcggagccctggcaccatataaagtccaaaatgcagcctaaatcacatccctttatcaattgaaaaagcatactaccctcatttcaaaatatatgataccattggcttttcgcatatcgtgtgataattcgttttattaaaagaactagtataaatatattaaaaaattagtataaatatgtaaaagtgtaagttaatattatagttctttgatgataaaacatatcacaatagaataaataaatttatataattttttaaataagataaatagttaaatattatataaaaattaacggtatcatatattttaaaatagaagagtaaggccaagtagaaattatcgaatactctagcagagaaaatcaaggcagggcgggcgtggccacctctgtacgtctcgccaaaggtgatgatgccgtcgtggtcgctgtcgaagaacgccacgtgcttctgtagctccgttgccggggcgtcgccgcccaccgccgccggctggctcccttcctcgatcgtaaacataattggaaacgaaacgcgcgtgccagaggatgactagtactcccttcatctctaaatatttaacgccattgatttaaacacatttgactatttatcttatttaaaaaatttaaataattattaatttttttctaccatttaattcatggttaaatatacttttatatatacatatatttttacatatttcacaaaattttttaaaataagacgaacagttaaacatgtttaaaaaaatcaacggcgtcaaaatttagcgaaagggggagtattaattacaggggccttacgtacagaagcatgcggcggacaggaggaggagaggcacggccgcgaccgccgccatatcgttgtcgccggccagggacgacagccgccgtcgtcgagcctccgctgccgtttccggctgttccgagccacctctgcttcttgatccctcgcttacccgctgaaggctgtatatgtgctcctctccctctggcgccacgtgcttcgcgtgtttctacgatcggctaaaattttccatgcaaacctatcgcttgcaggcgatactcacccaaatagtcaaatactcagcatctataataatggtgccacaaatctaagctccacacagtcggattttagttcgcatgattaaaataacattagtaagttacggttataatcaaaggcaacacaaatcattaatatgctaaggtgaactttaaaaataaaagcaatctggttaaaatacacaacataaattaacttttatctagaaaaactatcaacgaatatttacaataaaaatatataaaagttattgtgtaattataaactaattacacatgtaactatagtgtaatttgtagttacatatataattactgtataaataatgtagttacattcactgactagcacgtgtcatgtagagaaaaaggactcgccaccttgggaacaagttgttcgatcggcttgtctagatgcactttgaagcttgcacgaatagtgaagaagattagatggcagacaaagttactttatttagccgaaaaatatgtcgacccgaagttatatgtgaaatatattctgatttttaagatctattttatacaaaatgggaaagtatttctcatgtttttttcatgtcacctagatagtaaaaaaaatacaagatatattactatgagatatataacttcacaaatatgtaagttgaaattcaacttctacaaattttagtaaaaataaaaaatacagctgtgaatccttgtccatacgaaatagaatatatgcatgaaattagagaggttgtgagtttaatccctaggtcctggcgcacttgtaaatttttttcctcctccacttgtaaatttttttcctcctccaccagcacgaatcatgaggcgatctgacagctacaaattcgaaaattttatggtagaaaatctatcgcaagtttttttagcagttatgttactatttgcgtgtaggggtgaaaacgggtcgggttcggtcggatctcatcctttccgtatcctaacccacattttaaaatagggatcgggtcgggcacggatattatcggatacgaatacaagcacggataatgtcgggattaaatacggaacgaatacgtaccaagtcagatacgaacactatcggttacgaatccttattcggatatcaaatcaaagcaataaccatatataccacataggcaatagtcgttcaatcattccatatacgtataatatgaatatatattagagacttagggaatggtaatacctatcagcacaacagatccaaagtaggcgtacagactcaaatactcaatggtgtagaccatagttcacggttcagcattttgctttacgttgttgctcctccacacttgtaactttgtccttgacacagatactagtgtttgcattaccactagccattctatcctaatcctacagccaaacagtaaaagtaaaataaaacactgaacttcaagtcgtaaggtgatgttgataaagcaataaaacactgaacttttgctcacctggatgacctgctgagaggtgactaccggaagagatggtcggcgcctcggcggtggtaggcggggccttgcgacggtggtcggcggcggtcaacagcggccagcggccagcgggcgcgggcgcgcagcagcgtagccactagcagctagcacagcgcctagcggctagcatgcacgacgccggcggcggcgccggctgtgcgcctgtgcctcagtgccagtggttggttgctcgcgtgcggcatgcggcgccctcaggctgatgcctgctcgtctccctggtggttgtagcagttcgggtcatatacgggtagttaactgggtaatacccgcataatttaccggatacagatactgtcctcccgaacccgatctcgtatccgctagaaaaaattcgtatttgaatccgatatccgtgaaagtactcgggtacccgaatttttgacccgaatttatcccagattaatacgggcgggcggcggacgggaaatacccgccccgttttcacccctatttgcgtgtgagaaataagaaatatttcccactaaagcagtgctctccactgaccacgtagcagcaatcttaactactaattgattcattgatttatgagtcctactatcagtaaaaaaagatcattctattatcgatagttaattatatatggtagtgtatattatagttaaccattgattcatcgatttatgagccctacaatcagtaaaaaaaagtcattctattatcactatttaattaattaatatggtagtattacttatgtggtattcttttctcccgtagatgaagattaagtggtttacgcaaagtgaggtggtattaacgtatgattaattgagttttaattattacaaacttaaaaaatagatttatctgatattttagaacaactttcatatagaaagtttttgcacgaaacgcgatgtttagtggtttgaaaagcatgacacaagtatctaaattttcatccatttctcatcgtaaaaactactcataaggagcatcgtaaaaactacatctttccactatgcagaggggatgaaattttggatactcgtggcacgcttttcaaactgctaaatgatgtgtttcgtacgaaaactttctatatgaaagttgcactaaaatatcgtattaatctattttttaaatttgtaataattaaaactcaatcaatcatacgttaatgccatctcgttttacgtaaaaaacttaatcttcatcttcggctgtgtttagttcacaccaaaattgaaagtttggttgaaattgaaacgatgtgatggaaaagttaaaagtttgtgtgtgtcggaaagttttgatgtgatgaaaaagttgaaagtttgaaaaataactttggaactaaacacggcgttcttcttcatcttcagaaaaaaagaacaccaaacattaataggtggattgaatcgagaggccgtttgtggattgaaatcattatactagtgcttgatctcccagtcagggagaaacaacaaacggcttaatccaaagcccagactgttcgtgtgaggaagccagaaaaggccatcaccgttactgaaacgttgttcttatatgccactgcttttccgccatttggcgaacggtttcaacgtttctgcccttacgcaaatgcaagccactttggaacatttcctgggtaaatatatatggaccattcattttagggatgccttgacatgttctatcaatttagtacatttttccttccaaaatcccaatcatgcttggtttgcagagggacccttcttcttcgacgccactttactgaagaagctcccatcgtagacagttctgacagtgtccttgcgaaggaaaccatccttgtccttcccgagcttgaacgtcgtctcccactccgtcgatgctccgaccctgcattttctcgtggtacaaaagtagtgcaagcgaatacagtgagcagaccatttgaacagatatacatgcatatggtttctgaagctatcagctagcaagagattaccatcctttgtagtccttgggttctctgtttgcacgaagcatctcgtccagttcggctgctgtcaggccatcgggtacagtttttgcatgcttggtaaatatctcatcgaacttttcattgacaaacctgcagcagagttgaatatactactagcatatcaaaaagatgattgtgaattatatgtgtggaagaacgtaaaagaataatctatgttgcaaacagttcagacaatccaaggcaatttgctgaactcgcttgtatcattactgtttggagagtctacgaaatgactaccttccttctgaatcgaatgcgccagtatcacttccatggacccctttgtggatgttctctatatagatagaaaaccgtgatgctgttgcattttcctgcgtgcatttggaaatttggaaaaagcacaaactgtcagtttttttctttatatcacgcataaccaggggaattatgcgccaaacgaaacatatataaagatgtgacagatcatacaggtctggtcttggtaccgagggcgccattgattacggtcgcgctgaatctggaggtaacaactccaaatccgagcgcacggaaccctgcaggcaccattaaaaaaaatatcaaaatgcagtcttagatctcccttgaattgaaacaacatattaaaagaaattatgctgtaacaatttaagggagatataaggctgcgtttgacatttagcaagcagaaaacggaggataggacaggcatggccacccaccttcgtacgtctcggagaaggagatgatgccgtcgtggttgctgtcgaagaacgccacgtgcttctgcagttccgtcgcagcgccaaccgccgccgccgccgccgggctccctttcctcggatcgatcgcaaattcgtaatggaaaacgtagcgatcgagtaagcaaattaacgagacacgagaccaacaaatcagacgcgcacgcacgcgcgcgtgccacagaggatattgtgtgttacagggcgtttacaggaggacgacgaggcgaacaggacgagagccatggccgcagccgtcgccggagacgaccatcgtcgacgaacctccatttgttgttgggtcactcgcctctggtgctgcgtgcgcgcgcctcgtttgtactctccgacgatcggcaaaaatttcctatgcaaagctttggtcgattcgtttgcgggccaaataaactcgcccaaatacaacctataattagccaattccgtctccaacagcctatctatgagtctatctatctatacatctacttagctagtatatatctatctttaattttggcgtctagtatttacattgattgctttgtgtataatcgtgtatgaaatatatttctattttaaaatatgttttgtatttaaaagataaactatatgaaattagaaactaaaagatatatatcaaaactaatttatagaaaaatatgcattaaatctaattattccttatctcaattgggtatgaaactccacaaaattaggtgtaactagtaatatatgcccgtgtattgcaatggttctatatggttagagtaagtttcacaagtttatatatgagatgcgagcatgtggtgggaggagagaataaaagtaggacggctcttcttcttttataccgttgtaaaataaagataatccgctaacttgcttctttgtcatttctagtttagtgagcccaacctaatttactactagtagtattttgcaggaaaaaaaagtctattttgtctctcatttgtatgaggcagaaacttgtcccacgtatggttcaaaggccgagccccacccttgtaataatgtctcttgcctctgtttaaatcgcttcccttaacctaaaaaccaggcataacgtttctcccatctttaaaaccactgtaaatcgactcattcgtggtttcaaaagcggttttattgtggtgcttgtaggacccacatgtcaataaaaattaaaaaaataatcacacatgtcaatcatccttattgcctttttctttttcatctctactcccctatctctttccgttctctctctccagttggcggcagcgacatgccaagtccttggggcccacaccctatagccggccgacaagcttctcccctgcgcaccacccatcttgccaccgccttcaacggctcttggcgatgatgccatatagacaagcccagcagcagagagggacgtcacgacggcaaccgcgtcatctcgtccatcagtccctgccctgcacttcgtcacactcgcatggcttcgcgtccttctccctggaagccgtcggcatctttgcatcgcatcttcctcttccatctcctgactcctttttttccccgtgcatcgccaccacccccggtgatgctagcctttgctgccgcctggagagagagaacggcagagagaggggtgaggtgaggaaatagaaaaggagattaggataatatgtggggcagtaaatttttttttactgatatgtgggtatcacgagcgccacgtaagatagaactgatcctgaaaccataaggagtctatttacaccggttttcaagagatgtatggttgaggaagtcgattcaaccaggtctaagagttgagacggaaaatagaccaattcctttacgggctaaacttagcccaaacagagcaaattcctacccatgaagcccatctgtagaaacagaaggatccagtgcaggccaactccacagccgccagcccaacaagcgctaatggttcacggaccaactcgacgccaggtcggtctcggtccagccggcgtgcctccctcgtgctcgcgcctgctgcacacttgctcactgcaccaaccgcgccgccgtcgggctcgggccgccaacccgcccgtcgtacgctgcgactccgtgacttgatcgtgtcaagttgccacttggcccccccggtccggtcgagctgcccccgcttgaacgagcccgtccgttcgctcggccggaccggagacgattcttcgctgtttctgcccgtaattttgacaaattgaccctctgagaaaacttattttaaaaataaaccataccaaaaacttattgcaaaaataggccgtcgtctcagcgccaaacttattggcgctgaggtataatgccttagcgccatgtatattagcgctgacatttcatctgagatggtaaaaaaatttgccaagtcactggggttagtggcatagcttacggcgctgagctattgacgttgaaaatgatcttctggactttttggtttgcatgttctcgtgtagtgtggtggcaggagactttgcctctcatctcattaaccacggttcaatccctatgttttacatcctttggatgttttttttatttttatagcatattttttattagtcttataaattaggaacaactaaatttgagaacataaattttatagcattaatacttatattcataaaattttgaaagtacgcagcatttaacatttcatatgttttatgtttaaaacaagatcattacacataaatgtaagaaatgtaattttaaaataaaaaattaggaggtaagtgttaacataaattacatagtatttatttttatagttatgagtcaaaagaaccataatagggtg

SEQ ID NO: 24364 - DNA, 10111 bp, Oryza sativa
ataacgctgagccgccggcctatttttgcaataagtttttgacacggcttattcttgaaataagttttctaaaaaagtcaatttgtcaaaattagtgtgtttctgcggcgtgaactgcaactactatacggcgagcgtcgttccatgcaaacatggcacacgcagctcacgaacagttaagaaaccaggcggaagtgagagttaccagcattaacgcctccttcatcaaaaagagaaaagaaaaaaagaagcaccaaaaaataaaatctttgtctagtggttttgtcttcgttgacatgtcacagcgtcggtgacgcaagtttatcgtcgtctccctctcacatacttacgtctctacacggtaaaaagcggattccacttccaccgcgaggaaggaaataaagcacacaccgaatcaccggcaccaaaatttccaccgatggttacaagcccgaaacgacagattaattaacacgattagttaaactttcacgcccggtgtggaggggtccaaacaaaacagagggcgccaagttgtttttatcatctactagtcctacttggctcgcgtaagcgagagccgggacttgtcactagtttatctcgcagcacctaacgccttgacagcgaggtcgcgttgcatacgtggaccagagcaacacaaggtgcccagattgattaatcatctcgtctcatctctttctaagcactgtattatgattatgattatgattattattattattgccccgtcaccgtgccgaccagccccaataattttacggccccagacaaatcttattgccctccctaagtcaagtcagtctacgcattaatccgagccgatcggggtcgccgtcgggcatgtcgccgtcgatcggcagtgcggcgaggcagcaaggcaccggttggcttttcttcttgttttttttttttttactcattggagcagagaaaatacaggggtgcacatggccccatccgttcttatctgcaggccacgcttttgaaaaatcgggggagcctagtgacagcccatagggcgcggcccgtggggcccagatgcagtcgccgtcgagggaaatttcggttttttggcagggcccggttgttccagatgagatcctccccgtagtaattaattggttattactgctccagaaagggagaagtgtgcggtgtcatctctctttcccctctgaaaatgctgtttaatttgaaaacgatgcgtttaaagtttgtgtatcaagatgtgagattgagagtgagagttcggtccactacgtgtcgtgatcttgcacacttgtttcaatcgagcaatgtagtagagagggatacttcttctgcaaagcgaaggaatctcatttaatttccagccacgggtaagaaccaagataatcgcggtacacacgctgagataaggaagagcgtgtccacatgtagctgtcgatgagcttaccagcaggtttatgagctgtctggtgtcagtagggtgagtaattgcttgattttctttttgctgaacacttcaattaccatcaatcagctcattaattgtaccgacacgaaatggcactggtaattactgcggttcattttgacactttttgttgcttcaaaggaagaatctcgaattgctttcgcaatgtggtgttttaaattaattggcttgttccagcttcgatctttttttacaagatgccgaatcttcaaactttctaaaattctcgcgccgttatttcgccgcgacgtacgtatacacgacgacgacccctgcaaccccaaatgaagagtcgtcgtcgtcggcgtgctccgatctccgcgcggggcattcgtccgccgtcgtctcgctctccggtgagggcggccaaaatatatggtgctcgatcgagatgtgatcgagcccggccggcctgccgcttcaccgggagagcgaacacgacgccggcgacttcgcgccgccgcccgtgctgtgctcgtagcccgcccgtttcccttctcgcgcgactcagctcgctttgattttggttgggtttacagcgcagactgcagcttgttggtggcgtgccgggagacgagccgctcgagcgcctcacgcatccaaccgtgctggcatccatccatcgcctgctgcaccgtggcctgcacaaaatcgaatcggcatttagacgcccgtgttcgttctttggtcgatcgaattcgatcgttctcgccgtagaatggcgaatttccgtgtatcaaagtgcgatgggggggtcatgtactactactactcacccaggtgcgcttgcgggaggacatctcgggccactggaggagctcgtcggtgacgcggagagggaacatgaagccctcgtaggtggtgtcgtagcggcggctcttgtagtaccagcagccgagggacgtctcggtgtcgccgcggacgccggcctcctcgagcgcctcgcggcgggcggcctcgtccatggactcgtcgagctcccacccgcccttggggaacatcatgccgtgccccttctgcgacgtgatcaccagcacctccatctcgccgccgctgcgcacccggtacgggatgcaacccaccacgatgcggcccccggcgctcgtgtaccgctgcagctcccgcccctgcctcgccaccagcacggccatcgaatctttgattgttggagagagagagtagggttgtcgttagggttagaattggtgatgcgagaggatggtgctttgcggccatggaggtggagctcgcgggtattagtagcgggaagcgcgtcaggtcaatggaacgctgtcgctgtcgcggccgaatgagcgatggggtaacatggggtatggagcatggacgagcccaactggtgcaaggttggtggacgcagcgtactgatcttctgtggctcagcttaagttcgaggagccagattccgcttggcctcatcatggcctggtcctagagtacctgtttctctttttccttataaaaaaccgggataacatctactctaagaagaccctgtttagttcccacacataaactttttatcatatcacatcgaatgtttggatacatatatagagtattaaatatagacaaaaaaagttaattacacatattgcgtgtaaattgctagacgaatcttttaagcctcatttcttcatgatttgacaatgtgttgctacattaaacatttgataatgatggattaattaggcttaataaatttgtctcgcagtttatacgcggaatatgtaatttgttttattattagtctacgttttatacttcaaatgtgtgtccatatatccgatatgacacgctaaaacttttcacccctgcaactaaaaagagcctaacatagagataacctggtctttcttgtgcgtcttgtgcagataagtaaagaaggaagaatgtgtaaaattcttctgggactgattggtttcctactatttttcttgaccactttagtgtatgtctttattaaagctaaaaaaagatgatgatttctttgcaactctaggtatttgatgttataggtcttgtggttaaccatagatgtaatttattagcatgaatgcaaattaagtggtgtatttcaccttatgtccgttgtccaagagaatattcagaattaagtggtccttctcatgaaacatgtcatgaggagactccctatcctaaaacagatcaaatcctgcgtataaatttaggccgagtttagttctaaagattttttttttaaacttccaacttttctatcacatcaaaacttttctacacacacaaacttccaacttttccatcacatcattttaattaaccaaacttttaattttagcgtgaactaaatacaccctaatacatatggttcttcatattcgtagtcagaatttatttttttatggaaagtaggaagtacctacacgtacatttcagacatcattgctatgtacttctcctgtgcatatctagaatcgattatatttgtggatagatgtaatactatatacacgtgtgaatgggtttagtgataaagcgtgtagcctgatcagcgggtatgcatgtgtccaaataaaagaatattcagatttgttttcaagctaatatatctctaagacattggtcatttgtaatccctttcattttgggtacaccaaatgaaggagtactccttttctttcttttatttttttattatagcacatttaacttagctattgtaatcactaaatcaaatgtcatcaacttttgttagatgattgattaagaccctcctcttatccttttccttttaataaaagggagtaccgttcattagaaacttccacaagaaatttgcaccccggttgcatcagctgtactgaaaagagtatatgtacaaagagtaaagtactatcagtaacttgcaagtaatgaatttttaccatagttttcaactttggaggctaaagttttaaagtaagcactagatgaatccttgcttccacatgtactggaccacaatgtgaaggataagaccacccagagaacaataaataggttctttggattaaattcgtcagatttagctatcaagatagactgttccatggaaaacaatttcatatccagaagatatcaacgtggcaacaatgttctttattctacgtttctactccctacatcccataatataagagataatggatggatgtaacatattctagtacaataaatctagacagacggtttgttcagactcattgtactagaatgtgttacatacacccattatcccttgtataataggacggagggagtatgttattgagaatccgtttgttgatcgtgtatatgtctatgttatttcatattgtagaaaggaaaatatatttgaacttgaaacaatagaaatataacgttgaagtgacaacgaatttttttaggagaaatatttctttttgaaaaaaaaacagaagtatatttaactctgtatgttaaaaaagaataaattaaatgaccacttatgacaaaacaagatatatgcaacgaggtgtctattattctaacgctacgtttcacagtattttttactgcatgctcaacacatcagattagcagatccacccatagtaaatgtaaggatatgagactgcatatatacttagtcacatcaagaaaatcgtagtgctctctgttaagcatggtcgacaacaaataaacatactacaactatctctctcctcaatctctcatttttcatgtaagtgaaaattcaacttggataaaattttactacttacatacggctgatacaccaattgtacatacccttaattaatactctcccgttcctaaccgcttttataaaatggccagcaaacttacttcaaagaatagtcaataaccatacccggttgtgaattggctgctaataaagtaaccttttcttaaactaaagaaaccctactggaacatgcacccttcctactactacttcctactccttccattttatattccattttatattacaagtcatttgatttttttccttaactaaatttttttaaatttaatcaaattgatagaataatatgctagtattttcaatacaaaataaacatattatcaaaatatattaatgttaaatttagtgaaactaatttgatgttgtagatgttgctatttttttctataaacttgatcaaatagcacggtacaaacgtatatgtccacgtgtaccctcacctactgtgaacacatatgtacactatgtgtatatctgtatgataatttccaaaaggctaggccgaaataaaggaagtacttcctactcaagtagaaagtggagtgccctgtccatggactgcgtccacgcaagtaggccggggaaacggcgtccgtgttgccgatcgagagcccgagaggtggagatgaagcggacaaagcgcgtacctacgggctacggctgagtggccgcgcccgctcccgcgcttcgcagtcgcttctctcgttttcatctgaacccatggatggattggcctatctcctcctccctctccggccagtcacctgcgcgtccctagtgtacacatccatcgctataagttttagccgaaaatcccgtcgatggccaagtccatcttcttctccatcaatttaattcccgcgcttaattaattaccccagcttgctctagctagcaccttgttttatcgtatccgactatccgtcggtgtcgccactgacgtcgctacgttgtctccctcctcccgttgagttaaattaattgcttctttttgttttgtgcctcgatcgacgaagtaaaccaatctgagctattgtgatcgtagtacaagttgcgtgacagggctgttttgcggcgacgttcacacacgcacactgcgtcgtcgtgcccgtctctgcctctcctcctcgtccttttcttgttttttttttcccttttttgaatcagtggccatctttgatctcttccattatggaaggcgacgacgacgtggtttaaatacggttcgttctcttgttaacaatctggacaaacgtacatacatacgagtaaagtacgtagcaatggcgcaagaaatacatggcgaccgatcgtatcacgctaatttggccacatgagaaacgccgtacatatatactgtaaatcgccacgtttccaggagaatgtgaaaattacgtgcgtacccgtgtgttttcacacggatataccggtgcgacggtctaattctgctgctttggatattttgttattagtgattattacaccatcgtcatccacgatcccgtcggtcctgccattgtcgccgacgcgaaattaagaagcagcaacgacgacgacagaaggggccgggccggggttaagctttccggctatgttgcaaccaggttttgttaaaggcgaataaaaggtagtattatttctagctctggttggcggacagtgtgagtcgccaggactaccaaccaacctacggttagttgtagttggttcttccaaccgatatcgtcaccatcccgcggcgtggtgattcgcacggaagtttcacccaatcatgctgcccatactgcgcaagatggacgtacggatacttgtcccgccgaaaagtcgaaaaatgcaactatagtttgatgcatcgaatcaggaaaacaacttggtttctgtaccgatcaattcaggtttctttttacgaaatcggatctgactctatgtcagcacgtactactattcctacgtgcaatgaacccacttacttttcgtcgaacaggccagttttattttttttttcctgtagtgacaggtagcacgtttgctcgctgttcgggaccaatccggtcacaccgccacggccgtgtccagccgctgtaacccaacgccgcgaccgagcttgacgcccccgcggcccgcgcgcgcgctcaccaaccgatacaaatcgctcgccaccgcgccgccgaggggagcgtggtggtgaccaccgcgccgaaccgccgagctcgacaggccatggccccgcgcgccgtcccgccgcgcgcgcgcgtcagtccagcgatgcgtgcggtgcgcatctgccgtgccgcgcacttgcctcgtgcactgtctccaccaacatgggcacacgcattgatggctcgcgcgtggccgtgccgccttgcctgtttgcgcggtggctgccatatctccgttttgtttttttcttggccccgcgctcgctcgctgcgctgcgctgctccggcctgtttggtcgaataacgcctcgagaacgtcctcatcgtcgggcgatcgatcggtttgatgatcaggtttcgtcggtttgcgactcgcgagcggtcgatcgaccgaatgcgatttcgtgatggcgacagaggtgggtcgtcgtgtcgctactaatcgggtggttggggcgtcgatgccggccgtgtgtatgcagttgcggcgagcatgcctgcatgtgtgtacgtttatgtctatcttgctggggataatgttattatgggttcagatcgaccatactggttgttagctagtatgggtgcaagcttaatttgcagctgatgcaactgcattttgatatggcacaaactgtgttcatttcgtgggcagcgttcagacttcagacgtgcatggaggcatggagagccaatcgatcgatcaagtgcatgcatgcagcatgcctcaaagtcttccatggagcaattcatgtgcagccttaagcccttaagtcgttcactggtccatcacctgcatgctgacgtgaaacgcattgctccaaaataattttgttgccatgcgcatttttatcgccctcttttcgtttctctctgttttccggaagtttcatcgtcaagaacattctccggacggtttggtgaagtttggtctcagttccatgctgaatcttctttactgatcggtcctacttagtactgaaattgtactgctccatcagtgtagttggtcaggatgcttaaagtgctcaactttcctgcgtttgaatctatgttacgactacgaaatgactacatagcgaatcagaatttcgcaaatttgatgcgtgtttgtcagttaaaatcaatggcgtcttctacgtgaaactgaaagctttagtttcacgcgtctctgtccagttagaatctcagccaacccgtcgttcagttagatgccaccaaaaatgcctttctttcaaactagtttatgcagataatcgtccattatttgtacgaatttatgatcctcaataatgcatcaaccgtcagcccgtattagtgagattcggtcagaccatcgactaaagaaattttctaatcgatgatagatgccctcgaatatttctgctgcaatgcatgttccatgcatattatgaacaactaagtgcttaattaatctctacatcaaattccccctgtatgattaaattgaacagtgacaccatgcttactaatatcttaatcagcaggtcgatttaaagtgcacgtgagctacgaaattatcatgtaatttggcataaaaccacttgaactgcagcagagaagctctgtaagtctgcatatggtcaatagtttcttgcctgcttctgatcagaaacctgctacctctagctcgtgattttctaagaaactgcagcatatattagcctaacaaacactaattaatggagaatcaaggagtatagtgtacactaattaatcaaagtcgatggagttgtttggcgacgaaacagaatcaatagataaataatcgacgacaggacgtgatttactattcggtcgatcaaccgatggagcaatatatatttttgacaaatttggttgattgcatccgcggtcgacgtggacatgtgcaattaatattgtaagatccggggagtaacatgcactgccgatcgtcgactgaccgattggccggtttgtcaaatgatttgcttgggggtctcaagatagtcagacaccgatctgatatcttaactgagcatgtgtattacttggaaggtgaggcttgattattcttctctgacgacttcagagtccggtagaatgtgtatcatatagttaagaggagtaccctgcagaaaaaagtatagttaaggggagtaagtacgcaatgcatgtgatggatcatgcttgatgatatatatataaacactaatcaaatcatatatcgttttgactagcctcacctgacgtttagctcttcgaatatttcagcattgctgattatttcaacattgctaaatctaaaccactgattcgagttaaagtactatctcaatctcaaaatatattaatatattaacttgtactctattatatttaaaatataatcatttttagagttagacagatgtactacgaaaatagctataattaaatagaagattgttgtgaatgagaaaagagaatagacggaggattaaacatgggagatattgtgattagtttagataagaaggtatatggagaaataactatagttcaagacataattgggacactatcgataactatattttagaatgtagggagtagcattcgaaattatcctataatatagtactccacctactctatcatctcttttcttaagaccctactctattatctcaatca

SEQ ID NO: 24365 - DNA, 702 bp, Oryza sativa
tcctgcggccctgaccagcttgaccttgcttataggtcgttgctgagacaaaaatcgatcaaaatgctgcggcaacactgaactatggctgctaccctaatgattggtttcttctcattatggatttgtaataacatcatatttgtatgatcaattggaactgacctatgatggaactctcctaaatgctcctatcatggcagcaagagttacttaccctaactatccagctctagcctagtggcaacatgatattttgacacagataaatctgtatagagagggtgctattctaaaggttatgcacacattcttactgatcctatttattctttgcaatctattgctgaattcatatcttccactattcatgcagaagtctgaaccttcttggtttgttgtgggtatcactagtaattactttacaagtcagaatatgaggtccagatataatatatggtcgcttatagactactataagggttattattgcagatgatctagacgctgagagtggccatgacctcaagactttgatgtctcttaacgataaagctccattaagcccacctgtggaagcttcatcactacgaactgtccttgcactatacacctatgctctaaaacactttcacacgatgataatggaagacgaggccatactaaaatgagaaccccctcttactactgaactaaccttgc

SEQ ID NO: 24366 - DNA, 733 bp, Oryza sativa
ggtgtttccgcctgcacggctggcctttatgccgccgttgttgggcgtctaggtcttcaccgaccggtttgccttcgccgccgcagactggtgtttccgcctgcacggctggcctttatgccaccgttgttgggcgtctacgtcttcaccaaccggccgcctcgtccgccgccgactggtgtttccgcctgcacggctggcctttatgccgccgttgttgggcgtctacgtcttcaccgaccggcttgccttcgccgccgccgactggtgtttccgcctgcacggctggcctttatgccgccgttgttgggcgtctacgtcttcaccgaccggcttgccttcgccgccgccgactggtgtcctcgcctgcacggctggcctattatgaccgccgttgttgggcctctacgtcttcaccgaccggcttgccttcgccgccgccgactggtgtttccgcctgcacggctggcctattatgccgccgttgttgggcgtctacgtcttcaccgaccggcttgccttcgccgccgccgactggtgtttccgcctgcacggctggcctttatgccgccgttgttgggcatctacgtcttcaccgaccggcttgccttcgccgccgccgactggtgttttcacctgcacagctggcctattatgaccgccgttgttgggcctttacgtcttcaccgaccggattgccttcgccggcggcaaactggtgtttccgcctgca

SEQ ID NO: 24367 - DNA, 503 bp, Oryza sativa
atgccgtccgtacacattgcgaaacgcatgtttcttgggtcatttgagaattcctggtaaatcctatcgattgtcctccactgtactgaatctgctgggtgcctcagcatactattgactttccgttcttcggcatgccagtgcacaagcttagcttgttccttattcgcaaacattctcttcatgcgctccgcaattgggagatactacaccacctttgctgggcctcccctctttgacttacttccttcaccttcactctttgctcgtttgtatcttgatgccccacagatagggtagacattcaagtcagcgtattccttgtaatacaaaatgcagtcgttcggacatgaatgaattcttctgacctccaggcccaacggacataatacttgctttgcttcatatgtcgtctgcggtaaattgttcccctctggcaacagatcctttaacagctcaacaagttctgtaaaactcttgtccgaccaaccattactagcctt

SEQ ID NO: 24368 - DNA, 3783 bp, Oryza sativa
tgacatgatgttgaggttgtgtcttgtgggtacagtggtacacctctgatcagagtaaaactattcgaatagccgagcccgcggttatgggcgggtctaacaatgtctttcgtgattagtttcacacttctcaccataataaaagatgctataactggcaataatttgtttagctcctggtttggaatggtgtattcctggtttggagatagaactgtgcagccgggatggttgttcagaacgattgggcctatgcaacagggtatgttgtatagcgttggattaatattgtttaattactacttaactattttattaaattctgaaatgtttgtaaatgccatttatgcaaatgaaaccatactatgccatcctttgttatcctgtgcacttgcatatttgctgcgtggcttgctgagtatgtcatatactcaccttgcaatcattcatcagaggaggagttctacagtgatgctgagggtgtggaggattaggtgtagccctggtcaagctgcctgtggagtggagtcgtttgcgccgtttattttaattttccgctgcttagatttttattgattgagaggaactatctacctctgtaatgacattttattcgcttattaattagagtaataattgtactctattatcaatttgttattgtgtgcctcggctgattcctggacgagggttcacacacatgtaagcgtttggaattttggatagaaattccgggcgtgacaagttggtatcagagcccccttgaccctaggttatgccaaatggttacctatagaagccctctaaaaatattggaaaagtagaacttatctcctctctttctcttttaattaaaccaaactaatggcacatgcagtttatatttgtttttattgttctcacttaaaatttatttactattcctgtgctgttagtactgtacatctattaccgtgctaatggcccatttaccatcaagagttttataacaatgcttgatttaattttgctgcaatgagctaagcttagtataatgattttataacctgttattcaaaagtgcaaagtttgtgaacatgtttctgactgcttcatcttatcatgcaagcttggtttatttaccttttactttgattttctaactctattcaaattaatccaaaaacttgtgctattaattggataattgacttaactccctcctgtcacttgtctttagatgccgcgctacaagcctgagtacttgttcggtactgaaggatttgtccaggagttgcgtacgatgtccttcctcatagggtttggaattgcccctttgtatgcccagatcccgcatgatcgtgatgaagaaaaatgcggagtcaaagtcaccttgaatagcaaccgtgaagatattccatcagtgatgttcgaggctggaggaggaagctacattcatgcttgtcaggaggtggcaaggatcgccataggagaactccgggaaagctataatgatcggttggccgacaccgagtaccgctaccatcctcgtcaaccccagggaagtgattgtggcagctactttgaaccggctgggatcgagaacgacgctaccacaaggcatttggttgagatgctatgggctatggatgaaacccgcgctgagattgtaatagccgctcaagatcgtgaagaccggaatagggggaagatctgcaagctagaagacaaggtggatcatttggagaaggagctagccgcgttgaagggagaagcaccaccgcagaaggccagagtccgtctaccgcaaggaagagagctctattcgtccctcgctatcagttggcaccaaaggttcgtctggtggaaaaagaagctaccccagcggatcctccggttgtcaatgtaagtgatgatgaaaaggaatccaaacgtacccattccaagatcggtgggggccaactcaagatgatggggacgtgccgaacgagccttcaatcaactccgatgcccagaagacctagaccgttttgctagtcgttgccttagaacgttgtgttagtttgcttgtttaagtttggttgtgtgtgtgggttctgcgtgcgtttacatcattggtgggatgtaaatgcatgtctttatttgcttttgagtgttaggaagttggtgagttagatggtgagagagtcttcagctttgtaataatgaaactcagttaagatcaataaaagttaagttaattaatttaattatctgtcctaagtagttctcccctgtttctcttcttgtgctcctgtctatgtcagatggtgctcactcgcagcaacgggaacggccccaacagcaacaataacaacaataacaacagcgccgagaatcccacactcgctcaagtcttggcccaacaggcacagttgatgaacatgatgatgcagcaactccagaaccagcagaaccagggaaataaccaccatgcacctccctagaacaagctggcagagtttcttcgcgtgaggccacctgttttctctagcactactaatcccgtcgaagctggtgattggttgcacgccatagagaagaagttggatctgctccagtgcacagaccaggagaaggtctccttcgcatcacaccagctgcatggccctgcttcggaatggtgggatcacttccgcctcaacaggactacccctgaacctatctcttggcttgaattcaacgctgctttccggaagacgcatataccctcgggagtggtgtctctcaagaagaaggaattcaggtcactcacacaaggttcccgcactgtcaccgagtatctgcacgagttcaatcgtctggctcgttatgctccggaagaggtgcgcactgatgaagagcgtcaggagaggttcttaaaaggacttaatgatgaactttcctacccacttatgactggagattatcatgatttccagaagttagtggataaagctattcgccaggaggacaaatacaaccgcatggagcagaagaaacgccggattgctcatttcaaggcacagcaggggaatagtcaaaggccacgccttactttgggaccccagtccatgccacagggaggttcttcgtctgttgttcgtccgcagcgatagttcttcaacaacaatgctggcaacaacatccgcaatcaagctccacgccctgttgcatctccaacacagcaacagcctgccaagagggagcaaggcagtaagcccggggtgtgcttcaactgtggagacccaggacattacgctgacaagtgtccgaagccccgccgcgtgaaggtcgtccctgcccagaacaacccctccgcacccgcagccaaggctcgtgtcaaccatgttgctgctgcagaagctcaaggtgctccagatgtgattttgggtacattccctgttaactcagttcctgcaaccgtgctttttgattctggtgctatgcattcatttttatccatgagttttgcgggaaatcaagggatggaggtaaaggaacttagacgtcctttgatggttagtactccgagtaaccaagcactctcctcacaacgtagcccctctgtcagaatagagatccaaggtgtacctttcctggccaaccttattctgttagaatccaaagaccttgatgtcatcctagggatggactggttagccagatataaaggtgtgatagattgtgctaatagaaaagtaactctcaccagtaatgatggtcgagttgtaactgttcatgcattatcttctgagtctataaggtcacgtctgaaccaattga

SEQ ID NO: 24369 - DNA, 1045 bp, Oryza sativa
actcggtccatccaacgagcccccgggtgctaggaatcggcccaaaggcaaccatccattggcaaaccaaacggaaagcataggaagatagaactccataactcgataggtacttttgtactcagattatgtcgcaaggaatcaagataaatattatgaaaattgtttaaaaaatacgatataacatctatagcccccgactcactagtcaacggcgaaccagttgatgtagtgaggcaaaggaaaagacaaaatatcatataaagaataaaataaatgatgacttagctttgtaatattccccttggtgatggcatggacgcccatgaacggtggtgtgaccgaccaaccgtataggcgatgacaccagtcggcggcgacgaaggcaggccggcggtgaagtcgtagacgcccaacagcggcggcataataggccagccgtgtaggcggaggcaccactcggcggcgacggaggtaggccggcggtgaagtcgtagacgcccaacagcggcggcataataggccagccgtgtaggcggaggcaccactcggcggcgacggaggcaggccggcggtgaagtcgtagacgcccaacagcggcggcataataggccagccgtgtaggcggaggcaccactcggcggcgacggaggcaggccggcggtgaagtcgtagacgcccaacagcggcggcataataggccagccgtgtaggcggaggcaccactcggcggcgacggaggcaggccggcggtgaagtcgtagacgcccaacagcggcggcataataggccagccgtgtaggcggaggcaccactcggcggcgacggaggcatgccggcggtgaagtcgtagacgcccaacagcggcggcataataggccagccgtgtaggcggaggcaccactcggcggcgacggaggcaggccggcggtgaagtcgtagacgcccaacagcggcggcataataggccagccgtgtaggcggaggcaccactcggcggcgacggaggcaggccggcggtgaagtcgtaaacgcccaacagcgg

SEQ ID NO: 24370 - DNA, 4583 bp, Oryza sativa
tcggcggcgtggaaggcaaggcggtcggtgaagaggtagacgcccaacacgggggcataaagcccagccgtgcaggcggatacaccagtcggcggcgcagaaggcaagccggtcggtgaagacgtagacgcccaacaacggcggcataaaggccagccgtgcaggcggaaacaccagtcggcggcggacgaggcggccggttggtgaagacgtagacgcccaacaacggtggcataaaggccagccgtgcaggcggaaacaccagtcggcggcggggaaggcaaacgggtcggtgaagacgtagacgcccaacagcggcggcataaaggccagccgtgcaggcggaaacaccagtcggcggcggcgaaggcaagccggtcggtgaagacgtagacgcccaacaacggcggcataaaggccagccgtgcaggcggaaacaccagtcggcggcggtcgaggcgagccggtggtgatgttctgactgatccattcctggagcgtaagagataagcttaaagccatgaatcccttttatgcatatctggatctggatcctgcagaacaaacatataggatgagtagtatctgatataaatataatactcgagaaaaaaatcaagtattttaaaatatttataaatatgtatttctcctcttgtcaattttgatttccccgagcagatgattcattacgtttaaacgctctgtccgactagtcatagcccccaagcaccgggagtcggcctaggcacttcccagacatgcatatgagtgacatgagttcgccattaatggaacaaagtttcacggattagaatttactactcaggtacttttgcaattattaagagcaaaaaataaatttatctcatctctatgcttttgatttattccgaataatacttagcaccttgcgttactcggtccatccaacgagcccccgggtgctaggaatcggcccaaaggcaaccatccattggcaaaccaaacggaaagcataggaagatagaactccataactcgataggtacttttgtactcagattatgtcgcaaggaatcaagataaatattatgaaaattgtttaaaaaatacgatataacatctatagcccccgactcactagtcaacggcgaaccagttgatgtagtgaggcaaaggaaaagacaaaatatcatataaagaataaaataaatgatgacttagctttgtaatattccccttggtgatggcatggacgcccatgaacggtggtgtgaccgaccaaccgtataggcgatgacaccagtcggcggcgacgaaggcaggccggcggtgaagtcgtagacgcccaacagcggcggcataataggccagccgtgtaggcggaggcaccactcggcggcgacggaggtaggccggcggtgaagacgtagacgcccatgaacggtggtgtgatagaccagccgtataggcgatgacaccagtcggcggcgacggaggcaggccggcgatgaagtcgttgttgctatcagcaatggcggtggcgaggacaagccggcggagtggactcgcggccgatcgaccggaaagctgagacgcctcgagtccatgaccagcatcaatcgcctcaatagtgccgcgtagttatatgcgaacaacaacaaaaaatagcaagaaattaatctgagattaaaaatcaatatgataaataatgataaaaatcagattgagtttccccctgactgatttggatcaagtcagagaagaggagcttgaagaagtggtcgacggaaaggaagtgaaaactcccaaagcgaaagcgaagtcggcgactcatgaaattgattccatcgcgctcgttgataggaaactcgacgcaacccctacctggcgcgccaactgtcgaaacatgatttcggcaataataaaagggggtagcatacgagacctaaaagtggatggatgcagagacaaaggatttagacaggttcaggccctctcaatgagaggtaataccctactcctgtttggggatttgaatccgccgggtgtgtattgatctgacgatcaggttgtctctcatgccccctagagggcctcctgcccaccttatatagggtggggggcaggattacaagatagaaaccttaaccaatacggtatcggtttcctaaatctactttacaatattatcaaaccaggactttaggctgttccgtaatatataaggaaacgtaatacccaagtcatgatctgttacatattccatacatataagttatcccctataactagtcggataaccatgccgtgtgggtatggggtacccataatctccacaaaatgtatgctaccctagcttgcaagcctgtgaggcaaattgcaagccaattgtttgatcagcttatcaagcctgtaattgtaaagaaatgataataatattgtctgttgttcaccaatcaagagaatgatcaatctcctcatagatgaacgtggtttgtccttttgtttaggggaaaagtataactgtcttattgatacataactggagatggccacaggagaatcacgagaataagcgcaagaaatagtatcgtatagtccatatggcatgtatgcaggtttgatcatagtactcgtttacagaataatgtaggcactgtttttgcaagtgcggttcactagattaaatttagttttgaggataaatcgaaaataccttttcatggcacccaaacgaagccttgaatcaatgggcaaccttttcaacttgggtctgcgtggcaggccaaattggaaccttctgtattgtaccatcattttttacagtgtgcatctccttcgtttttttttaccatagtgtccatctccttcgttcttaagcacaataatattatcacaagcaatctttcccccgtgaattatcgcaagagtttatttatagttgtacccctttaaagaaatcatgatattgtaaccttaagaacgaaacttcctgataatgaggtgaataggcacgagctcgtgtgattgttccttgtatcaccagtttagtatccactatggagacaccattgtcacccttttttaccccatttcaactacaaacctattcgaataaaatgggtaatatagagatttgatgcatcaatttcattggactaacctgtttccacaaattttgtaaacgcggtaatcacaaggatatgtttggttttcaatacaatttcactctgcgtgatagattgtaaaaaatgggcgtcctggttaggtatttgtcgcgcccggaaaaagtgtctttttctgaacgctagtgtattaatccccgtcccagaaaaagccgggtacaccacacaaacatgatacaaaagacacatctttattatatcgttaatatttacattatttcaaaggcacttcaggcctgacaataaaaaataaacaacagcggactagcgggcctacggctccatcttcacaggcgctcaaatggggtataagccaggactccccacctaggacttcttctccaaagtttttcttagtgaaggggggaaagatagagcaagaatgagtacaaccacagtactcagcaagtcacaccggtagatgtattattaatgcaagggggtacaaggggtaataatatagggtttaagttttgcagtaaacaacatttaaaagtcacttagttgctcaaagctattttgtaaagacgatcctagagctacacagtattattaatcaaggacgtgaacccacacgaacttgccttaactcaaggcctacgatgattcagactgaactggcaacccgacctgggtcccagctcgtcccaagccaacccaggacaaccattccacattttagttgttaagcaaattttaagaattaaaccactaacttgggtacattgctaggcttgcctataaccgagggcgcagctattcgaatagattattgtcgcgtcccaaatcgactctaaaattcatcctcgaaattgtgcaaagaataattaaaattcatgtgaaagcctccaacaattaaaatgtgcaaagataaaagtcaaatgaggcttggaggatttttgtatatttcctaaaagcctaaaatgtgtaaataaattttagtggaattttcagagcacaaataataattgaaaagaaataaacaaagttaaaagggttttataaaaagaaaaatcctaaaaagtcttctttcccccccttctttcttgggccggctcggcctagtccctccctctctctctctcttcccccgcggcccatcggcctcccccgcgcgcgcgccgctgacaggcgggcccgcccgccactctcgctgacgggtggggcccacctgtcatcgccttcctcccgccgcgcccgccgccgcgcccgtgccctagcgccgccgccgccgcggattccgccgcatcccgccgtccccgcacgcattaaagagggggaaatcactccccgtgattccctctcccgtttccccctcttttccctctctctctccctcggattcgtccgatttgaatcccgcgagtttcgcaggcttcttcaatggagccgagatctccgcggccgattcct

SEQ ID NO: 24371 - DNA, 2795 bp, Oryza sativa
ccttgattaataatattgtttagttctaggatcgcgtttacaaaatagccctgagcaactaaatgtctttaaatgctgtttactgcaaccctaaccctttatattataattcccttgtactcccttgcatttattctgcatttgtgggtgtgtcttgttgagtacggtggttgtactcagtcttgctcaatttttcccaagtccagaagaggagctccttgaagatgaaggttttggtgtctagctcgtgcctgccgtcaagcgcctgtggtcgtcgccctagtcttccgctgcttcttcgtttgtctttgtgtgttgggccttcgctgcccatgtaataattctatttacgcttccgcttgttaaactctgaattgtatcaacttttggtgtaccttgcctcctgggacaaggattaatgcacgcacgtcaggaacgcccgttgggttatttccggtcgtgacaagttggtatcagagccacccttgaccctaggacgagccgtagatcccaagccttagcgatattttcaaaataaaaatctttggttatttgtgaaaattgtctagtctctctctgtcttgctgcttcatttatcgccaaaatctgatcttttaaatgttgtttctctttttgtttttgtttgtagatggccggcacagtcacccgtcgtggtttggatatgactggcttcgttttggagctgcgaggcatgtgcgtggtcttggggtatccacatggagtggactaccaggccaggccacttccggatcaggagggtgaggatgcagagcctcacgctggttgggaggtcactgcagtgatcctctctggctctcctgagcggacttcgctggcagtcaccgcgggtggagactccttccccgccgcttgccagaacgccgctctcctcgccatcggcacccttcaccagcgctacccggacgagttgcagcactcgccctaccgctactaccctcgtcgcggaggagcccgcgactacgccaccttccgagatgctagctcggaggatgacgctaccgttgtgcacctggcacgcatggtggaggcgtacgacgcggctcgtatcgacttccatcagatggtgcgccgcgggatggttgagaacaacatgaagatcctggggctgcggcaggagaacctgcagctcaagaaggacctcgacgcgttggaggcgcagctgcatcagctcaaggtcgcccagggtgaggatagccgccccaagcgtcgccgcgtctgccgcagccagaagatcaccgcccgcaagagcacctccaggcctgagcttgttcgtcagtccctggcgtggacttgcttcgtcgagacccctcgtgccgagcctgcgcccgtggttcctcagtgtcgcgaccgggaaaatttccttttcccgaacgctagtgtattaatccccgtcccaggaaaagccggggtacaccacacaaacatgataaaaaaggcacatctttattatatcgataatatttacattattacaaaggcgcttaaggcctgacaaacaaaaaataaacagcagcggactagcgggcctacggctccatcttcacaggcgctcaactggggtataagccaggactccacctaagacttcttctccaaagcttctcttactgaagaggggaaagattgagcaagaatgagtacaaccacagtactcagcaagccacaccggagatgcacaattaatgcaaagggggtacaaggagtaataatataggggttaagttttgcagaaaacagcatttaaaagtcacttagttgcccaaagccattttaaaaagacgatcctaaagctacacagtattattaatcaaggccgtgaacccacacgaacctgccttaacccaaggcctacgatgattcagaccgaactggcaacccgaccctgggtcccagctcgtcccaagccaacccatgccaaccattccacattttagttgttgagcaaattttaagaattaaaacacctgacttgggtacattgctcggcttgcccataaccgagggcgcggctattcgaatagattatactctgatcagaggtgtacatctttacccacaagacacatcttcctcacgtgtaaccacgtgccacataccaccacggtatacggacggaagacgtgacatagtttccaacccatcctagccatagacaagagtaccgacccaatcccacctacggccggaacctccgggacaggcaggcaggactgagcccctagcagcagggcaccaaccctgtgccatgacatctcgactaccgggccgcagctcgtgtagccttcatttgccctggagaatgtccatcgacccccgacttcatccacctccatccgtgtacttttgtttataaccagactgagccacaaactaagccttacccactagacatgtggaagtacggtagtgctttgcaacagaggcccgagcttaatccttagagtggccggggtgctacttcccacaactggcatgcacccaacaaacatgttttaggggttttgaaagaggaagagaggtgtatgtccaattccaccataaaccaacaattccatagtgtccaaatgatatgagaattcccaaagtctaaaattataaaaccacctaatgttgcctaattaatcagcgaagcatctacctaaattcatactagtggaaccatgaatagagtacccactagttgggggggttttgtttatcctagggtgaacaaggtaataataacaatagcaacaattataagggccttaaca

SEQ ID NO: 24372 - DNA, 3725 bp, Oryza sativa
gaaagggggggaaagaagacttcttttagggtttttctttttataaatcctttttaactttgtttatttcttaacaattattatttgtgctctgaaatttccactaaaatttgagggctccttttagaccaaggagaatttgacaaaaattctccgggccacttttgaatttttcttgtacgtattttagtgtttgccaatttcttttcgaattttaattaattctattattccttttagagaatgaattttaattttgggatgaatttatcaggacgtgacaaatccaccccccttacaagaatctcgtccccgagattcgaggaggctagcaagaagataggttgggcggtctcctcttcttgtctgacttcttccgctctggactgcttggctcgatctcctgttgcagatgaaatcttctcttcacccgacttgtcccgggttgcacctttaactgactcagactaggctgcggtggttgaggatggggcttcagttctagaacttcttatcattcatatctttggcgtcaacctcataccagttaccaccttcgtgacatgcgtcgacatcagctttgtcattactaagataccatgcttgtcatttgcttctaactcgccaccaactgcctcatattagctttcctggtctccgggtgatagctacttctgctattcgattcgagggtcgataactttgcctttgaattatgtttctcaacagagccaacttatcccacttgacatgctttgacgcctttccagatgactttactgctggacttgttattgtttgatcgttaccctgccaaatctgaagcttcgctgttacatgtgattttactctgacctctgtagactatcttcgaacatatcacttggttcataactgggaatagctcccacgaacaagcaactcggattcactttctttacatttggttcgcttcccactattctcttcatgttgtcatcatttagcattcaacctattcctttgcaccttccgcatggatgggttctttctcgatggatcgattgctagggaagtgcgttgagcgatactagtgcaagtgcttttattctagtagcatctgatacaaagcccaaggttgaaccgagctttagattccactgttcaggttttacttcttgacttcttggtcatgtcacaaaagtttccatccttgtcccccatagaagtacttctacctgtggtcatctctcttactcgtgaattcacctgctttaatgacagggcaactattgtagggttgtttgctatcgggagtcttcctcgagtgacacaaatcatggttctcgttatcttttatcaatcacctttcgacctttctcaaccaggtactcttcgctccgggtgttgaggatgtttctggggcaatgaggtgcttgggcgtgctgcctttccgtgaaaccttgatgtggttcgtcaaaaactgtactgactaccttcagggaaatacattgcttgctatctgtatccatgccactagggtttaattgccgatgatcacctttagtgcttcttcgagatgggaagcatccaaattgttcttctaccataccacctttgccccttttctgatacctgatagactaattaccaaccatcgactactatgtcctcaaatgtggatgtctcctggatcttcttaactgtttgtaggtatatccgaacttatcaatgtagaggcatggcgggtacccttatgggtttcatccaacaatccttatcttgatctgtaaaaggcgtatccaaactcctatccccaactactgtctcattggccttttaacccaactcagtttaattggttttcttttccatcaacaggttggttattaactcaaggttagaacatagttcctctgaaatgagaccctaggtctcctttatcagtaagcaattatacacataatcacatacccgcatcttccaaaagaatcctcatggaacttgtctgtattacacatttctccctcattacatgaatacgaggcactgccttaaacaaaaaaaggacggtgcttaacatcggtacattgtatcctcaacatgaatcatccataagcatagcaaacccactgtttatagacatgaatatatttatgtattacatgattgctgcaaactttcgattacaccatgataagtagcggactgaaaaccacaaacatggctgctcattttgattctggagagatatagctggcattgttctagtgactgcatcatccttgattggttctgtgatgatgtgataggactgcatattgctatcattcacaggagaagcttccttctgattgctgtttgaagcggatgatggtcttctgcttggtatcgccctccggaggttgattgccctttgcttggcctggagtaggtcggggagagacacaacttcttccatcaacgacaattctttgctgaggctgtcggtgcagagaatggttgctatgatttattgcagagtcaggtgcagcaggaggagcattggtgcattgtttctgctatgggttctgattaacacgaggcctcacgggtacggcgtttgctccagtgaccacaatacgattggaatgtctgcttcgtgtaaattggcggtaatgtggaggtcgattttgccttggttgcaggcagtccctcgagtaatgccctggttctttgcaattgtagcaaatcaacgtcttctttgctgagctatccgtctgaggacgatcattctgacttggagttggagttggtggttggaaatccttgctaacattggcatcagtggtaccatagttgctatcaccattggagtctttctcagagtcaaaattgctagggttgtcattctgggtgccttcattgatactatcgtcgatatcttggtgaatgctgttgacattgcacgcttgatctaagtgatcatgaatggggcaagaaccatggtggttggtggtattatcagcattagtagtgctattgttgttgtctgcattgcgttcatcttcttggggcaggaactcttgatacacaacagaagatccggtgatctgaagtggctcagtgcgctgtctttggttaccacctggaaatactgggttgttgaccatccttctcttgcagttcgtcatccgattatgctcactttcaagttgcatggctttgtccacaagtttctcaaaattttcataatcctctaggagtagttgcactgcaagctcatcttttaacccctggagaaacttctcttgtttgtcttcatccgtttccacatcttctggtgcatagtgagccaaacgatagaactcatgcaggtactctgtgacggtcaaatctccttgcttcaggtagcgaaactctcgttttcttagtgtgatcgttcctgcgggaacatgtgatctcctgaatacagatgaaaactcgttccaggtaatggtatgtccttctggccgtgatgcttcgtagcgatcccaccactctgaagccggtccaaccagctgatgagttgcgaagccaacccgctcctggtcggtgcactgaatcaaccctagcttcttctcgattgtgcgcaaccaatcactggcttccataggatcgacggcaatggcaaaggttggaggttcagttttgagaaattctgataacttgcactgttgctggactgtaggcacttgaacgttggttgcccctgctgggttgctcca

SEQ ID NO: 24373 - DNA, 933 bp, Oryza sativa
cgagtttcctatcaacgagcgcgatggaatcaatttcatgagtcgccgacttcgctttcgctttgggagttttcacttcctttccgtcgaccacttcttcaagctcctcttctctgacttgatccaaatcagtcagggggaaactcaatctgatttttatcattatttatcatattgatttttaatctcagattaatttcttgctattttttgttgttgttcgcatataactacgcggcactattgaggcgattgatgctggtcatggactcgaggcgtctcagctttccggtcgatcggccgcgagtccactccgccggcttgtcctcgccaccgccattgctgatagcaacaacgacttcatcgccggcctgcctccgtcgccgccgactggtgtcatcgcctatacggttggtcggtcacaccaccgttcatgggcgtccatgtcttcaccgaccggctggccttcgccgccgccgactggtgtttccgcctgcacggctggcctattatgccgccgctgttgggcgtctacgacttcaccaccggcctgcctccgtcgccgccgactggtgtcatcgcctatacggttggtcggtcacaccaccgttcatgggcgtccatgtcttcaccgaccggctggccttcgccgccgccgactggtgtttccgcctgcacggctggcctattatgccgccgctgttgggcgtctacgacttcaccaccggcctgcctccgtcgccgccgactggtgtccccgcctatacggtcggttggtcacaccaccgttgatgggcatcgtcatctacaccgccggcctgcctccgtcgccgccgactggtgtccccgcctatacggtcggttggtcacaccaccgttgatgggcatcgtcatctacaccgccggcctgcctccgtcgccgccgagtggtgc

SEQ ID NO: 24374 - DNA, 1281 bp, Oryza sativa
tccgcatgcacggctggcatattatgccaccgttgttgggcgtctacgtcttcacagaccggccgcatgcgccgccgctgactggtgtttcagcatgcacggctgacttattataccgccgttgttgggcgtatacatcttcaccgactggctgcctcgaccgccgccgactggtatttccgcctgtacggctggcctattatgccaccgttgttgggcgtctacgtcttcaccgaccggccgcctcgtccgccgccgactggtgtttccgcctgcacggctggcctattatgccgccgttgttgggcgtctacgtcttcaccgaccggccgcctcgaccgccgccaactggtgtttccgcctgcacggctgacttattatgctgccgttgttgggcgtctatgacttcaccgaccggcttgccttcgccgccgccgactggtgtttccgcctgcacggctggcctttatgccgccgttgttgggcgtctacgtcttcaccgaccggccgcctcgtccgccgccgactggtgcttccgcctgcacggctgacttattatgccgccgttgttgggtgtctacgtcttcaccgaccggctgcctcgaccgccgccgactggtgtttccgcctgcacggctggcctattatgctgccgttgttgggcgtctacgtcttcactgtcacgtcctgataaattcatcccgaattaaaattcattctctaaaaggaataatagaattaattaaaattcgaaaagaaattggcaaacactaaaatacgtacaagaaaaattcaaaagtggcccggagaatttttgtcaaattctccttggtctaaaaggagccctcaaattttagtggaattttcagagcacaaataataattgttaagaaataaacaaagttaaaaaggatttataaaaagaaaaaccctaaaagaagtccttttcccccctcccttcttgggccggctcggcccagtccctccctctctctctcttcccccgcggcccatcggcctcccccgcgcgcgcgccgctgacaggcgggcccgctccccgctctcgctgacgggtgggtcccgcctgtcgtcttcctcctcgcgccgcgccgccgctcgcccgtgccctagcgccgccgccgccgcggatttcgccgcatcccgccgtcccagcgcgcattaaagagggggaaaatactccccgtgattccctctcccgtttccccctcttttccctctctctctccctcggattcgtccgatttgaatcccgcgagtttc

SEQ ID NO: 24375 - DNA, 6210 bp, Oryza sativa
ctgtggttgtactcattattgttcaatccttcccttttcaagtaagagaagcttggtaaaagaagtcttaggtggagtcctggcttataccccagttgagcgcctgtgaagatggagccgtaggctcgctagtccgctgctgtttattttttgattgtcaggcctgaagcgcctttgtaataatgtaaatattatcgatataataaagatgtgtcttttatatcatgtttgtgtggtgtaccccggcttttcctgggacggggattaatacactagcgttcgggaaaaggcaattttcccggtcgcgacaagctggtatcagagccatctcgactgtaggataagccaagtggataaaacctaaggacatattttataaataaaactatttgcgaaagttccttttttctccttcccctaatgctatttgcaaaaggtttactcccttcttccttcttcggatttcaactagtactagatggtcagctttgcgaagaagaagatgtcgccaattgtttgccgaagctccggaagaccgcagggtccgctagcgaagtgtaggaagcagtgaagccagctgtgaaggagtgaagatcttggagaacccgtcgcagaacctaagccatcctgtagggtagtgttgttagtcgtgtgttccttgcttgtgtgtgtagcgcgtggtttgcatcggtgggttgtgatgtaaccatgctaggttgtttgcttaatcaacttgcggaataagcaaaacaaacaacacatcaacaagaagagttagttcctttaaggtcctatccttagtttctaacctgtctctcccctttgttttccctctctccctctccaaacctgtcacgtcctgataaattcatcccgaaataaaaatcattctctaaaaggaataatagaattaattaaaattcgaaaagaaattggcaaaccttaaaatacgtacaagaaaaattcaaatgtgacccggagaatttttgttaaattctccttggtctaaaaggagccctcaaattttagtggaattttcagagcacaaataataattgaaaagaaataaacaaagttgaaaaggtttataaaaagaaaaaaccctaaaagaagtcctcttttccccccccttccttcttgggccggctcggcccagtccctctctctctctcttcccccgcggcccatcggtctcccccgcgcgcgcgcgctgctgacaggcgggcccgcccgccactctcgccgacgggtggggcccacctgtcatctccctcctcgcgccgcgcccgccgccgccgcccgtgccctagcgccgccgccgccgcggattccgccgcatcccgccgtccccgcgcgcattaaagagaggggaattactccccgcgtttccctctcccgattccccctcttttccctctctctctccctcggattcgtccggattcatcccgcgaagttcgccggcgtcttcaatggcgcccgagatctccgcgcgcggtttcctctctccccggccgcgctctccccctcccgttgctataaaatcgtccctcgtgcttcgctcttccgtttccgccgctcgccgctcgctctcgccgtcggtttcgtgcccgcgccgtgctcctctctctccgccgtcgccgccgagctccgtttcgccgccgtcgtcgctccggtcctcctcccgactcggcgccacctccatcggcttcgccgagtggttgccgaccccgtccgccgctccgcttcgcccgccgaccgccggagcaccgtcgacatcggcatcccgaaccgcgccgccgcttttctccactccggccgtcgtttccgccgtcctcgttgtcccggggtgagccgtggaccgtccctctcgcttccctctcctctccgctctctcgggcgccgctccgccgcgccggtggtcgccggcggtgaccatcggggcgcgggcgcgccgctcccgtcggccgtgccggcgaggccgccttcgggcgcgccccgcggctgccaggtgggcccggccgtcagccgcccgcgcccgcgggtgcggctgacgcgtgggacccacggcgccgaccgccgccagccgcgtgctcccggtccaccgtggaccgagaggctgacgcgtgggccccacttcccgtggacccggtccgcgcgccccctctcccggctgacgcaataaatggaatttttaattaaaatttaaatgaagaaattcgcaaatatccatttaaagagcatataaacttcaaatggccataacttggccatttgaactcggaattggaccgttcaagtctctaatttttccttaagaagtcaagaacccatttttgtgctttgttcctgctgttatgtggagtttagtagtgtaaaaagccttttcttttccgttggtcgtgtagacgctgcagcttcggaagatccgctcttcgtggaagttgaagccggcgtttgggaaagcgagcaaggcaagtcacatcacccttgagcatattgaatcccagtttataaaattattttgatttaaattattgcattatcgctttgtttaaattcccgcgttatcactgttttatttagccatgcctatttacctttgttatgacattattattgctattgttattattaccttgttcaccctagaataaacaaaactccaactagtgggtactctattcgtggttccactagtataaatttaggtagatgcttcgctgaataattaggcaaccttaggtggttttataactttagactttgggaattctcatatcatttggacactatggaattgttggattatggtggaattggacatacacctctctttctctttcaaaacccctaaaacctgttttcggtggggtttgggtgcatgccagttatgggaagtagcaccccggccactataaggattaagctcgggcctctgttgcaaagcactaccgtacttccacatgtctaatgggtaaggcttagtttgtggctcagcctagtcataaacaaaagtacacggattggagatggatgaagtcgggcgtcgatggacattctccagggcaaatgaaggctacacgagctgcggcccggtagtcgagatgtcatacggcagagggttggtgccctgctgctaggggctcagttctgcctgcctgtcccgggtatcccggccgtaggtgggattgggtcggtactcttgtctaaggctaggatgggttggaaactatgtcacatctttacgacgggttccaaggccatggaatgcggagtaaagatgtgtcttgtgggtaaagatgtacacctctgatcagagtaaatctattcgaatagccgagccctcggatatgggcaagccgagcaatgtacccaagtcagtgttataattcttaaaatttgctcaacaactaaaatatggaatggttggcctgggttggcttgggacgagttggaacccaggtcgggttgccagttcggtccgaatcatcgtaggccttgggttaaggcaggttcgtgagggttcacggccttgtttaataatattgtgtagctctaggatcgtctttataaaataactttgggcaactaagtgacttttaaatgctgtttactgcaaaacctaacccctatattattatctccttgtacccccttgcattaatcatgcatctgccggtgtggcttgctgagtactgtggttgtactcattcttgctcaatccttcccctcttcagtaagagaagctttggagaagatgtcttaggtggagtcctggcttataccccagttgagcgcctgtgaagatggagccgtaggcccgctagtccgctgctgtttatttttgtttgtcaggccttaagtgcctttgtaataatgtaaatattatcgatataataaagatgtgtcttttatatcatgtttgtgtggtgtaccccggcttttcctgggacggggattaatacactagcgttcgggaaaaggcaattttcccggtcgcgacaagctggtatcagagccatctcgactgtaggataagccaaatggataaaacctaaggacatattttataaataaaactatttgtgaaagttccttttttctccttcccctaatgctatttgcaaaatgtttactccgttcttccttcttcggattttcaactagtactagatggtcaggtcagtgaagaagaggacatcgtcagttgtttgccgaagctccagaagactgcaggatctgctagtgaagtggaggaagcagtgaagccagctgtgaagcaggagtgaagatcttggagaacccgtcgcagaacctaagccaccctctagggtagagtcgttagtcgtgtgtttccttgtttgtgtgtgtagcgcgtggtttgcatcagtggggtgtgatgtaaccatgctaggttgtttgcttaatcaacttgcagaataagcctaacatacatcataacagcaaaagacttagatctgttaaggtcctatccttagtttctaatctgtctctcccctttgttttccctctctccctctccaaacctttgcaacagatggctgacaatgagaaaggcaataaggtcagaagtcaggacattggtacctcaagctcccgagtgaatgaagcaccagacaccagttgtgtggcagtggtccaacacctgattaaccagaacaaattgcttatagagatactacagcagcatcggatgccaattttgaacccgagtcagatgcaacctcaagtgcagttggaggcagtccaagcactcacaccacaagtcagcgcaccgccaacatcccagaaggcccctcatgccatgccacatgttgacccaaaagaagcaagtatcatctgttttatgtgtgatgagcaagggcactacgcaaggaactgtcctcagcagaaaagaaaagcaccaatgcgaaccgaagatgaagtccgtaagatgatcattaccagcacagaatggcctccaccaggaatgacaaaacatcagagaagaaattccttccgaggtgcacaacagttgacagagcatcttttagctaatggaggtagagtgtctgatagtgaagattcagatcaagtctcctcagatgatgaaggtgcgaagcctccccaaggttttaaccagaataaaatagaacttaaggcatgctctcgttgtggagaaatcggtcatgttgccagctcgtgtgcctctacatgcgttcattgtgaggaagaccatccacccgacaggtgtccaacgagtaggatcacttgtttcctttgtgaaggaactgatcatgtaccaaaagattgtcaattcagttttctgctgacgaagaagatggccaaccaacccgccagttccaacggagagaagcatcaaggaaacacaaatcctcgccaagattccagtttcagcctaactccagtgccaggacagaggaatcgaaatgagaaaagaaaatgccgagtccgggaagacatctgttgcttcaattgtcaaggaatgggtcatttcgccgacaagtgcccaaaaccgagaaacgtagctgccggcacgtcagtccacgcaactccctgcaatcagaagcttgctcctcaacgaattgtcatccatgcatcccgaagcagtcctatagcccgcgttgcaacaactccaattccaatgagtgcactaccacaaggtgtcaatgctcaatttcagccccagccaccagctgacaagacagaggccagtatctgcgttgtacctttggaagttccaatacagcagctgagaaatcaagtacaagatgaagaacccgagtgtaagaaagttattgtttgttacaactgcagtgaagaagggcattactccaaaaactgtccccaaccaaggcaaaatcgacctccacattaccgccaatttacacgaagcagacattccaatcgtattgtggtcactggagcaaacgccgtacccgtaaggcctcgtgttaatcagaacccatagcagaaacaatgcaccaatgctcctcctgctgcacctgactcggcaataaatcttagcaaccattctctgcatcgacagcctcagcaaagaattgttgtagatggaagaagttgtgtctctccccgacctactccaggcctagccaagggcaatcaacctccggagggcgataccaagcagaagaccgtcatccgcttcaaccagcaatcagaagg

SEQ ID NO: 24376 - DNA, 19670 bp, Oryza sativa
tacccccctggcattaatcatgcatctgccggtggggcttgctgagtactggggttgtactcattcttgctctatctttctccccccttcagtaagagaagctttggagaagaagtcttaggtggagtcttggcttataccccagttgagcgcctgtgaagatggagccgtaggcccgctagtccgctgctgtttatttttgattgtcaggccttaagtgcctttgtaataatgtaaatattatcgatgtaataaagatgtgtcttttatatcatgtttgtatggtgtaccccggcttttcctgggacggggattaatacactagcgttcgggaaaaggcaattttcccggtcgcgacaagctggtatcagagccatctcgactgtaggataagccaagtggataaaacctaaggacatattttataaatgaaactatttgcgaaagtccctttttcctcctttcccctgtgctatttgcaaaatgtttattctcttttcttcctccttcggattttccactagtactagatggttagttttgcaaagaagaagatgtcgtcaattgtctgtcgaagctccagaagactgttggatccgtcagcgcagcaaaggaagcagtgaagccagatgtgtagcaagagtgaagatcttggagaacccgtcgcagaacctaagccaccctctaaggtagagtcgttagttgtgtgtttccttgcttgtgtgtgtagcgcgtggtttgcatcggtggggtgtgatgtaaccatgctaggttgtttgcttaatcaacttgcagaataagtgaaacaaacagcacatcaacaaaaagagttagttcctttaaggtcctgtccctagttctggtctattctttcctggcttgtttcctctctcacctcaatccctgtaacagatgtttaacagagaaaaaggaaagaatgtcagcgggtatgcctccagtaactcaagttttcaattcaatccaccactggcctcaagagagttaaccagggcacacccttggtccattccaagcatgctgcttagttcacagctaccattagttggaagtcaagaccaaaatcagtatgtgtttgatcgagcgtttgccacccaggtcaatgagcttccaatgccagaagaggatgtccccttttgtcacgattgtagagagcaaggacactatgccctgaattgtccatgggtatatgtcaaagaagccccttcctttggtttagcagggcagacatcgctaaaccagcctcctcgcaccaagtcaagtttgcagcctagtgtgcaaagtgaagagcccaatggagacaatccattgaatcctagaaaatgctttcctcctagcctttcgcaccacgtggggtcacgtactaagcaagccaaaggcaagaagagtaagaatcagaagagaaaagcaccgatgcgaactgaagaagaagtacgtaagatgactattaccagcaccgaatggcctccagcagggataactattcctagacgtcaaagaggaaataccttccgaggtgcacgacagttgacccagcacctcctaagccatggtggcagagtatctgatagtgaagggtcagatcaagtctcctcggattatgaagatgagtccccccgacatctcggcgaggaagagatggaatcaaaagcatgcccccgttgtggagaaattggacacgttgctagcatgtgtttcacactttgccctcattgtgaggaagaccatccaccaggtgaatgtcccacccgcaaggtcacatgttttctatgcgaaggtacaaaccatgtgcccaaggattgccaactcagtgtgttgttgaccaagaccgcagaaatccaacgaacaaccctacgattgtctcatcagctagtcagctccaacagcaacctcgacgatatcatccacagcaccaatgctcctcctgctgcacctgactctgcaataaatcatagcaataataccttcagcaccaaccattctctgcaccgacagcctcagcaaagaattgtcgtcgatggaagaagttgtttctctccccgacctactccaggccgagcgaagggcaatcaacctcaggagggcgataccaagcagaagaccgtcatctgcttcaaacagcaatcagaaggaagcttctcctgtgaatgatagcaatatgcagtcctatcacatcatcacagaaccaatcaaggatgcagtcactagaacaatgccagctatgtagccatgtttgtgattttcagttcgctacttatcactgtaatcgggagtttgcagcaatcatgtaataaataaatatattcatgattataaacaatgagttcgttatgtttatggaagattcatgttgaggatgcaatgtaccaatgctaagcacctttccttttaggcaatgcttagtattcatgtaatgaggaagaaatgtgtaatacagacaagttctatgaggattcttttggaagatgcggatatgtgattatgtgtataattgcttactgataaaggagacctagggtctcattccagaggaactatgttctaacctcgagttaataaccaacctgatgatggaaaagaaaatcaagcgattaaccaaagagacatttgtttggacaagagtttcagatgtgtctttttcggatgtcagggttgaatgtgtaaaggaatactttgaatgctaaataatgacaacatgaagggaatagtgggaagtaaactgaatgtaaagaaagtgaatccgagttgcctgttcgtgggaactattcccagttatgaaccaagtgaaatgttcgaagatagtctatagaggtcagattaaaatcgcatctaacaacaaagcttcagtttggcaggaaaacgatcagacaataacaagttcagcagtaaagtcatttaggaagatgtcaaagcatgtcaagtgggataagttggttcttttgagaaacgtaattcaaaggcaaaagttatcgacccttgcatcgaatagcagaagtagctagcacccggagagcaggaaagttaatatgaggcagttggtggcaagttagaagtaaatgacaagcatgatattcttatgatgacaaacatgatatcctagtaatgacaaagctgatgtcgacgcatgtcacgaaggtggtaacttgtatgagtttgacgccaaagatatgaatgataagaagttctagaactgaagccccatcctcaaccaccgcagcctagtctgagtcagttaaaggtgcaaccagggacaagtcgggtgaagagaagattccatctgcaacaggagatcgagccaagcagtccagagtggagaagtttagttagataagtttgttatagaagatgaagcggaagaagtcagacaagaagagaagaccgcccaacctatcttcttgctagcctcctcgaatctcggggacgagattcttgtaaggggggtggatttgtcacgtcctgataaattcatcccgaattaaaaatcattcgctaaaaggaataatagaattaattaaaattcgaaaagaaattggcaaacactaaaatgcgtacaagaaaaattcgaatgtggcccggggaattttttgttaaattctccttggtctaaaaggagccctcaaattttacttgaatttttagagcaccggaaataattattaagcaacaaaaacaattatcaaagtttattaaaaagaaaaatctaaaaataatcctccttttcttttgggccaattttggcccaaagacctccctctctcccctcggcccgcggccaaagtctccctttcctccctctttttctctccctctccttctctccctccttctcttgggctcccctttccctcggcccagcttcctcctccctctctctcccgggctgcctctttcccccccccctcccctcccggcctgcccggcccaggccgcctccccctcctctcctcatgggccgcctctcggcccaagctgagccgcccctccctctcacgcacgtgcgttgcacgagcgctgagcgcgccccgcgtggggcccacgcgcaggccgccgtcgccttcttcctccagccgccgcccggcttctctctcccccgtgcgaaccctagctcgctccctcctccaaatccgcttgattcacttggttaattccaaaattgattagggggtttcaatccccattgattcctcttcaaatgcccccaaattcccccttgattcgtgccttcaatccccgggaacggacgcgccaagtccggccgccttccattgccgccggccgtggttcccgccgccgttcccgctcctcccgtggccggctctctcccccatcctataaaatgggatcctcatcccccgttctctcgttttagccccctcccgagcctccccgtggtccctagccacctccccaccgtcgccctctctctcccacgctgccggccgcctccagccgcctgggccgcctcgaccgtgcgccggccggccgcgccgtcgcctcctccagcgtcgccgctacctcctccaccccggcctgccctccgtttcgcgcggtgatcgccggaggcgcgttcccgccgtcgcccttctcttttctccgcgccggccgcctccagccgcctctcccgcctcgcccgtgcgccgtccggccgcgccgtcttctccctcggcctcgcagccaccccctctccctcggtcagccctccgtttcgcggggaaagcaccggagacgcgttctcgccggcaaaacagtggcgttgccgccactgttccacctccggccgccactgtcgcgtttcccgtgcgccagccgacgtcgccaccacctccctcggcgttgctgcatcgccctctcctccggctgctcctcggtttcgccggaacaccgccgtcacgcgtgccgcctttccctcggtctcgtcggcacccactccggcagcccctttcgccgtgccagtgcgccggccgacgtcgccgtctccacctccggcatcgcagcggcaaggacgccctcggcctcgcctccccttcgaccgaaccccgccggtgttcgtcgtcgtcgtcatcgtcccgtcggttgcccggctcgtcgtctcgcggcgccgcctccgtcgtcggcatcgcagcggcgtggtccgcgtcgtccccgtctccgtgcagctgccgccggctgccctcatcgcctcctcgccggccccggtcgtcgtcgtcgtcgtcctctcgtcgttcccggtcgttgtggcgttcgtccctccgtcgagccgttctcgtccgccgcccgcgtttcccctagtgtgctgcagccccgtcatcgtcttcgtcctcggctccgcgtcgtcaagcctcgtgccggccacgtctcgccttcgtccaaggatcgccgccgaagccgtcccctcgccgttcgtctccgttgtgcccgtctgtctccgccgcgcccgttcgtcgttgtcgtccccgcgcctcgtcgcgtggtggtaaggatccctctccctcgctgccccgtcctcgtcctttcggtgtcccccgtacccgttgtgcggtcgtcgaccccggtacccgtgtaccggtgtcggtagtcgttcacgtgtgcgggtggtgaccgtgtagtgtccgtgttagtgtgcccgctcggtagccgcgtggtttccacgtgtgcaggtcgtgtggtgtttagtggagtccgtttgtcggccactcgcctcggttgacacacggggtctgcttccgtcgacccggggaccgcctctgtgtactcggtctaccgcggtcctttaggttgacatgtggggtccgcatgtcaacggcgcagccttcctgtcctttccaggctagcgcttacacatgttttataattgcaaagcttaattataataatccgcaaatctccatataacagcattaaacctcggatgatcatatcttggtcatacgaactctgaatcgacccgttcaagtctcctaatgtttgttataacctaaagaaccctgtgctttctttttatgtattgttattgcttctttataggcttgtagctttgcttgtgtgcttcgcgtagctttcgtcgttccggaggttcccgaagcgtggttcgcggtcgtcgccgaaggttcggaagtccgttctctctgagcaaggcaagtcacatcatccttgagcatattgaatcccagtttataaaattattttgatttaaattaatgcattatcgccttatttaaattcccgcgttatcactgttttatttagccatgcctatttacctttgttatgaccttattattgttgctattgttattattaccttgttcaccctaggataaacaaaacccccccaactagtgggtactctattcatggttccactagtatgaatttaggtagatgcttcgctgattaattaggcaacattaggtggttttataattttagactttgggaattctcatatcatttggacactatggaattgttggtttatggtggaattggacatacacctctcttcctctttcaaaacccctaaaacatgttttcggtggggtttgggtgcatgccagttgtgggaagtagcaccccggccactctaaggattaagctcgggcctctgttgcaaagcactaccgtacttccacatgtctagtgggtaaggcttagtttgtggctcagtctggttataaacaaaagtacacggatggaggtggatgaagtcgggggtcgatggacattctccagggcaaatgaaggctacacgagctgtggcccggtagtcgagatgtcatggcacagggttggtgccctgctgctaggggctcagtcctgcctgcctgtcccggaggttccggccgtaggtgggattgggtcggtactcttgtctatggctaggatgggttggaaactatgtcacgtcttccgtccgtataccgtggtggtatgtggcacgtggttacacgtgaggaagatgtgtcttgtgggtaaagatgtacacctctgatcagagtataatctattcgaatagccgcgccctcggttatgggcaagccgagcaatgtacccaagtcagtgttttaattcttaaaatttgctcaacaactaaaatgtggaatggttggcctgggttggcttgggacgagctgggacccagggtcgggttgccagttcggtctgaatcatcgtaggccttgggttaaggcaggttcgtgtgggttcacggccttgattaataatactgtgtagctttaggatcgtctttttaaaatggctttgggcaactaagtgacttttaaatgctgttttctgcaaaacttaacccctatattattactccttgtaccccccttgcattaatcatgcatctgccggtgtggcttgctgagtactgtggttgtactcattcttgctctatctttctccccccttcagtaagagaagctttggagaagaagtcttaggtggagtcttggcttataccccagttgagcgcctgtgaagatggagccgtaggcccgctagtccgctgctgtttatttttgattgtcaggccttaagtgcctttgtaataatgtaaatattatcgatgtaataaagatgtgtcttttatatcatgtttgtatggtgtaccccggcttttcctgggacggggattaatacactagcgttcgggaaaaggcaattttcccggtcgcgacattgccgacgctctaagtcgaaagagccattgcaacaatcttaacgtccgtggcattccgcccgagcttaaccaacagatggaagccctgaacctaagcatagttggtcgtggattcttggctgcgttggaagccaagcctaccttgctcgatcaaatccgcgaggctcagaagaatgatccgaacatgcatggactcctcaagaatatgaaacagggtaaagccgctggtttcacggaggatgaacacggaaccctatggaacggaaagcgggtatgcgttccagataacagagaacttaaacagctgatacttcaggaagctcatgaaagtccttattccattcacccgggcagtacaaagatgtacttagacttgaaggagaaatactggtgggttagcatgaagcgggaaattgcagagtatgtggccctatgtgatgtgtgccagcgtgtcaaggcagagcaccaacgaccggccggacttctccaacctctccaagtaccagaatggaaatgggatgaaattgggatggatttcatcaccgggcttccaaaaacccaaggcggatatgattctatatgggtagttgtggatcgattaaccaaggtggcttgattcattcctgtgaagaccacctatggagggaacaaactagcggagctctacttcgctaggatcgtgagtctccatggcgttcccaagaaaatcgtatctgataggggaagccaattcacctctcacttttggaagaagctccaagaagagcttggtacccgactaaatttcagcaccgcctatcacccgcagacagatggacagaccgagcgtctaaaccagatcctagaagatatgcttcgcgcatgtgtactagatttcgggaagacttgggataagagtctcccctatgccgagttctcctacaataacagctatcaagccagcatacaaatggcaccttatgaagcgttgtacgggcgcaaatgccggacaccgctattgtgggatcaagtcggagaaagccaagtgttcgggactgatatcctgagagaagctgaagctaaagtcagaatcattcgggataatttaaaggtggcacagtctcggcagaaaagttatgcagataaccgtcgccgtgatctggagttcgcagtggatgactttgtgtatctgcgggtcacgccattgcgaggtgtgcacaggtttcagacaaaagggaagcttgcacctcggtatgtgggtcctttccgtatcaatgctcggcgcggagaagtcgcttaccagttggagctgcccgcctccttgggcaacgtgcatgatgtgttccatgtgtcgcaactcaagaaatgtcttcgagtgccatccgaacaggccgactcagagcagattgaagttcgcgaagacttgacttatgtggagaggccagtgaaaatcctggacaccatggagcgcaggaccaggaaccgggtaatccgtttttgcaaggtccagtggagcaaccatgccgaagaagaagctacttgggagcgcgaagacgagctgaaggcagcccatcccgatctcttcgccagttcttccgaatctcggggtcgagattccgtttaaggggggtaggtttgtcgcgtcccaaatcgactctaaaattcatcctcgaaattgtgcaaagaataattaaaattcatgtgaaagcctccaacaattaaaatgtgcaaagataaaagtcaaatgaggcttggaggatttttgtatatttcctaaaagcctaaaatgtgtaaataaattttagtggaattttcagagcacaaataataattgaaaagaaataaacaaagttaaaagggttttataaaaagaaaaatcctaaaaagtcttctttcccccccttctttcttgggccggctcggcccagtccctccctctctctctctcttcccccgcggcccatcggcctcccccgcgcgcgcgccgctgacaggcgggcccgcccgccactctcgctgacgggtggggcccacctgtcatcgccttcctcccgccgcgcccgccgccgcgcccgtgccctagcgccgccgccgccgcggattccgccgcatcccgccatccccgcacgcattaaagagggggaaatcactccccgtgattccctctcccgtttccccctcttttccctctctctctccctcggattcgtccgatttgaatcccgcgagtttcgccggcttcttcaatggagccgagatctccgcggccgattcctccttctccggccgcgctttccccctctcggcgctataaaatcgtcccccgtgcttcgctcttccgtttccgccgctcgccgctcgctctcgccgtcggattcgtgctcgcgccgtcctcctctctctccaccgtcaccgccaagctccggttcgccgccgtcgtcgctccggacttcctcccgtctcggcgccacctccatcggcttcgccgcgtttccgtcgaccccgtccgcccctccgcttcgctcgccgatcgccggaacgccgtcgtcatcgccgtcccgaaccgcgccgccgccgtcctccgcttcggccgccgtttccgtcgtcgttgtagtcccggggtgagccgaagaccgtcctttcgcttccctctcctctccgctctctcgggcgccgctccgccgcgccggtggtcgacggcggtgaccatcggggcgcggtcgtgccgcctcccgtcggccgtgccggcgaggccgccttcgggcgcgccctcgcggctgccaagtgggcccggccgtcagccgcccgcgcccgcgggcgcggctgacgcgcgggacccacggcgccgaccgccgccagccgcgtgctcccggtccaccgtggaccgagaggctgacgcgtgggccccacttcccgtggacccggtccgcgcgccccctctcccggctgacgcaataaatggaatttttaattaaaatttaaatgaagaaattcgcaaatatccatttaaagagcatataaacttcaaatggccataacttggccatttgaactcggaattggaccgttcaagtctctaatttttccttaagaagtcaagaacccatttttgtgctttgtttctgctgttatgtggagttatttagtgtttaagccttttcttttccgttggtcgtgtagacgctgcagcttcggaagatccgctcttcgtggaagttgaagccgacgtttgggaagacgagcaaggcaagacacatcatcttgatcatattgaatcccagtttataaaattatgttgatttaaattattgcattatcgctttatttaaattcccgcgttatcactgttttatttagccatgcctatttacctttgttatgaccatattattattgttattgttattattattaccttgttcaccctagagcaaacaaaaccccaactagtggacactctactcatagtaccactagtataattttaggtagatgcttcgcaatctaattaggtaaccttaggtggttttataactatagactttgggaaatattcatatcacctggacactctggaattgttggtttattgtggaattggcttcacaccgctctctctattcaaaagtccccaaaatggttttaggctgggctcggggtgcatggtttggatggtagcacctcggccgtttaaggaccggtcttcgggcctctgttgcaaagcactaccgtacttccacatgtctagtgggtaaggcttagtttgtggctcagtctagtcataaacaaaagtacacggattggagatggatgaagtcgggggtcgatggacattctccagggcaaatgaaggctacacgagctgcggcccggtagtcgagatgtcaaatagcacagggttggtgccctgctgctaggggctcagttccgtctgcctgtcccgggggttccggccgtaggcgggattgggtcggtactcttgtctatggctaggatgggttggaaactatgtcacgtcttccgtctgtataccgtggtggtatgtggcacgtggttacacgtgagaaagacgtgtcttgtgggtaaagatgtacacctctgatcagagtataacctattcgaatagccgcgccctcggttatgggcaagccgagcaatgtacccaagttagtgttttaattcttaaaacctgcttaacaactaaaatgtggaatggttggcctgggttggcttgggacgagctgggacccagggtcgggttgccagttcggtctgaatcatcgtacgccttgggttaaggcaggttcgtgtgggttcacggccttgattaataatattgtttagttctaggatcgcgtttacaaaatagccctgagcaactaaatgtctttaaatgctgtttactgcaaccctaaccctttatattataattcccttgtactcccttgcatttattctgcatttgtgggtgtgtcttgttgagtacggtggttgtactcagtcttgctcaatttttcccaagtccagaagaggagctccttgaagatgaaggttttggtgtctagctcgtgcctgccgtcaagcgcctgtggtcgtcgccctagtcttccgctgcttcttcgtttgtctttgtgtgttgggccttcgctgcccatgtaataattctatttacgcttccgcttgttaaactctgaattgtatcaacttttggtgtaccttgcctcctgggataaggattaatgcacgcacgtcaggaacgcccgttgggttatttccggtcgtgacaattatactctaatcagaggtgtacatctgtacccacaagacacatctttactccgcattccaaggccttggaacccgtcgtaaacatgtgacataacccttcacccatcctagcagtgaacaaaagtaccgatccaaccctgcctacggccggtttcccgggacaagcaggccaggattgagcccctagcaataggatctagaccgggtgcgccacacacataggggtgagaccacccgcgtactagtcgagtgccatggcatctcgactaacggacaccggcccttgtagccttcatttgcctagacatctcgattaccgagccgcagctcgcgtagccttcatttgccttagagatatccatcgtcgcaacgacttcatctatctctatccgtgtccttttgttcaggactagactgagcaccgagttaagccttacccattagacatgtggttagtacggtagtgctttggaacagaggcgcgagcttaatccttatagtacctgaggtatgactaacaaaacaaaaccacgcacctcgagcccagcgtaaaaccgtttggggggttttgaatagagggggaggtgtgtgtccaattccaacataagccaatcattccatactatccaaatgatatgagaattcccaaagtctaaagttataaaaccaccttgtcggtgatatgggaccgggggtatcgtgaccagaggcttgaggcagacacaatcgcccacgcggcctggcaccttcggggacgtcgggcccgagggtgaggtgtctgccctcctcctgatttcccccgagggggggtcgggttactcctgccccggccccgaggaccgaggcaccccgaccccttgaggaagtttgcgccgcatatatgggataggtgaacacagcagtgctcacctaaccgcatttattgtagtctggtcaagcgtgtcacgctgcatgcagtgcagtgcagcgcgttcctttatccggtcacagaccggtcagatcacgggttaggtggcgactggcggtctgacgcacgccttgccccgtcccgtcaagacgaaagcctctaggcacttgtctcaagccggagctagcgtgttatctcttagagatggcacgttagccctggttagatttataccaggcttcatcccaaccattacatgcaagatgttacatgaagaagggcaaacatgcacgttgctaagctgacgcatggtagacaaggatgactgatctgtgaccggtctgacgctggtcgcgtcatccacagacagccataatcccacgtcgcacctgtttccggcggaagtgggggtaggtacgggtcgtcccgtcagaagggcactcggacagcaaccgtaccgatctccgtccatttatgaagagaagaacagtccagtttaaaaagggaaaggtgcatgtggtatccccttgagatataaaaggaggaccttgcccacctagaagggggacttttggctgattgatacttggtaacttgttcatacacagatccacaaaaacacaggagtagggtattacgcttcccagcggcccgaacctgtatacgtcgccgtgtctcgcgtttcttgctggcgagcgatctttccacatacagagagagcttgggatttcaccctaagcccccggccgaaccggcaaaggggggcctgcgcggtctcccggtgaggagccacgagctccgtcacacctaatgttgcctaattaatcagcgaagcatatacctaaattcatactagtggaaccatgaatagagtatgtactagttggggttttattttcctagggtgaacatggtgataataaacaatagcaatgataaggctataacaaggattaataggaagtgctaaataaaacagtgataacgcgggaatttaaataaagcggtaatgcaataatttaaatcaaaataattttataaactgggattcaatatgctcaatgatgatgcgacttgccttgctcagagagaacggtcttccaaaccttcggcgacgaccgcgaaccacgcttcgggaacctccggaacaacagaagctacgcgaagcacacaagcaaagctacaagcctaaaaagaagcaataacgatacataaaaagaaaagcacagggttctttaggttataacaaaaattaagagatttgaacggctcgattcggagttcgtatgaccaagatatgatcatccgaagtttaatgctgttacatggagatttacggattattgtaattaggttttataactataaaatatgtgtaagcgctagcctagaaaagacaggaaggctgcgcttgttgacatgcagaccccacatgtcaacctaaaggaccacggtagaccgagtacacagagatggtccacgggtcgacggaagcggaccccgtgtgtcaaccgaggcgagtggccgacaaacggactccactagacaccacgcgggctgcacacgtggaaaccacgcggctaatgtaacgccccgattttcgttcgggattaaaaatcattaaataatgcattttctggaaattaaataaaattaaagcaatttaatcaagtgaaataatgagtaaattaaaaatttccattaaaaatcatggccgagaatattttgtaatattctttgcaccttaatatattctctgaattttcccgtgaatttttggagctcaataagtaattataataatacaaagttcattaactcaatttaaataaatagaaaacaaattaaaatcccctctttgtctttgggccgtgttcggcccaactccctcccttccccttctctcctccggcccggccgcccttctcccctctccttttgggccgctcggcccgctcggctcccctccctccctcaagttcattcctcctccctccagccgacaggtgggcccgaggcccatttgtcaggccctcctgctaccttcggtgtcacgcctggaatttctatccaaaattccaaacgcttacatgtgtgtgaaccctcgtccaggaatcagccgaggcacacaataacaaattgataatagagtacaattattactctaattaataagcgaataaaatgtcgttacagaggtagatagttcctctcaatcaataaaaatctaagcagcggaaaattaaaataaacggcacaaacgactctactccacaggcagcttgaccagggctacacctaatcctccataccatcagcatcactgtagaactcctcctctgatgaatgattgcaaggtgagtatatgacatactcagcaagccacgcagcaaatatgcaagtgcacaggataacaaaggatgacatagtatggtttcatttgcataaatggcatttacaaacatttcagaatttaataaaatagttaagtagtaattaaacaatattaatccaacgctatacaacataccctgttgcataggcccaatcgttctgaacaaccatcccggctgcacagttctatctccaaaccaggaatacaccattccaaaccaggagctaaacaaattattgccagttatagcatcttttattatggtgagaagtgtgaaactaatcacgaaagacattgttagacccgcccataaccgcgggctcggctattcgaatagttttactctgatcagaggtgtaccactgtacccacaagacacaacctcaacatcatgtcaaccatgcgtcgcgatacttgacaagtacccgaatagagattgtgacaataccctctatataatacaattcaaagcagtgcaccgttcccggatcataatcacccccttataaacaaggtatggactccccagcgacccccgtgggcttatctccgccacttcacagtctggtgctctactatgaaccatactatactgaaagtaaagccgttgcccacgttggcttgtggttggcacgataaatgtttcacaaccgaaaatcgtgaaccggtccttaattgtcatgagcacaaccatcaaaaccatatgctcacaacccaccattatcatattttagttgtcaaattaattaattaaccaatcatgattaaccatcatgagctatcattaagccatcattaaataatagtgaatcataaattatcccattagtgagctaatgtttctaagcatggctaagcaattatacctaacatctagctgaacaattatataaagctcaactagtcaaattatactaacccaaggtatcaaagaataaagtaatcaagtacaaaagggccataacaaagaataggttaattccacccaatgacattcgaaaatagatgcaatagttgaatagaaacaatagctttaaataggatcaacatgctcaaagggttgtttgagatctgtgtgacttgccttactggccttggaactcttcaaattcttctccagcgaaaacggactctccggaaacgtcggaatctaaacagaaaagagcaaaaacaccaaaacagcacataaacaagcatgaacagtacatgtggatatttttagagacttgaaccaactaaatccgagctaagatgaattagttatgaattttcaaagattaaaccggattaaagcatttatatagattttaattgaattatgacgcaataatgaattatttttgaaaaggaaaaggggtttattgcgtcagcggctagggtttgcggtggaccgggtgcacggcggcggttcacgggtttggacggccgagatcgatcctatctacaacggacggccgagatcgaccggtccacggccgggccacgggagacgatgacgatgacgtcagcggtgacgtcaccaccggcggcggctcaggcttgcatgctcgccggcgaacgacggcgcgacgacgcgaacggagaacctcagcacgtagagagcaacgcggcgaactcaccggtgaccaaaacggcggcggaagatcaacggacggcgacggcgtcgaggaaaaggcggcggcgaccttcggcttgacgacggcgacggtgctacggtgacctacggcgacgacggaggggtggacgaggacggcgacgacttggcgaccacgatggcgacctccccgagcgacggcgacgactgaagcgacggcggcgcacggctggagcggcggcgacgacggcggcgcgagctacacggtgctagggcgctacggacgacgagaggcgaaggcgagggtggcggcgggtagaggaggacctgggggtgcttttaaaggggttgaaaggcggcggcgaaggcccacggcggctggcgacggcgatggaatggttagggttcggggagagagacgaatccgattcgagatcgaatccacggatttccaaaccgaaatagatgatgattccaaaagagaaaaggtagaggggatcccgaagatcatttcccctctattgatttcaccggaaacggaaaggcgcggccaaatttggaaggagacggcggcggcgcggcgctagggtttcgggcggcggccagccagaggaagacgacgagtccgatccgcttccctcaggatatcagtcccgaaaacctgacgatctcctgtctgatcccacaaaagtggagtgcggcatttccgaccatacagtgcttcgtacggagccatctgaagactagcttgataactgttgttgtacgagaattccgcgtaaggcaaattcttatcccaacttccaccgaaatctaaagcacaagctctcaacatgtcttccagtatctgatttaccctttcggtctgtccatctgtctgcggatgttatgcagtactgaaattcaacttggaacccatctcttcttgaagtttcttccaaaactttgaagtaaactggcttcctcgattagatacgatcttcttagggacgccatgcaaacacacaatccttgccatgtacaattcctccaaacgactcccagaataagtggtcctcaccagaatgaaatgagccactttggttagtctgtcgactatcacccaaatagagtcatgacctgacgacgttctggatagtccagtgataaaatccataccgatttcctcccacttccattctggtatcttcaaaggctgcagcaaacctgcgggtttctgatgttctgctttgactcgctgacaaacatcacatactgctacatattctgcgatttcacgcttcatacttgcccaccaaaatctttccttaagatcctggtacatcttagtactgccagggtgaatggagtataaagtatcatgagcttcctttagaattgcatccttcaagtctttgttgtctgggacacagattctctcacccaaccatacagttccttgctcatctttcaagaaactgatagctttacctcttctcatattcttcttgatctccagaatatcaggatcattaatttgggcttctctgacttgatcaatgagagtagtcttcgcttctaaagctgcaacaaaacctctgctgacaattcccagatttaatctttcaaattcgttgcataactccaatggcaactgtcgtccttctgtagcgtttcaatagcctttcctgctaagggcatctgctacgacattagcctttcccgggtgataatgaattctcatatcataatccttaattaattccaaccatctccgttgtctcatgttcagatctggttgagtaaagatatactttaaactcttgtgatcggtgtacacctctgtacgagtaccgaaaagataatgacgccaaatcttcaacgcatgaaccactgcagctaactcaagatcatgagtagggtagttcttctcatgcggacgtaactgacgagatgcataggcaaccaccttcccatcttgcatcagtacacaacctaatccaagcttggatgcatcgcaatacacttggaaacccttctttggatcaggtaaaatcaaaataggagctgatattaagcgattcttcaactcttgaaaactctgctcacattcttctgaccacttgtactttacatccttttgaagtaatcgtgtcatgggcttagcaatcttggaaaaattctctataaacctccgataatatcctgcgaggcctaagaaactgtgaatctctgaaactgtcttcggttgtttccagttggttacggattccacattactaggatcaacggcaactcctccggctgagatgacgtgaccaag

SEQ ID NO: 24377 - DNA, 2811 bp, Oryza sativa
ccacgaaggcgacctcccggagcgacggcgacgactggagcgacggcggcgcacggctggaacggcggcgacgacggcggcgcgagctacagggtgctagggcgctccggatacgagaggcgaaggcgagggtgccggcgggtagaggaggacctgggggtgcttttaaaggggttgaaaggcggcggcgaaggcccacggcggctggcgacggcgatggaaaggttagggttcggggagagagacgaatccgattcgagatcgaatccacggatttccaaaccgaaatagatgatgattccaaaagagaaaaggtagaggggatcccgaagatcatttcccctctattgatttcaccggaaacggaaaggcgcggccgaatttggaaggagacggcggcggcgcggcgctagggtttcgggcggcggccagccagaggaagacgacgagtccgacaggtgggacccacctgtcagcgagcgggagcgcgcgcgcgggcggcggctcggctgcgggccgacttgggccgaggagagagagagagtggttttgggctgactttcggcccaaagccaaaagagaatttaaaaaacctttttcaatttaaattattcattaaatgcaattccatttattaaaaatacttccttagctcaaataaatcccagaaaaatctaggaattatacaattaagcaaagtatttaatgaaattttgtctggcccacttttatattggaatttatttattaaaattagatcttctcttctaggctttttttaaaataaattctaataattccaattaaacaacgatttatatatttaggatttttagggtgtgacattcggcttcccaggccgaagccgccatggatggccgttcccgcccacgtcccgccgagtccggcgccctcccgctcgcaccctcgctctcaaaccaagtaaaatcggttccccactaccttctccaccttttcccccactctccccgcgaaaatcggcgccggttaactcctccaccaccccacgtcagcatcccacttcgccagccgttgccgttccgctcggctacgattctccctccccgagcctataaaaacaaacctagagctctctctctcattttccctcctcccccgagcttcccgttgcctccctcgctctccccaccgctgctcctctcgccgcgactccagctggccgctactactgctcctgccgccgcgactccgcgcgccgccatcagcggcttcccgtgtcgtgccgtacccggcatctcctcatcttccctattttgtcgccggaaccacctcctcacggcgctcccactccccaccactcaccggcgtgctccagtcgctgcctcccgtcgcactagccaccaccgagccgcgccgacaccaccatcggcatcgccatgtcgatctcaccctagcccatactccattttccccttgagcatgttaaaaagcaaggcaagattgtttgatcgcgaggaaaagagttccgtaagattgtttgaagaagcaaggcaagtcacacattccccttgagcatgttgagcctaatttataaatgtttttaccgtttgcaaataaagatgcatgttttgctaattacatgggatcagggtttacctatctgcttgcttgtgccatattatttgatatctgtcctttgtcaaccttgggtaataaatcgactagcttgtgttactttgttgatctagctagaactatcggcttagccatgtttaattaccactagctcagttgatgggataattgcagtattagacctgttagtatcatgatgagctgcggctcgagacatccggccatgtttcatggtcgtaattatccaactaaaactcgactgaatggtgggctgtgggtgcatggttttgctggtcgcacccatggcaattaaggaccggttcgtgggaaaccctggaagacatacagcgcttgccacaagcgggaatgggtaactgcctgacttgaagtatagcttttcgcttgctgacgcatctaggcaaggatgagcgtgatggagttcggatgggccctgcgacggcctatgcggctttctgattcgcctaggcacgagaggggactgcccgctgcctgctgggggcaggggtgaaacctgatgtgtggtgtgtttggtcagaggcggttatatgaagggtcttgtcacaatcactcgacatggtgacgtgtctggcctagcacggtgacatgccggtggattgtgtcttgtgggtacagttatgcacctctggccaaagtaaaactattcgattagccgtgcccgcggttatgggcgatcgaatagattcaccgtgattagtctcatacttaataaatcgacccaatgcactgtagttcaggtgggttggttgggcttgttatgggttggttgggcttgttcaacgtggtgtagcgttgatcagtagagatttaatattacattaatgactcaattgttttactgttttgctcaataaagtgttttacaactgcctttatgcaaatagccacaagccattcttgaatccccttgcacgtctgcatcattggtgtggcttgctgagtacggtggttgtacttagccttgctattattttccccttttcagaagtgtagtgcttctgagctgaagacgaagttagaggaccaagcctcagaccccagttgagttttgcctgtggagtggagctgaagcccctctaggatcgcattttttcgctgctgctgctttcgtttcagtgtgaggactaagtgcctcttctgtaaatatttacgttt

SEQ ID NO: 24378 - DNA, 14817 bp, Oryza sativa
gacgaagacgatgacgggcctgcgacgtactcttgaagaaacgcgggcaacgaacgagcacggcttgacgaagggagggccaacgaagagcgcaaccaggaacgacgagaggacgacgacgacgacgaccggggccagcgaggaggcgacgatggcagatggcagcagctgcatggaggcaaggacgcgggggagaggaggcggctgagacgccgagggaggagacagcgcggccggacggcgctcgggtgaggagggagaggcggctggaggcggccggcggcacgggagagagaggacggcggcggggaggggtggtgcggccacgggggagctcgggaagaggcaaaaactagagaacggaaggagagggtcccattttatagcggaggggaacgagccggccacgggaggagcggggaacggcggcgggattggcggccggcggccatggaaggtggccgggaacggcgcgaccgttccgggtgaataagagcacgaatcaagggagaataaagggggaattgaagaggaaggaaaggggattaattccccctaatcaattttggaatcccatgcttgaatcacgcggatttgagggagcaaggaaatagggttgtacggcagagagagagaggccgtgcgggaggaaggagatgcgcctggctggtgggtcccacgcgggaggcgcggtcagcgcgtgtgcaacgcgcatgcgcacgcggctggctcggctcggccaggcttgggccgggcggctgggccgaggaaggccgggaggaggagaggagggagaggaggcccgggagagaaagggagggggagggagccgggccgaggggagaggaggggaagactttgggctagactcggcccaaaggaggaaggagattatttttaggttttcttttaatatacattgctaattggtattgttgcttaataaatatttccggtgctctgaaaattcaagaaaaatttgagggctccttttagaccaatgagaatttaacaaaaattctcctggccacattcgaattttttctgtacgctttttaaggtttgccatttcttttcgaattttaattaattctattattttcttttagagaatgatttttatttcgggatgaatttatcaggacgtgacaacattgttgactttacatctttgctagcttgagatcttccctctaccttttttttctggtataccttgtggttcacatcgtatacctcggacaattgcatctgatcatgcaaccataattcaagtttggttgtacaagtgattcttgtcctttgtcaagagttatgcatggaatcatgctcacctaaagttgtagtcgcaccccctccccccgatcaaacatggcacctctcgggtcataccatctgctccagttggtaaaatttcataggatgtctagctccacctccaacaacccagtagttcagcatacaatgtttgccgctttaaccgttaaggatactttacaaaaatagaccaacaaatacatctgaaacgattatccaccaatcctatgttcattatctattcccaaaaatatatcaacatccataagtattttttacgagaaatccataacaggcaggggcgggcccactatgtattcatgggtattcagatgtatacccaagatttttggaaaaaaaaaataggtatatatactatatagttcatataggtattaaaaaaataaaaagaaagcttaaactgcttatattgggccttgtttccccatttcttctctattgggcctaaattttccactcgcctccctctttcctctcaacctgtggtctaattgggccacatatcagcccatttgcaattttcccccaattccccacccgcctggcgccttggccacccaaacctgcaaaccctagaccacaacacagcagtacagcacggcgacgggaggaggcgtgcggcggcgtgacgtgcggcggtcggcgggggctgcgtgcagcgtgcggctgccggcggcgggagccgtggcggcgtgcggcgcggccgtggcgtgcagcagcgtgcggcgcggcggcggcgacagcgaccggtgaggcggtgagccgccaaggccaagcgccaagcccgtgaccggcaggcgcaccgtgaccgaccggcgacggcgtgccgcgtgcgccagccggcgcggcagcctgcaggggcccaggaggcagccaggcaggaggctgctccaggccgtcagccgagcaggagcaggcgctgcacagctgcagcctgcaggtcggcgtccgccgttccacgctgaggcccgaggcagccggcggctgcgcgctgccgctgcggccgtgcggcatcctgctcgccggcgactgcctgacctgcaaattccggacaagcacattagcacagtgagtgactaaactccggacaacgggacaagcacaaaaattcattgatttagacatttagtattttagtgtagttgcttgcttgcttgcttgcttgatttagacatttagtttgtaggattgtagttgactagttgcctatttgagtatttgagtaattgagtatattggacactgggcagtagttcatagttcataccatattagcaaatttgtagtatttgaatgattgtttggttacattcattgaaagagaattctttttgcaagctaaggacaaggacatcatcaattatttccaaaatatcaagcgtcgaaaagttaatatctaaattgtaagttttcttcctaacttattattttctatcatttttgtattccatattttgacactttgatatgtttggtattagtatttctataagttaaacaatttctagtgatgatcaattctatcactgtgtgaactaatgatcaattttatgttctatacgctctaaattataattattagtgtatcataatatacaagcccattttttggctttttggtgtatggatatttttttaccccttcccatttcgaatacccaagtttaaaaagctgggcccgccactgattaacaggtaacatatggaaaataagggattatataatacaaagaaatttgctttgatcataaaacagatttatcaccaaacaacacgtaaatgtttttaaaattttcattgggaggtagagattataggaacggtaaaatatgtttaactacttttacaatcatctttttatagtgttgtaattctagtgacttttcaccgagtatactggaaagaatattagtggtaaaatttaatatgtcagaccgtatcatcgtgcaaaagatcttatatttcttacacgagggaataacttcgcatagattgtgcagaataaacatatcaataaatatttagctatcacaatgagtgtctagtagacgttacataggccaccgtccatgtttagcaatatgagtaaactgcaaatggtaagattagataagactatccaccatacttcatttcaataatatataacaaaactgtacatatgtttaggataagccttatatttggatactattaatcattggattacttttgcctatttatttcagttgtgctgtctatataaccatcgtaaaacaaagaagaagcacaagccacagcttcatacaaagcaatcacacaaatgggcaagcagatgccgaactgtagccgtggacttctgcttctgttgttggcccttctaggctgttttagcattcctggccacgtgtatggtaatctactatctaatattgaatctcaatggtgaatccaaggtttattttgatttcacaattattcaattcttctgtggtaatcacgatgtattaaagaaacatatctttcagagtaaaatttgtgattccaattttcttctggacatccatcttcacatatccatgtattgcatatggtttttctgtatctttcatgctttcctagtaaaatattttttatttttcaggtaaaaatctggattacaccaggagtgcatccatgaatgaaggacgcaacaatgtcaatataaatggtttggtacccgtaccaggcaacattttctccccatcgaaggtctgctgtagaaatgtatgctaccctagcttgcaagcctgtgaggcaaattgcaaaccaattgcttgatcggcttatcaagcctgtaatactaaagaaatgataataatattgtccgttgttcaccaatcaagagaatgatcaatctcctcatagatgaacatggtttgtccttttgtttaggggaaaagactgtcttattgatacataactggagatggccacaggagaatcacgagaataagcgcaagaaatagtatcgtgtagtcaatatggcatgtatgcaggtttgatcgtagtactcgtttacagaaaaaagtaggcactctttttgcaagtgcggtccgctagattaattttatttttgaggctaaatcgtatataccattgcatgtcaccaaacgaagccttgaatcaatgggcatccttttcaacttgggtcaatgtggcaggccaaattgggaccttctgtagtgtataatcattttttactatgtgcatctccttcgttttttctccttcgttcttaagcacaataatattatcacaagcaatctttcccgcgtgaattatcacaggatttatttagttgtactcctttcaagaaatcctgatattgtaaccttaagaacgaaactgcctgataatgaagtgaacaggcacgagctcttgtgattgttccttgtatgcattccgcgcccgggtcaggatttggaaaagtggtttcttctggccgacaatgtatgaagattcaaaagcattcgttagaagatgcacaagctggcagaggcaaggaggaattactgctcgtgatgcaatgcccctcacatacaacttgcaagtcgagatattcgatgtttggggtatagactttatgggacctttccctaagtcccgcaactgcgagtatattctagtggcagtcgactatgtctccaagtgggttgaggctatgccatgcagcaccgcggatgcgaagcatgccaagaagatgttcatagaaatcatcctcccaagatttggtacccctaggatggtcataagtgacggaggttctcacttcatcgacaaaaccttccgagacctcctacaagacatgggagccaaacacaatgtggccactccttactatccacagaccagcggtcaagcagaaacatcaaacaaacaaatgaagaatattgtgcagaagacggtcaacaaaatgggaacatggtgaaaggatagattgctagacgcactgtgggaagtcatgtcgactacccgtagagctcgagcacagagcatattgggccatcagaaactagaacatgaactttgaaggagcaggagaatgaagaaaaatgaaaattgctgaacttgaagaatggagagagaaggcttaccacaacgcaaagatatataaagaaaggacgaagcgctggcatgataaaaggataaacattaagaaattcaagccaggagacaaagtactgatgttcaattccagggttatgcttttcggccacggaaaattgcgcagcaaatgggaaggaccgttcgacgtcatcgacacctcttcacatggggcaatcacactccgtgatgattcaggtaatatattcaaggtaaacggtcaacgcttaaaaattttccttgtgccaaatgaaactttagatgaagaagtggatgttattgaattaatcgattatgagccataatggtctcatctattccatgctaaaaaccatgcaaagttgtcatttttgtgcttagcttaggaattagtgggcctaggaaaaaattggcggccagccggacccgccagggttcagccgaaccaaggcggcgcccgatcagtcccaattttgaatggcagtctcccccgctactgcttgatctgtttagatgcgagtttagagatagaacgatcggatcacgcccctgagctagttcttctccttcttcctcctttgcaaaagcctctccattcaattccccagtcattctcaaaacctttgatccaaacccttgtgccatccatggcttgcaaatctctcatgccttacattggttcatcctcaaacaacacctacaaccttgaaggagaacttacaccggggaatcaactcattccggtggaagaatacacaatggaaggggtaaacgttgtatgggctcaaccccttgtagttgttccaggttcccctgcgattttggagccaatcggttaggtccctggtggggttcggccgaacccttttcggccccattcggtcccccgttcggtagcgcgatccctctcccctcgccatgtcacgaggaccaaagtccgaggggattcgcctgcgcgacgaccgacaatgggcgagctcggtctcttgaaggcgcgtcgcctttttcaagatgatgagaaggccgctccgcttcccgccgagcgatatgtgggcaccctgttcaaaaaagcaggagatgaggtggtccacaagtacaccatgcccaccgctactccaaccactccaaagaaggaacggttctgcattcagggagtgcgaactcccgacgatgggtatggtaaaggcttgctccggcctttgacagcatcggagaaggagggggcagcggaatcccgtagccctccacttatgaaggtgaagcgtcatttgacgcccccctccaattgtaaggggggccggccaatttcaagaggaagaagtaaagtcgccggagccctcggttcataagctagcatcataagtgaagaagctccacaaggagaatattgagtttagggaccgcaacgcggagctacgggtagaactcgctgagcttaggaataatgttgatacccttagtcgcggtttgtgcgctaaaatcaagcatccatttgtagaaatgggtaaggagaatagagattatgcaaaatagatgtctcctctcccatgaataaagtagtaggtgcttagttttttttttccaatcatgtaagcacttgctataaataatgtggctcattggtgttaaccccaatgtttgccaaagtttttttttttgttttaggtttaataaagttcaggtgttgaataagtgtgggggagatatcccagcttctgacgtgcacatactctgaaaactgatgaaaggtctgaacacctggaagcactatacactgcagaaagttgctgagggatcaggcgccagagtggttcggccgaaccaaagctggccccaatccttctcaattttcacaggtaagcaggcgagcacgtccattatttgtatatctccaccatggtatagtactagagttgaaaattcaggaaacaattggttcaagcataagtataagataaaatttccaactaatgaaatttttcatatggttgatcttgtatattctttattctcagctgaacctgtgcttatgaacaaccatccatgtttagggacccttatacatctaagtatttgctatatgagagatgattaaagatgaaaggaattcttgcaacttttgttatgactcttgggaatttgttttcaaaataaaattgttttaaaagctcattcctccaattgacttcattctttattcctaccaaggtcgtatgcaagtatatctttgataaaccttattatgcgtatgactgcttgacattatgttaagctttaacaaatttgtgtgactcgtgctagatatctttcatactctcatgatcaaggggtcatttccatttccacatatataattaagctaagattttacactggaagttggcttcccactaaaattccattcaaataaactcctacattagactatgctttcttctgttagaagaaaaaaaaaggtcttagcaaaaaaaaatgagaaaaggagggaaaggcatggctatggaaaagaaaaaaaaaagaggaaataaagcttgctctcaaaacattgagcatgatgaaaagaaaatatagccatgccccttccatattcatgccaagaaaacaaaatggagagaaagtacatgaaaaaaggagaatcatttctttattccactattccacaaaatattttacttttctattttctaccacaaataaagacccttgatctaggagtatggctgatgatcttcttgagtccgtatttttggctttgcaatatatatgatgcaggtatgtcacagtttgtccctacggaactccacatatcagccttagagtagggataaattctagcacattttgtcttggtgaggatccaaaaataaaatattcatccttgagaaataagagagaaagtcaatatgaggaaaagagctggtttgcgaaaattcataaaaatctcatgagtctgacacagaagtaagaaggactggaatcgaggacgttccgtttatcaattactcaagatggtaagatagacactaataaagttcacaggtgcaggtatggttatgaatgatttatatgccttatttatatcttgaagaaattcattctacactaacttttactcagggacgagcaaagagctaagtgtggggggttttgttggcggctgttaaataccaattctatactgccaacatctgcataaatttcagataataaaacatccaacatagtgataggtgcttaatctcacatattctacaagtgttggtgtatatttgtatgcaggtgataaacactgaggttgggaggaaatctagactaaagtgaggacaaatatgtatccatacaaggatgggttgtgaacttcatcaaaatactagaaaatcagcctaaaacactgaggattggataggggaggaccaggataggagccaggccaaaggccaggctaggggggcccagcccaggttcggccgaacccccactgttgatcccaggttttggcgtggacgctccagatcactccttgatggcggttgcggggtagttcggacatttcctcttcgctaaccgtcatacctacctctatataaagacctcactttactcacttcaatgcacacttccaagcttgagatgaattataagaggctctgttgtactatattgtatactagaataggaagagagtagagtagaagaagtcggaagaattctggagttgtcgttaatcttctctcatttctgttattctgtttattactctgaattcaatataatattcttccttagtaatttagatttgtctagtgagagttatctcttggttagttcctaaatagcatacgggatcattgttcactatagtccatttatttatagtggttgctttagtgtggttgccagtgcctgaagtatcgtgttaggatgaaccggagaaagatctgaccaaacttggaatactctataggggaagtgctacagcggtatatctatgcgcttgtggatttcatctgtgatcgtaagaaataccaacacaaccgaggcgaacctgatctccaaatttagcccctcgcacatctctctgaattcattagagttgaactacttgccattgtcggtgatgaactctttcagcacactaaaccgacagacaatggtttttcgcaagaatttctggactgctgccgaagtgatagtatggagtggttcagcttctaaccaccgagagaagtactcaatagcaacaatggcgaaccggtagccatttcgcgccatagggaacgggccaatgatgtcatgcccccaccttgcaaacgactagacaggtgcaatgggccataattcatactgaggggctgactggcttcagccatgtcgctgacagctttcgcaccttttgatctggtcaatgcatactttgagtacggttgaccaatatacacttgccgaaactcttcggatgctacggtccttgctgcctgatgggctccacacaatccttggtggatttccttcaccacttcttcgcctccggctattgatatgcaccgaagcaaatgttcactgctaaaaaaaggagacaacactatatataggtgttagaatagctaaaactgacatttataatgcttttctcacccacacgggctcccgcgggggtgccagcggcaaaagctaggacattgctattcaaataggtgtcgattcctattaaaaaatggcactttcatacgaggtagaagtgtcggttttcaatacaaccaacacctatctcccgtcctctcatccttatctcctcggtctcttcgcttccttcttattctctttatgcttccttcttatcctttctcatccaattcgtgctcctctccctttccttcctcttccccaagccaccacctcccttacctctcctcccttctcatcttgtctcctccccaaataaccagccgtgactcaccatgccaccacctcccctctgccttcagggctaacggagtcagaaggggtagcgcggcactgatggggccgagccagcgtaggggcacctcgtgacgtcatcatcctcattgggtgggggagcggggggagtgccggcgcttgtcactgtcaatcacgcctcccgcaccacggagacattgccatcctcgcttctctaccactgccgccgtgctcttggaaggagaagcgtggcaccgacaaggttggtccgacgcaggggcaccctgcggcgccgtcgacctcatcgggtaggggagcgggaggaatgctggcgtcggtcaacgtcaaccacgtctcctgcgccacggcgccatcgccgtcctcgcccccatgccgccgctgctcattgagctgctcctgctcctctatgacgttgccacggtggaccgtctggggctcctcctcctcctcaaacttgttgattctctgatgtgaatgtttgattctcttatgtatgaacttgttcctcttatttgtactagtctcttttttgttagattttttgttttttttttgtctttgaagcatcgctgggctcgaattgagctgagctgttcttaaaccggcacctgcgagtcctcataagtgttacctctgttgtgtcggttcggaaatccagcacctttagcgcttcccaaccggcaccaatgagcaaagcccgcgacgctgtcgacctcatagggtaggggagcgaggggagtgccggcgcttgtcaccgtcaatcacacctcctgcaccacggcgtcgaggttgtcgtcctcgctcctctcaccatacgccgtcgccgctgtgccctttcaaggagaagtgtggcaccgacggtgttgaactagcgcaggggcacaggggtaccctggggcgcctttgtaacagtcctccctccagaaccgcatagccaaccaattcgacgggctggcccacttacacataccactccacttacacttttgttctcgcttcgtgtagaagggttaacccgggagtgacatggttggagggaagaggccttataagttggttccacttgtgctaaactagaggatctgacgtcctcgtcggtccaacttacctagccacttaggcatataggcaaatgtctaggaacataccccctcttagcacacactgacccgtacatgcaaccgcgagggtcggctctgataccatttgtaacagccctccctccagaaccgtgtagccagtctatccgacgggctggcccacttacagatacctctccacttacaatttcatcctcgcttcgtataaaagggttaactcggaagtgacatggttggagggaagatgccttataagttggttccaccagtgctagcaaggtggtacgaaacttgcgcacacagctcacatgggccacacgggcctcatcctaattgcgccaggatgtcacagccttccacctcgtcaagtgagggagcgggaggagtgctagcgcctgtcaacgtcaaccatgcctcctatgccatggcattgtcattgtcctcgccccctagccgccgctgctccttgagctgctcctgctcctctgtgatgttgccgcggtgttaacgccaaaattttgtaagctccgaagtcatcatcagcttagaatcaatattggcttcaacatcttcgaatcggctgatgagaattatcaagtcaccaataatcggatccttagtagatttggttaaggaaattaaactattaaaggaagtttattcagaagtgactgagttcaaggaggatgtggcttggcagtttatctattaattaggaagagtttgttagtttccttttatctctctagaaaagtgtgtttagtgtccgataaggattttatattttccttttatgattatgaaagtttctttcttgtccaataaggactagtatctatccatgggtataaatatgtacacccgaggtcattgtaaactatcacagagatctatacaattactcttggtgtatcgccaccctctttcccgaggttttatttatcatccggcagaacatggcacctaacacggggctgcattgactttcgatctccggcgaaggggtaagtcctacgtaccgccggcattggcaattgtatcggttacattggtgtgcttcaaagctgcatcgcttcaatctcttggatcgctctggttcggtttatatatttgcctacctatttgtcatatatcttagttaatatagcttagcaccttaatttgatcatatcggctgatattcattttagggtttatgctagtatcagctaaattatctgattagattagctaaggtatccaccatcctgaaaatttgtcgaagacttgatttttagactttttgcttcttagcatactttgtgatgcatcatccttagtcgtgcttaaatcataaaggctaacctgtctttgattataataagggtttcatcgggatttcagctgatgagttatttggacgttgaatcggcttataaaaattgaatacaagttggttttagccaattgcaacaaatgcttcattaattatctaatcttgtgtattctatgacaatagacctcccgctgatgtatactttaaccatcagatcacttattttatcatattattgttagttgattggtttcaactagatcatattattgttttattacattatcatcagtcgattgtctttatatcattatccacattggatatataatcgattgctcaaaaccctatcggcatcggctggtatcggcatcggctggaacttctccatcggcttgtcagctgatcggctatttgatctgttgtgtacacatatcttttctcaaaatgactggcacgcccgcatctcatcaatttttggaccaacactaaagctaagtagatctcctaggtcgttgctgttgtcgatctacttcgcgccaacacagatctagcattttcggctgagcgtggatttttcgtcaacacgcggcggactacccggggctcctcctcctcaaacatgttgattctctgatgtgaatatttgtttttttataaacttgttgtttctctgatgtgtactagttttttttgttagattttttgttttgtttttgtttttttttttgtctttgaggcatcggctgggcttgaattgagccaagctgtttttttatttcaatccatatgcctcacatgtgccggttcttaaaccggcatttttagtcctcctcatcagtgtcgcctgtggtgccagatcggaaatccggcacctatggggtttctcaaccggcaccaatgacttttttagtagtgattattgttttattattttattaatatattaatattgacaagagaatatgcttcaaaggaattagttaactaataactatattcattcggaggttgtcgacgaggatcagttttagcaaatccagctgtgtagcgaatacacagggaccccatatattcctcggaatggtagtgaactagtgatgctcatgtggtgctcagaggtagttgtacaaaaaattatatatcagtgcgtcacctttatttaatccctttagtttgtttgtattacgtggctagcaaaagcaattgtatacctagtacatccttgcatagaaatagagtaaactattaaaaatggttgatcatgatgcacttttggcatggtagcacatttggctaatgaaatgcaaagcacatgcaatataatagtaacatatatactaatgaaatggccagatcttataaatcctgggtgggtacaagcattgttaaacccaccaaggcaccaatgtatatcttgtttgctgttgttctagcatttgtagattccaaacttgatagagatatatatcggtcaggtgtacgcgcgtatagtccatcagtggcaacagtaacgccgtcgacttcaaccatcgcctggtacgtctcgttgtcgtgctgcttgtaattcatctagtttgtctacgttaaactttcttcctacttaactaggccaaatatacggtggaaccgtggaaactcaatctaacaaaaatctcatataaaccacacaaaagaagtctcacatgtagtcatgtagtactgtgtagataagatggatatcaatggtcatgtggaaactagaaaatcttatccaaattggttaagtttttctgagactaaaactaacatatctttcaagtactacctccgttttttaatagataacgccgttgctttttttttttttgtctttgaagcatccgctgagctgggctcgaactagtgatgctcatgtggtgctcagaggtagtagctgtacaaaaaattatatatcagtgcgtcacctttaatccctttagtttgtttgtattacgtggctagcacaagcaattgtatacc

SEQ ID NO: 24379 - DNA, 9749 bp, Oryza sativa
attataatttattttgttatgagttgttttatcactcatggtactttaagtgtgatttatatcttatacatttgcataaaatttttgaataagacgaatggtcaaacatgtgagaaaaagtcaacggcgtcatctattaaaaaacggagggagtagaaaatagtattggcgatttgtttgaaaattaaaattctcatttttttgtctcgccaatgaagttgaatttggacaagactttttatactgctattgaacgtcatcttatctacatgtgggatttttttccatgtagatttagataacctttactccctccgtcccaaaaaaagtcaaactgcgggtttacgtgccaacgtttgaatgtccgtcttatatgaaatttttttataattagtattttcattgttgttagatgataaaacatgatgaatactttatgcgtgacttctctttttaatttttttcataattttttcaaataagacggatggtcaaacattggacacggaaatcagggttcgtctttttttgggacggagggagtatgtcgtggtttattcgagttttcatggtttccacagtatattttcgcactcaactaacaaatgcactattagcaggggcaatgcctggatggatcattaccttcctgctcatcctacagtttatttcgtcgctccgtggattggtaatcttcagcttcgttgctcattttttcctcgtcttcttcgctggactccgccgccatcaaccaaccggcgtgcggatgttcatcctgtggggagcgaaccagtttgcccgttgggctccggtcaccgtgctgggcacgctgtcagtcggcagcacgccacagaaagagcagctggtgacgctctgggtggcgttcatgctgctgcacgccggcatgcctgacaacttcaccgcctactccttggaggacaccgttctctcgaggcggcagcaggctggcgtgtggtatcagctgcttggatcggcgtcaccattccctttcctgctgaagaacatctccttcatcatcagcaatggcggcgacgccatgctcggggtctcctcgctcgtcttgttgatggccatcggcaagtattgggagggagcattccaagcgctgatgcagggcaacctgaagagcatgcaaagctcgagaaagaagatgaagatgaagaacaacagtacaaaatcagtacgaaacagcctccagatcgctaggcgtggaggcagggagccgaatgatgagcaaatccttctggctgctcatgacatgctagacatcaccaaggacgccttcatcgattttctggaccaaaataatgcggatgaacaagaagcactctctgctacatgggatgagaagctgtacagggtggtcaacatggagctctccctcatgtacgacctcatctacaccaaggcggccgtggtgcactcatggaaaggctacatcctccgtttcgcctctccgatcgccgcgacggcggcattcgtgctgttttggctccacagcaaggaaggtcaggcgacggccgacgtcgtgatcacctatgtcctgctggccggcatggtcgtcctggacatcaaatggcttctccgagcggtggcgtcgacatggttctactcgttccttgatgagaggccacgatcgtggcttcatcatgcacttctgtgctcagggaaatggcgactgatccgtcgcctcatcgtgtctgatctgaatctgtttcggatccttgacaataataagaagccaactagatacaggatgtggtcacaaaccattggacagtacaacttgttgcacgagtgcactcgctacgagagcgaggcaaggaccaagaactggaagagcggcatgttcaagcggttagcaccggaggagaactggatggagtacgaataccagcgcatgaggggcaatcatattgattcaagagatttcagggacgagttgttcaactctatctggcaagtcttgaagaaacccttcccacaacgacgaccaccacgacaaataatagtgacggaggcctggaggcctgcaccggcggctcctccatttacacatgctcatcaggaagcagaccttgccctgaagttcactcctgatttacaagagaccattcttatcttgcacatcgccacggacatattcctcttctcagcggaatcagaaattgaagcatcgcccaagtccaaaaaggatgtggaggtgatcaaggcgttgtcagattacatgatgttcctcgtcgcggtgcggcccgggatgctaccgggcctcgtcctcagtagccgatatgaagctgtcagtgaggctcttgccggaatatggaaggagaaagaaggtagtgatccttccttgcgtactagctcaatgatgagagagaaacgtcttgccgagatcctgattgccaacgaagatgaggagggaaattacttccaggtggacgattcgaggccccaaagcggctttctgagtgttctttacgacacgagtaatgttctatcagagggagctatactagccatgtttctgctacctaggataagaggtcctaattttagaaagaatatcattgaaaaagttggagaacacggcgacggcgagcccccaatactaaagaaatttcaccggcagtttccggatttgatggaattcgctaagaatgtctcttttccatcaatcgcaatgacgacggatgccatcatcggggagtgggcacgtcagctgattaacgtgtccatccgatgtacaagggattctcatgccaagcagcttgcccgtggtggtgagctcacgaccgttgtgtggatccttgctgaacatgctcgcatacttcgcatcaaaacagaaaagaaaccagctagctacgacgcagtataggcattcatgcatgtctctctccctactgaactgagagataactacagagtctcagatggatatactgtttgatctctcctttgtgtatctgtgtgatccatcggcctgtagatggttgtagttaattactttgcagggttctcatttattctctagacttaactaacctgtgtaccctctaaattgtggtttcaagagggttataattaattaatatcgcgtgaaaagtctaccattcgagaagacattccctaccaacatttcatgctcacttggtcattcttgataacattcgagaagacatggagtactcaacatcatcgaaaaaagatcaacgttctacaagtgaatttgaattaaagtctaaataactgccataaacaagcatgaaatcaacgtaaacgaacgagttgatgttctcgaccaaagaccttggaataacaatgttgttctcgcttgaccattctcggacgagcgagaaggtgcggagtatacgactaagtttactgacctgccgtaatcgagaatttgggttgaagtcaagaattttcatctcggtaggttcaccatctcttcattccataattttcgtcgaactccaccaatcgttctcgagtaattgagtagtcgtccaatcgttctcgagtaatcgagtaattgtagaatctgcgacaaagccctgaaatatgactttcttgaaatcaatactcataacagattgttagatacaaatagatctccgagcgaacgctcaagggtaacactgtaacatacccaaattctagaccttaaaaatttcctatcaaaatagttggaagctaacttttccatttttgagagctaaaaatttccatttttaacctaagtgtggtcaatctaacttgaacctaagtacaatttgagaataaattaaaactttttcatttataacctaggacataaatgcaaacacgagtaaaagcatgcatacttgcataaaacatgttttgacttgtccatcatgtgcatttgaattttttatttgcatttcataataggtctcatgaatattaactaagatctagataaacaactaaaccattagggcctagtgttagctagaggaagttaaaattgtaggatcgaacacaagaaaccaagcctacaagagggggggtgaatggtagggaaaaccaaaaacccaaaaacttttaacggaaataaaagttaccctcgaatcgatggaaatctcgacgtaatcctgtcgccgccgccggtcggaccgctcgcacgccgccagtcgaaccgcttgcacgccgccggtcgaaccgctgtcttgtcgcctgttgaaccgttggtatgtcactggtagaccgccgaacccgatgaaacacaaatcgaagaactctcaaagtagatgacaactttattacttctctctgtgtttacaaagtgcaacaacagcacttcttacaaaaatctcgactaaactcgaaaccctaagtaaactatcaactccacgctctgaaaagcgataccgaaaagcgataccaggaatcctcacgctccccctctatttatacatgaaaaaccctcctaatcaaagtagacgtaggactcctattcacagtaggactcaatctctcaatttcctttttctccgaaaccacagccgcaccggccatggaaaatcctgctccggatcggattcctttaccgatccttcgccagctcgcactcggtctcctcgcgccgcacggcctgggccggctccaacaagccacagccaccgagccgctctcctgctgctcggccaaccaatcatgcacacatacatgcttcacatgcatgtatcgatcacacacatacatgtacagcaccgtacatgcatgcatacctgcacgtataccacacatatatgcatgctgtacacaagcacgcatacacatatgcacgctacagtacaccaccgtactgtagcaccatacataaacctcttccaattcccttcgcgaacaccgacacttgcacgcacatctcgtgaagcccgttgcgaagatctctcccacacggtgtccatccaccgtatgccatctcgtatccaacttcatcacccggtatccttgaccgtctggacctcaactcctccctgagtctcgtccagatccccaccgttgaccgaagttgacctccaagaatccagactctagtcaccttctcacgtggtatcccgaccgcaatagacctctgttcctccctgaacatagtctcagtcctcaccattgaccaaggctgacctccagtcacctgcacacaatcagacgaaacaaccgtttctgggcacagatatcacaacctgacccacattagtcacacgcattcacaccaacattcacacaaactctcaaaccaattctttaactaaatcatttgcatagccaattgttcatcacaactattaatcatgacaatgatttcacaatctcccccttgatgaacacattggcaacatcaccaaaatgcaaatttgtgtttttgaaaaataaaaacaaaaatcacaaaagtgaaaaagaaaaactctccccctttttaaaagaaagaatttctcccatcaatttgcgatcaaagcacaaaattgactatttttaaaatcgaaacaattcaattctcccccttacaagaagcatgcattttgtatatttctcctcctttgacaatgatttcatcaagaattcaaaagagaaataataacaataaagcacaaatgcaattatgtcatgattgccacttggaataaccattttttattttatattttctcttttttttcgagagctttgaaatgtaccaaaagcaattcaagatcatgttttgcaagatatgggagataaattcatcaactagttagtaagcatgcaccatagtataaacatgaatcaaagatattacaattaagcttaaatcagcaataatgattcatgatttcaaatgatttataatgcaatatattcacaagcacatagattgaaaaataaacactatacatatatacctattgcatttatcactctttctcaaattagctttagcacaaagcaaccaagagaatttttactttttcttgagcctttttgctcataattttctcttttattccgggtacgtccctgtcgtcaagactgtttccagggattcggcacccattattttgctcacatcgaatacgtccttgtcgtcaagactgtttccaaggattcggtattcattgttttcatattttttattctcttttcacaatgagcatttaaagctatttgagtaataacaattcaataatgcatatatataaagcatttataaatcaaaccatatgctagcatcaatattgcatattttcgtaattcaagtaaaagatttagtgtcatgcatcatctcacttaaaagcaatatctaagcttcatataaagattaaaatgcatacaagctaacatagcaacaaatagacctcaattattttgctagcatgcacaagaatatactagaggtataaaacaaagctcttctttttcttatttttattaattttcagaattagagcaaatgcataaaaataaacatgaatgcatgaaaaagcacaaactccccctcaaattaacctccaattctccccgaagaaaaatcaagaagaaattaaagatttcgagaaagacatccaattgccaatgatatcaccaaggttatcatgaatcgacatatatccacttgtattaagaaaaactactacctcaaacactagcatatgaaaagctaataatcgagagagtagaaccaaaaaatatgtcaatccaaaagtaaattgatgttaccatgaaaagcaatctcaacgttgaatgcacatggggagtatgccaccaaaatacctacgaacgaagatgtcgaggcctccgtgttggggttagaaataagaaattttggaatccaacactgagtcacacgaccactagaaccagtaggtacatatgcactatatgcactaacaaaatcagaaccagacttacctgaaaacttaccttgtcgcttcacaaaagtccgatttgaattacgtgcaaaattgccccggggccggtctgaccgccgctgtccctgcggtctaaccgggcctggcagccggtttagctgcggtctaaccgtgctccttgaacaaaaacccgatttttgccaccgttgtttcgcaaaagcaatttctctttcctttttctgtttgcgggcaagtcaaaaacaaaaaccaaccaaatgtccatctttttcacaaaaagagcaagtatacttctcacgacaagtttgtgaagtagatgattttgaaattgatggttttgcatcaacagaaggttttgcattcacaccatttgatttcgaagaagatgcattcaaagaagacatgatgccaacagatttaaacacagtgttcttaggctcagtttcaatcaaaatttcacctctcctagaagcacccaaaacagtaggaggatgtctagtatgatgagcataagaatcaaaacctaaaccacgattgtgtgtgctaattttagattgatcaagaatcatgttgagagtctttttaccatcggaaaatctttgcaaagaacttttcaaataagaaacctcctgagtaagaatagcacaatttttgcaagcatccaaaagatctttttattttctacaagttgaacaagaaaacacctcatcttgtttaacaatttcttccatgtgtttaacacgctctaaagcatctttcaacttcaactcattcaaaacacactttgaacaatcttgagaaatcaaaacaccattgttttgtgttgccttatttacacatgaagcattgactaaagaacttgcacaaaaagcaactttgtattttttcaaaacattctttgtcaaaatcaactcatcaacaacacgagcatgtaaagcaaatccaagagcaaaagaagactccaactttttagatttttcaatctcaaattccaatttcttgcaattaacagaattgacatctcgcaaagcattaatttcagaaaataaaacttcacaagattgacaattatcatcattatgaatcaaagattttaatctagcaatttcagcatttagaatatcaatagtgtgatccttctcatcaagctcaatagaacatgtttgaagtttcttagcaaacttataagcagcatattctaattgatcataactaagcttttcttcattatcatcatcagattcatcaacatcagaacttgcattacgagcaataaaagctagatcaacaacttgcttacctttgccctcatcttcatcttcagatccatcaataacttttatgagttcctgaactaaccactgcatacaatgcttcttcttctccttctccttcatgttcttcttcttgttcacgtcatcctctttgactcttccatcatcttccttctttcctctcccaagcttaggacaatgcgaacgaagatgatcaagtgctccacactcaaaacaacgattcagttctcctcttttcctgttcctaacatttttcatagctcgagaaaatctgttagatagcaaaaccaaatcctcctcctcgaactgttcgagttgatcatcggatatggcattaaataaagcaagaacagaaggcttcgatgaagaagcaccaacatccaaaaaagttgaagacgaaaccaaagcactagacttagaatcacctttacgagaaagaatattcatctcatgagttttcagttttgtgtaaagcgaatccaaagtcaaagaagacatgttcacagactcctgaatagatgtaactttcatctcccaaatagacatatcgagaccattcaaaaagtgacgagaaatctcagattgtggataatttgcatcataagaagaatcaacagatctaagatcactaaaaattttattaaaccgagaaagataatcatccaaagcttcttcaggtttcatctcaaatttaatatattttgaaaagatcacgatgaagttctttaatgttatttgttccctgatgaaaattactcaaagcaatccaaatctcatgagcagtttgaagatgagcaacatgatcataatcagaacgagaaataccactcaaaagaattttgcgagctttgcaattttgttcaaaagcagttttttcagcagcagtattaatagtttcaggaatcacataagcatgagaaacttttctccaaatatcataatcttcagccataatgtaagattgcatcctactataccaatgagaaaaatccgttccatcgaaaacatgaggcttagttgaaaacctagcgggagtagccatggcaaaaactctagatcggttaaaatccaaagaagaaaacaaggctctgataccacttttaggatcgaacacaagaaaccaagcctacaagaggggggtgaatggtagggaaaacaaaaaacccaaaaacctttaacggaaataaaagttaccctcaaatcgatggaaatctcgacgtaatcctgtcgccgccgccggtcggaccgctcgcacgccgccagtcgaaccgcttgcacgccgccggtcgaaccgctgtcttgtcgcctgttgaaccgttggtatgtcactggtagaccgccgaacccgatgaaacacaaatcgaagaactctcaaagtagatgacaactttattgcttatctctgtgtttacaaagtgcaacaacagcactccttacaaaaatctcgactaaactcgaaaccctaactaaactatcaactccacgctctgaaaagcgataccgaaaagcgataccaggaatcctcacgctcccctctatttat

SEQ ID NO: 24380 - DNA, 24594 bp, Oryza sativa
catacatgcttcacatgcatgtatcgatcacacacatacatgtacagcaccgtacatgcatgcatacctgcacgtataccacacatatatgcatgctgtacacaagcacgcatacacatatgcacgctacagtacaccaccgtactgtagcaccatacataaacctcttccaattcccttcgcgaacaccgacgcttgcacgcacacctcgtgaagcccgttgcgaagatctctcccacacggtgtccatccaccgtatgccatttcgtatccaacttcgtcacccggtatccttgaccgtctggacctcaactcctccctgagtctcgtcccgatccccaccgttgaccgaagttgaccttcaagaatccagactctagtcaccttctcacgtggtatcccgaccgcaatagacctctgttcctccctgaacatagtcccggtcctcaccattgaccaaggctgatctcaagtcacctgcacacaatcagacaaaacaaccgtttctggacacagatatcacaacctgacccacattagtcacacgtactcacaccaacattcacacaaactctcaaaccaattctttaactaaatcatttgcatagccaattgttcatcacaaatattaatcatgataatgatttcacaaaaatagaaaccatacaccttgaaatatatcaacatggctaatgtcaagcctcacaaaactaatttggacatccatctgaagacatgtcatgaacatgaaagtgaacaaataaattatatcatatagggtatattctatcttaatcatctctataagcattctcttaatttaatgctaaagtaaatttatgcataaataggtaaggagcttatgacatgtgtaaggtaaattgtaattctaacatatcaatatcacctcaggttaataagagtccaaatataacttttataaacatttacatgcatttaggaaagggaaacacatataagacataagtcttgcgaattatctaaaataattcgtgcaagataaaatcatgagaaaattcatgtaggctctactcaacacatacaactcactgtaattttggtataatttaataactaaatttggtacctcaaataaatcagtcaaactaataaaaactagattacctgtagttcttaatcggctaaaaccatactttgtctaaaattgcatttaactgcataaaagtgtataagtaaaataatttattaaaatactaggtaatttatcatgaataaaaataatttttccagaatttatcttctctgtttaggtctcctaaaaattcgaaatattttccaaagaacccatattcctctaatttctgtgagtaatctatccataatttttgagtgcaactaaagaatacggaatctaggtatcttcatataccttcagaaaaatccacactaaattattctacccacaaattaaataattgaattactaaagtgggagagagaaataatcctgaaaatcattcaaacgttttcttcacccacgtttctgcccaaccctctcaccctagcttagtttgccacgacctggacccacttggcagccactctggctcgtcctcaccctgtgcaaatcttccagccgaccagagacagccgagagagagagattggtgccggctgtgtacgacgcgtagccacaacgtgtcgacgccatcaaactcctattctagccttctcctcctcccagctgcatctccacacatcattctccacctctaagccgaagaaaccgagggaggaggctctcaacttctccgtcgccctcatccttgccgccggccgcgaagaagacgactattgtactctactctcctcaccatgccgaggatttatccttttaatttcatcctctatcgtgcagcggatcgacgggaacgccgtcgtgcccccggcactccggagcgcgctccaagcgccgccgcagccgacatcgtcgtcgttccgaccactgtagaccaaaccaagccgagccgtcgcgccaacgtcttctccttgaagtcttcctcaaaaaccctcaaaaatcctaggcaatggcgcagcaagtgcggagatcggctaccgtcttcttcacctccggtcgccgtcgccattgtcgattccgcctcctccggtgagccattgtccgattcttcgcgtatacaccatccctgggacctcactaaccccatgaaaacacatgcatgtcaattcgatgagtggatcgagccgttgccgtcttcccggagctctacaccatcgccggaccatcttcttcaccgctgccgctgtccagactttcccgcgcctcgttcaaggttcggtgagcacccttgagcccataggattgcattcatgcatttcattcacttagaatcgagcaccaactcaacatgcagtagcagcctaagcacagccgccgctcggactcgccgccggcgtcactccgatgtccactgaccgagaaaagtagaggaatggaatcggaatagcatgatcttcattttgtcttttggtcgcaccctcaaacgagccaccgtttgccgctggcaagcttgagatcgagctcagccatggcttgatctgcttcagctcgaacgagggacctcctcacgagaatttagattaatatagggtcctttctgcaaaagctcaagacacacagaacagtcataggactgcggtttgatttcctgaaatcctaggggccttttcgcatattggcctgagaccgacaggtggaccccatgagtttaaaatctgaaaatgtaaaagataatactaaaagcctttactttttaacagcaaaacacctaaacttgtaaaatccatataaaatcaaatataacttattttgagatgattcaaatttctgtaggttcacaaaactatgaactttaatgtggtaacattaagcttggcaccctcagcacagaccttgtctctaaaatgggtctaagataaatcatacataaagcatacacaaacttataaaatgcatataaagtacatctcaactcattttggagcaaactcagtttctacagatccaccaacttatgttctcctataaagcaaaatgaaatagtatacatactatacatcaaatgcctctaaaactattacctttaaatgactagttttagatgagctgaattttagaagttcatataaaattcatcttagatcctttttgagtaaacccaagttctgtagaatcaccaaaacatatacttccaagttataaaataaaattatatacttactgtatgataaaagcctctaaatacttatgtaagtaataaccatcatagagcaaccttaaattgtaaaatttgtagaaaattcatctttagtctaaatgaagtgaaccaaatatctatagaaccagcaaacagtgggcttcaacatagtaaaataaaatatggaaccttctgtacaggttatagctctaaagtttaaatttataggataggtgctaatcacatagtatcgattgagcaatatgtatatatataaatgtatatagaaatacgctctagctataatgaaacccaaataaaacttgttagaccagtgaatgcatagttccatcctcatccaccaaaacttaaggcacttatcttatataataatttctaggttgatataataaattgctagcatggactagagctcccctagtttataaaatatgaaccatgataataaagaccttaagcctatgaactaaggttagattagttaactaaaatactcattttatacatcactagctagactagccaccaacccgtgcaacgcacggcgtaaatttgttaatacctttcataaatattttttcccatgctgaatatgtggtatttctttataatttcttgattccaaattttatttttgtaacctgctaattattaatttcagtattaaattaattacataatggatagccactatggatacaaagttcatgtttattagttcctatcagttacgaatttaggattactgaatttttgaaaaacaaaaaaaattaagtttaccaaaatgaaataaccccattgtatatttaatggtatgtttcctttaacacaaaattgttttcatatagtattgttaacattagtaataatcacattttaatcaagcttatcactcagttttgattacagaaagaatttcaaatttgattgctaaactatattgaaacaacgaatataaattaaaacatatgttgttcaactcaatttggacaaacaatgcagcaaattagtgttgtaagatggtacagaacctgtaatttaacttaaaatataacataaaggatcaaaatccaacaatttaaatatccttaattagacaccaaacactacaccgggattagctcgagtatacaaatcaagagtagttaggtgaaagccatatcgatcaatatttcacttagatgatgtcatacgttttagagcatatacggatttatcagagtatataaattgatagaatacttacctgaatattgtagatgaggggaccaaagtgcaactttccaagcacaagtgaaattaatgaaagcaaacttgttgatttgtagatcaacatcttaatacctaatatttacatactgtcatatggcaagcatgtaaagagaactgaattggaaaatataagttcaaatatttttttcatccagaaaatagcaaaacgaagctcaccagttgctgcattcatgctaccggccgcattcgtgtaccttgtctcatttttgctttcgaccaagatttgactacctgaatacttgtgttaaaaatgactcattcaacaggcaaaagatcaggaacataatttattatttcaatcaaaatagaaatacctgagttgattgtgtatgcaactaacacaacgaatcttcctagatgcaagcgaacttgtagatttttggatcaacatctcaacaccagaaattcatcggatcaaatgatggcatagttgatcagtcctgctcgatctagttcaggtgagaaataggtcaaaaaaaaaaaccatggattaaggagttcaaaccaaatcttgattgagagaaaaaaaaaagcacggggtaatggagtttagcatcgatctatctgactacagaaagcatcaatctactgcaacatcaccttgtttcataaaacctgtgtaataaattactgccgttgtttcctcaatattaattttacctatcatctatattaatttcactataatgaattgaggatcaacataaatattcggaaacaacaggaaagagccataatactctgaaacaacggcagtactcatctatattaatttcacttgtgcttggaaagtggcactttggtcccctcatctacaatattcaggtaagaattctatcgatttatatactctgactaatccatatatgctctaaaacgaagtagatggcttataaatttcttgatcgattaagagtctgaatatttcttttgatttgcctgctttaacctggagaaagaagcaccgaaataacctggttattttagcgcaaaactatacaaaacttgaatttaaacaacagacgaactaactttgttgtttcgcattccagccctgcagaatcgggcagagtcaacgtgaaaagacaacaacaacattgtttgattagcgcctcggccatggctgatgtctgtagattctgacggaaggttggttagagatttgtattacagcatctgatctactccctccgtttcacaatgtaagtcattctagcatttcccacatttatattggtgttaatgaatctagacatatatatctatttagattcattaatatcaatatgaatgtgaaaaatgctagaatgacttatattgtggaacggagggagtacaaaactatcgatacaatactgcattgggttgcaccttgatgtgcagagcattaccgtaccacatttgattgatttgaaggaaattacggaagtataaagaacatgtaaacagagcagataattacaggattagatcgatttgtagaccagataattacagcaaaaagatgaggaccagcagtacctatcagtgaaatcattgccgtataaccagcagcatgaacatgcatctcttgatggggctagggagtaagggcctagggcacaccatgaagaacgacaggatcatctgttttttcgctagggaatttggagataggatcggctggaggtgaaaatacggtgaacgcaacacacgttagatggtttttgaaaggtggcccacaatattaggtggaattggattaaaatctacgtacggatgtgatattgcaatctactaattaacggctagatctttttaattaatgtgggagctcgtagaaagtgcccgattagtataggtatagaggtatagatagatacatagatgatgagagggagaaattggaggccagctgggcctcctttcctggtgctcattcgtcctcccccttgtcaggcatctccgccggcggatctccgcgcatctgcctcttccactcaaggaaccaacccatccagcgccgtcgcagcctgcacgcctcccgccttccctagcacattaccaaagatacaataaactaacctaaaagcatagcatgcacgtatcatgaagcgagtcggatagacaaagaaatgagaaatcgaccgaccaattacgaattttgcaggtgactgcagaatagaaaaagggacgttttttttttcttctgctaccaggcaaccgactgggagttctctctgaacttgtacaagctaaacacggctctatctccccaatcccaatttttgtaccgcttccaactgcttcttcttccaatgcaagtcgtttctctgttcgcatttcccttgtcttctttgtatcaagaaacataacatcgtgtatcagagcaatcgatctagaggttttctggcaagccacgctatcattcaggagcacagatcatgacagacgaggaggagcaacaacttcatgcgcataacaagttgatccaggtcaagtggagtcacaggaggagatcaaggtggcggtgcgggacctctttcactggcaaccggagatggacaaagcggtagtatactgagttaaaaacagatagtttaagtgccatgcacgggcacacggctagctagcttgcccaaaaattctgagtttaatactgcgagcagagtaactagtgtatgcaacatatgctagaggtttggtagacagattagctgtggtttgaatgtggaaaaattgtgaagagggttaaaatttatggtttaattcctgttttatcaactttgaccgattcaatcgacgtatcaaatgagttgacaaaattggcaaaaatttagtttttttagaactaggaaggtagcctgcgcatatgcgtgggtacgtgcgtaaaattttattacgaatgtccatgtgtggatggttttctatcaaaaatattctttcactttatcataaactaaaattgaacttatttaatttgctttgaacgctggttacttgtaaaatataaattgtgaactaaaattactttaaaccgtgctgtttctaattcatgagaaaattttgtgtcgaaacaacatatgtgtgtcatatgaatgtccaaatttttttagattctgtttgaaattttaaacatatccatttcattagtcctgctaaaatgtttgaatatttctatttacaatgggtaataaacccaacaaaaataaattttaaattagataaattttgctcaattctcatttctttttatcttcatttttttggataaatccactttatgaagcatctttgaaatgctttgatctctgtaattcgggatgaaaatataagtcggttgatcctacaacctggcatgggtaaaggcataaattataaattatctcgcttcaattaagtaagaaaatttaaaatagatgtcaaagtattttcttagcaaattaccactatactggagcgtcgtgtaataattacacgtttctagactttctatgctatatgacacaaattcatgatgtactgtacaagttttaccaaaaaagtggatatagttttttaattccgctctggaattggcttatatattgctggggccacatcatggctatttcactcttaagattccttggtgcaaccaacgtggttagcacgatcagtatgttattcaactagccatgttatatatatataatttagattctataatcatcttaagattatttatttatctccaaaaatgatcatttattgataaaagcatcaatatcaaaatgtatgggtaaatagctcctatatacaagctgagacaacaaaagttgatagaaagtcgatagatgtctaacgggatataagtactgggtctagtagtttgaaaagaaattaagctgggatattttgatttttagtgagcaattttagtatttcttttatttagggtaaaatgtgctacgggacattataaaacgtgtaatttgccgggggacaccgcaagaacgcatatctgctgtgggacaccgaaaaactggtaattggctattggaggcctgcgttattattttataatatccaatggaaatgaagagagaaacaataagaaaaatatgacttttcgcctgcctacaagtctggctcacatacaactttgacgctgcaaccggacccatcaccggtgaggtggctctctagagggggcggggggtttcgaggagggcccgtgcgcctgggcttgtggctcgctgtcgttcccacactcgtcgccgctgtagcgcgaggaccatgcaggcaccgatgctctgccacacaccgcgctcagggtgagcacaacatggaccacctcctgattcatgtcgagcaaggcgccacagagcgcaggctattgttgtcagtctcgcagccgtgccacggcacgctgccataccctcaactatccatacccacatggaaggaaggagcaaaatcatactttcgcggttgtttctctcttcatttcatttggatataacaaagtaatgccacgggtatccaacagctaattaccagttttttatggtgtcccatatcagatatatgttattgcagtgtctcttagctaattatacttttttttatgttctgtagcaaattttaccttatttgagtagatgcttcaatggatggggtccataatgtaatttttttcttagcacttaaatatagtcaatatgggcattaagttattgtttttacttataaaaataatagctggctagacctactaggtcgagatttgtttgtggtcttttctttgcccataaaaataattttaattttaattatcatagagatagaaaaaaaacagagaaaaataacgcaacacaccgcacgggaacggggatggacggttgggatgtttcttttttttagaaaaaaaattgattgatctgatgacttaaaataatgtgttgatatttaagtaaaaaaccgatggttggatgttatatttttttcacagatttattaggattttttctaattcaaatgagacaagtagcagcttagcaaaacgcccatagggatggagagtaagggaagatggtttacaatgtttttgtattaaaaaaactagatacaatatcgatgtaaagtaatgtgtaagtcgatttaagtggaaaccaatggagagatgtttctctaatttaagaatctcatcgaacgatttggaaatatttataagatatttaatgaactttaacacctatttttgagatcattttccataaatataatgttatttttaatcgtgatagggataaaaaaaaacataaaggaactagaagccttcaaattgatcagtacttgcgtggtgcacagtatggagacgtgggaggttttggtttcctaatatagatctaacaatctagaataataggtctaccgatttaaatgataatcgacggttagatttctctattttattagggtgccacgtggtgacttgagaatatttatagggtgccacgtgacggtttgggagtgtacgtttgtaggatgcttaatagacttttagtatatactacctccatattttaatgtatgacgccgttaactttttgtcccatgtttgaccattcgtcttattcaaaaaattaatataattatcatttattttattgtgacttgattcatcatcaaatgttctttaagcatgacataaatattttcatatttgcataaaaattttgaataaaacgaatggtcaaacgttctgaaaaatcaacggcgtcatacattaaaatacggagggagtaatagataaatagatcaatggtaatacgtacatttggtttttttttttgctatatataaaattatgttttatatttttcttccgattatactatgtatgttttttttacttatcacacagccatttttgtccttccgatttttctttttcttccagcgaacggacagaacgtaagctttatttttttttccgaaatatacgtactgtacatatttacgatttttgtttgccgacatacttatgatttttatttgctgatggtacgtattttcctttttatactgggaaggtatatatatatacacctaattattgtaaactaatgggtccaccaatttaaataaaaatcaaatataaatgaaaatcaaatatagatatagatataaactaatggtctaaaattacatgtccaccaattaaataaaaatcgatggtgagattagatagtgccacgtggtggcataggagtgttcgtagagtgccacatggcaccttgagagcgtttaggagtgtttaatgaatctgccacgtgccacgtgttcatagatgtcgaattttttgatccacatataagttgtatgaattattctaaggccaattttataatgcacgtcagatgcaactatatatgccatgcaagaaaatccagcaacataacaaaaaaaaaattagcacgcaaaggggaacaattatattgctgagaacagatggtttgacgtttacacgttttgggaatgttacagtaatatcctttaagattgaatatagagagaatatataacactaacaatagatattatcattgcccgacaggtacaactttttttccttttgtttttgttttgtatatgtgttcaaccattagccacacaatagtaataaactcaccaccagtgttgagcttcttggcatgagactccctgttacacctgttggcagcatagaggagaaaagctgtccacaggttaagcagcacggtcactgtatctggctccatcgattgattatctccacctttccagtttattatttccctggcaaccaaccctgcataagtaaggcgaggaattgcggtgtcaaaattgctgggcaggctcttgtaaaggattttagcgagtgcgttcgtctgcctgagcccaatagatgttgagctattattatggccaccgaacagcttcatgagcaccataaagatcacattattagcctttccaccagaagaaatgagttcatcacgatgctctttgcattttttatcaaggttctcacaggtccgctggtacaaccatttttggggaaggccggcaagcatgtctgggtgagccacaaggagaacatcaaatagttggacagtgccctgatcaagccgacacgctggacttcttctgcatcgtcttcgctggacttcttttctctcatagcgaggatgaggtctgtggcaatgtgccagatgatgatgctctcgtggaagtcgacacccccagatgatgatgctctcgtggaagtcgacaccccacagttccttcagttctttattttcttcaacacgtttcttcagttcaggatacttttccatgccagttcatcccaattatacctgagcaagcccatggtgttgagatcaaaatcggagaccattctcaatgctgtgtccttcaccagctcgggaattgtgatgtcccacgaataacaaccggtgtcccccttgtcgccataccccagcttcttaaagagcctaccgagttgcttgttggttgggttcagctgtgtggtacggaagtagagcaaattgaactatcctatggtgcccgaccagtttcttgatccaccgagaaggcctcccgtcaaggctgcgacgcgcttgcgaacagccaggaccgcccgtcggagctggtgccatcttccaacgcatagagcgatatgttgaagccaactccacctcctggcgcacaagaaggaaagagtccagcttgaccccagagcgctgaggagggacgttgtttccatcaagaaggcgccacctaacaggacataggtaacggcggtgtcgactccattctggccatccttggcctcactgccgctgaaatagaacagcagaaacgaggtggcgatagcaatgggtgacaaggctcggatgcagtagccaatccaagtgtggactacagctgccttggtatagagaatatcgtacatcagggacagttccatctccattaccttatacatccgctggggctttttactgagattattgattatttccttggtggtttccgcctcagccttctcatggtggtttccgcctcagccttctcagtatcctctgggatcacggagtctactatcccacgcttacatatgtgaaacagggagtgagcacgctgcagaaggaattcatcattagtgttgttacgatcctcattgtgcaggtacccttagtaccaatggagttggttacccggtaactcctcgagagagctcccgatgctactaaatttgctgcgattgagcgcccatgtcctctcacaatactggacccactacaagaggtatgtggttttttttacattttattatgtcataatatatgaaaattatgtcaaaaattaagatttgtgacaaacagatgacgtaatttcaaacgtcaaaaagccaccgtcataaattcatcatgtgacgtttgaacattcattgtcacaagcatatgacattgatttattgtcacaaaatcctagggcttgccacgtggcagctgacatggttcaaaaaaaaacgtcacagaatcagattcggcctgctaaagcccatgtagctcatgagccacaaatatattttttctaaggttgttgctagctggccgaacatattttttgcttgttcgtttgagtgcagcctatacaaattttcagcccacatcaattcggcccatatgatttttccaacccgcacaattcagcccatatgatttttttagcccccacagtttagcccatataattttttcagcccacaaaactcaactgaaattttttcagcccatacaattcagcccaaatacaatatttcagcacatataaaatcaaattcaaatgaattaacattccacaaatgattgcaatatcacatgcatttcacattccacaagtcttaaaatgcaatatcattacatccatccaccaattcaatacatatccaaagtctcaaatttcatcttcctgctacagcgagagcaacagcagcacatctgcaatagcatcacagcagcagcagcgcaatggccaaaagcacaacagcaacagcacaacgaccagaagcacaacaacaacaacaaaataacatcccacaagcacaatggtcgcaagttcagtgtcaccttatgttcatatgtattgctgcttcagcccgttcatctgccgcatggcaacgcgcccgacggcaacatccctaaggaggcttttcaccttcttttacaaatggttttacacacaacctcaaggttatgggctaaccatcccatcacccattgacacgtactctctttgtccaaaaaaaaatcccaatcatgagtttgaatctggacatggatttggttctttttatgataggggaagtaagtaaagagtaaggaaggaacaatcacaacatgaaattcaaagccccggtagtaacctaatatgatatatcgaaagcgcaccaccaaaacaaaactcctacttacaaaattactcatgaacaatgtgtttttgcttctttttttccttatcatagtatcagttggcctaagaaacgataatttagacatcaataaattatccgatagaccatagcatatactccctcgatatttcaaattaaagcaacttacttgcctacagttatcaaatacatcagcactccatcacctaacctaacagatgctcagcaccattagacctaacaacttgtctagaatacatatgcatgcttaaaaatcatctaactactcacacagtttggttggttcgccgaatgatgtcttcctatctgcatgtcttgctctcttgttcatactcctccttccttgactgatgcatgtatccattcctcctgtcagaaaggaaaaaaaacaatcataacacaggccatgtgttaattttccttttttcaatgggcttgtcaactcgaagcttaattcctacaagcagctgatcatcttttaaatcctagtcaaatcaacaaaagaatcataagcccagcgagggaacaatagaaaccatgaaagggtgtttagtctcaccgctcaccaatttggtaggaaatattgctaaagttctaagaataagttgccctaaatcctaacaacatcttattgcatcaaaattgctggtataatgactctgtttagcaagtttgggccttctttcaaaaatctgggtattaaatctgcctgcattctgaaacaaaaacatgctggcataatacaggttaagattagtcagaacctgcagccccccctcccccaccggttgtggatcttggagttgcacgtgttgccgagattcctgagcaggtcggctcgcacgcagaagacgttgtccccgagcgaaccctcctggcaacggtgcctgagttcccgaagcttcttgcgcatgagctccttaacgtagaggttggcgttgatggggtcccgcggtccagcatccgcgcggcgtgcgcctcgtagatgagagtgacgcgcatcatgttccgccagaacttgagccagtatgcagactacacctgcggacggacccccacgcgcctccagaaaccccgaagcaggagcccgccggcacaaacggcgtggcagcgagctccgtcgtcgagccgcccggggactgccgccgcgcgatctagccgccctaggcccgggagcgctgtcggccgcagatccaccactcccgagcctggcgccggcggagacggaggcgacgcagtaagcggtgagggaggagtaagccggcaccacgagcggcgatggaggaggaggacgccgccgcacgctttcatcgccgatacccgccgccggagaggagaggagaggagaggggaatggatgggagaagtgtggcggctgagggtggagagatagagagagagagaggaggggtggagaggagggttttatatggggctagggttaggcacggcgatcagaaccattagatcgtagatggccggtcagaaatagttgggccatttgggccaaaacaggaatgatcttatggtatttttttaatttcaatttatgagaactttaaatgtaattttaggctgattcttttgtttcaaatgcaaaaatcataaataacaaaattgtagaactaatcgagaactgtgactattgtattggttctttttacaaataagttcatttgaacaattcaaattttgaattttcaaaatttgacaacttcgaataaaaattggggttaataaatgatttcaaatggaaaagtcaccaaaaccaaagttgtagaactcatcgaggcgaaaaagttttattttggtcatttctccatatgactctatttgaactatttgaaatttgaaattcaaagtatgagaacttcaaatagaatttttttattagtgaacgacttcaactgaaaaagtcataacaacaaagttgtataatccatctggatctacaatttttattttggtcatttgttcatccgacaaagtgacagtaggattgttcacaaaatttacatatctcttctatggttttataaactataagagagatttgtaaattttatgaacaatgttactatcactttgccaaataaaagatatgaccaaaataaaagttatagatattcatgagttatacaactttgttgttgatgactttttcagttgaaatcatttagtatttgaaaatgttatttgaagttgtcataatttgaaattcaaattcaaattattgaaacaaagtcatatagcaaaatgaccaaaacaaaagttgtagatcttgataagatatacaactttgttgttgacaatttttttcatttgaaatcatttaccacaaaaaaaatatttgaatttcttatattttaaaattcaaattttatataggtcaatcaaactcaaatggagaaataaccaaaataaaattggtagatttaaataagttatacaactttgtttttcaaaattttttcacataagtttatttagtatgataaaattcgattaaaagttttaatattttgaaattaattgagaggagggaggcaaaatagacttctcgactcgctaggagtgcgctgtgggctaagtgggaaggttggaggcctgccagattagtttctttagaagatataaacgtgatatataaaataatatgcaaaatctaacaaaacattatctgtggcttagtggttggcccaatgaaaaaaaaactgatgtggcagtaaggcttgtctacatgaacaaaaatatttaaaataatataataaataatttgtgacacacgggttggcccaatgaaaaaaaaaactgtggcagtaaggcttgtctacatgaacaaaaatatttaaaataatataataaataatttgtgacacataaataggtcttatgacatagtaaatattgtcattggatgacattagactaactatatgacatttattgtgacacacaattttttattgtcattaagttgacgtgcttgaaataaaatgtcataaattagatgatatagtgatattataatctgtgtcatattaaatacgttaaaaagccacacatatcttgtagtgaccaagcccacagcgaagatcaatccagtggccactctaaggattgtggcctccctacgaacgataatatgtttgtagaccacatacacagctccgattacctggaaaacaagattcagtgcgtggcgcaaccagagtttgttgtcctctagtgcataggccgtgatgttgtctgggccaccgaggtgcagcaacaagaatggtgcccaaaatgctgccagacggtgctcatcaactgccacgctgccgaaggagaggttcctaagggcgtatattgccgtcgagtcggccagctggtaagctatccactggatgatctttggtgagtactttacgccggcgagtaccagccaggaggaggaggatgacctgcagcgcgaggctgaggagtacaaggatttgtatcccccatttgttccaaaaatccactagagacatcgtcacgccccttatgacgagttctctgttgtgaattttgagcttaggccaaccgagggcaggtcgcctcgcgtatatatgctggttgctgcggttgttagtgcaccaaccaatcgatcaatatatgcgtatatatgtctgtctatatatatgtagattgtagaattgttagacagtcccgagaaacattcatgttagtccagaaatagtgaacaaatctatacatcgttctaggcataggatccattataacggatttcattaaatccacgtacgtagttatccttcttagaattaaatttaaaaatgtactgttcattttttcttagaaatattcgggttgtaattcttttgacacaaatatactgtcatcgctatatgggagtgcgacatcgatacgacacgctgaaccattgtgtgagaatgacgatgtgggcggtctcgcggggtgggaacgtgacaccgcacggtctcacacaaccacaacgccggtctgagccgagaccatgcggtctcgcatgcaaaaaagccacagcgctttgaaaaatagttaattagtgattaattatcctaattaatgttaattggttattaataatgctaattaaaataatattaattaattaatttctaattatgctagttaatttattaatcacatgagtatggatgggaagtcggtctcgcaccctcgctctgcgagaccgtagcgactcttgcgatctctccggaccgccctgcgacagtggtataattctacaaatttctcctgtgcatgtatatttacgtaaaaccaatgaaaaaagatatatttgtaggatcgaaacactagaactaagccaaccagagaggggtgaatggttggtatgcctaaaaaccgaattttttagcggaaataaaagttatcctcaaatttgacggatcgtggtctaaccgaaagtgttgcaccggtctgaccgcctgaaagccgtcggtctgaccggttagatcgatcggtccgtccgccctgagatcgcctctgctccctgtcgctgtcgccggttagaccgccgaaacccggtgaaacacaaatcgaagaactcttaaagtggatgacgactttataaattttctctatgtttacaaagtgcaccaacagcactccttacaaaaatctcgactaaactcgaaaccctaactcaactatcaactcaattgctctcaaaagcgataccgggaagcctcacgctccccctctatttatacctgaggtagacaacctaaagtgatccgtagaaccacattcaaagcaacgatttggtccacctcttttcctgtacctaacattagtcacagctcgagaaagtcagttagataacaaaaccaagtcctcctcctcgaactgtttgagttgatcatcggcattaaacaaagcaaatgcggaagactttgatgaagaagaaccaacatccaaagaagttgaggaagaaatcaaagcactcgacttagaatcaactttacgaaaaagaatattcatctcatgtgttttcagttttgtgtaaagcgaatccaaagtcaaagtagacatatcaacggactcctgaatagatgtaactttcatctcccaaatagacatgtcaagaccattcaaaaagtggcgagaaatctcagattgtgtataattaatatcataagaagaatcaacagatctaagatcactcaaaaatttgttaaacctagaaagatagtcatccaaagcttctccaggtttcatctcaaatttaatgtactcttttttgaaaagatctcgacgaagttctttaatgttgttagttccttcatgaaaattactcaaagcaatccaaatctcatgggaagtttgaagatgagagacacgatcataatacaaacgagaaatcccactcaaaagaatattgcgagctttgcaattttgttcaaattcaatttttaaagcatcaatattaatttgttcaggaatcacataaggatgagaaacttttcttcaaatatcataaaactcagccataatgtaagattgcatcctactacaccaatgagaaaaatcagttccatcgaaaacatgaggcttagttgaaaacctaacagccatggcaaaaactcgtagatcggttaaaatccaaagaagaaaacaaggctctgataccacttataggatcgaaacactagaactaagtcaaccacaggggggtgaatggttggtatgccaaaaaacaaaaacttttagcggaaataaaacttaccctcaaattcgacggatcgtggtctgactgaaagtgttgcgccggtctgaccgcctggaagccgtcggtctgactggttagatcgatcggtccgaccaccctgagatcgcctctgctccctatcgttgtcgccggtctgaccgtcacgagcctgctggtctgaccgccggtgtgtcgccgattagaccgccgaaacccggtgaaacacaaatcgaagaactcttaaagtggatgacgactttattgattctctctgtgtttacaaagtgcaccaacaaaactccttacaataatctcaactaaactcgaaaccctaactcaactatcaactcaattgctctcagaagcgatatcgggaagcctcacgctccccctctatttatacccgaggtagacagcctaaagccacgaaccaaactcatactagaagtcctaatcaccctaggaaacctcttagtacaagaaacaaactttacataaccaatcataccaaatttggactgcttccaaattcaactccgtatcccatacgcacacaataactccatcatatgccatatggaaccttcaccttccatgtgcactgaactctaaccatagtatcccgcatgatctctgaccaccacggacgtcgcttattcccaagccgactcccggtccatcaccgcaaatactctcacggcatctcgagtcacctacacatagaataaacaaagaaaccatattccgagaccaagctatccccaacttgactcattagtagcaaacgacagtattacatatgcatagtatccatctagaagtcagaatcatgaaacaatcacggatatccaaacaaacaagccgaaaccgaaaccgacacagagtcggccggttagcagtacctgtaaatcacctgtgaaatccaatcatctccaaaaccacttcgtaaataaattccaaatatcaaaaccaataatcttcaatgccaattgttcatcacagaataataataaaaaacacatttgattttacaatattttcattttttaaatatcttacattgtcaatagggcaaggactatctagcactttgcgagttacttaaactaaacgacgtgcatcacacccttccaccatcccacaacactagcatcccaaggtcatgtttcccattcccatcctcttcgcacttctcccattgtaactctcttcaactattgtgtttatatcttatactatgtatctgaccaactctttctgccaaaaccactccagtaatttttggatcttgctgcactggatagaaactgaccgagggaagaggccgttcattttcccttcagcttcccctttacctgcgataagcataggaggagcaaatggtgaggaagaaaccatgacgtggaagggagcgtgccagagaagaaggttgcctacaccgctcagagaccggagacttccattgacctcacctttgctggttttgtctaccccgcacatacctggcttcaaatctgccacctccatagagcaaaccaatcttttccaaattggagctctcaacattgttgggacaacttgggaggagcatccttaatggcaaccccattctccctctccgcctgattaggttgagggcatttgcctccacatcaagctatccctcctcaacccatcaacgatgaagacctatcctcgtctcctccgctgtggccaccaccgccttgtgccgacaactgcacagtcccaggcatgcttaggctgccttcttccactgaaggatggatcagtcccaacactaatcccccgatgtcattgagatttctgcacatggacgtttccccaatggcaatgtgacgccggcgacctcgttcgctgccccatgacttgagctaccgatctcatccacaatgccattagttcaaagggcggtgataaggactagattatgattgcaaatccagacctagcgacgcaatgatggctagccgacagcagcagatctaactagcaaagtttgcacccggaggcaggaaaggtaattggtggcggtggtgccatagccttcgagcggagagtaggagaaatgccattaccataactctccaatcgctcctctctattgggtttagttccatggagctaaaagtcaaggcctaggtcgcatgggctatgatacaacaaaagagattgttgggcctagattgaaataagtcttcgaggccacatgggttgatgtgacggaggagattgttagggctgctggtgatggaggagattgttaatttcagtcttaaattggtaaaaccgacgatacgagagcacaactcaaaatatgagggcagtctgcacctatcatctactcatttgggttgtgtaggttcactacactggtcaaggtcacctgtgacgggcccaaaccctcatctttgacggcttcgcgcatggtcagtgatcagtggtcactggtgagtccagtcacctttgacgggtggccggccatcacaggtgacacccacctctgacgggcaagttactagaaggccgtcagaggtgttggtctccgctagcctagggcgagttaggacccgtcacaggtgactcatctctgacggccctttaaataaaggtcgtcagacgttgaggtcttcgtagttagaagctgtcacaggtgatctacctgtgacggccccaaaagtaaaggcccgtcacaggtaggtcacctctgacgggcctttatttgctagtccatcacaggttaggttacctttgacggatttttgttccgacccgtcactgatgagttaattccagaaaaaaataaatgctaaatattggctagcctcaggatttgctagccatgccctctgaaacacagatacatcacagatatattccagtcacagatccatcacagatacatcacccccccgatataacatcacagatccatctcaaacatcacagatccccaacaacacatatatgcagttcaaatgccacaattttgcacggcaaattcacaccccttgaaagccacaatttcggtcgttgctcatagaaccgcatatatacttaccaaatggattaaagccataatgtattcgacctccacaacctgtcaataaggaaaaaaaaggagaaaacagatgaatagtacaacgtaaatcgtagttgatcaaatgtgatgacaatttagtaaactaccataaatattgcacatatgaaagtaaattacattgcactccataaaaacataattttttacatcgcaagatattataaaaacatcttttttacatcacaatgaattatctagccaagttcatgagtctatttgacatgaaaacattctttcttgtccattatttctgcaagaatgaaggcgcacacttcgcctctaatagcggggggttgatgggtgagatcttgaagccagctctacctttctgtttaataaataagaggttaattagcacgttttgaatagcaatgtaggtattgaaatgagcttattcgccattagcaacaacctcagggtcgaaatctttcacctctcttagaagtgttgacatgttgtggcacacgtggaaaccacattggtctccgatctgttgtgcgcatgcaaacttggtgtcatgataaagttcgtccttgccctccttgtgcctaccacccttttccacatatgggccccaagccatatttaaggccttggtgatttcactgaaatcataatctttggacttattggagttaaggtaggtaaccctactccacttaggtacgatgactaggagaatccaatgtcgcctgcgcagtggttatgtagcgttagtactaagaaccttaacttcaaaaacaatatacacgaagggtattgtcctcttactcttggttgtgtgcgcacatgatgtactccttgtcttgatgggcccataaacaccggttgacatagtcaaccacctcagtgaagctctgtcgtaaattaacctcattcaccatggatggatcaaggaacccaacctgattaccaaggcgacgactctcgatccaacacaaccttaaaacatttacgtattagaactaatttaattaggagatatagtccaatcatatcacaagtatagaaggtatgcacttacaaggagtagcattttagaagaccagtgtccaacttctggatcctaaaaaggtcgaagaggtcatcaaagcctatagttatataggcaggcgacgataggaacggctggtggtcgtgatgtccaactatggatgactccctcattttccgcttggcattgcttagctccatgtattgcttatgtagctctcggcaagcaatacccatcacagctaacacattgtcctccaccaatagcatgcctagctcaaattgggctggcgccctcccgaccttccccgctttgctcaccggcatcgatgtcgcagccttgcccctttttggctccagcgccaactccccgaccttccccttgccagctcaaattgagatggcggtggagatggacggtggcagtcgagagagtggcggcgagaagggcggtggagaggtcaggcggcggtggagagggcggcggcgagcagggcggtggagaggttgaggcggcggtggggagggcggcggatctggatcgagagagagagagaggcgaggcggcggtcgagagagtgagtgagtgagagtgggtgccggatctggatcgatctagaagatgttcaaccctaggtcagcactagtcaaactcacctgtgac

SEQ ID NO: 24381 - DNA, 3203 bp, Oryza sativa
ccgtcacaggtgagtttgcctacagcaattttattttattttatttcacttagttcttttaatttccttaacatatttccacatacactacatatttttgttatacttaattattttatttcactaacagtagtaattgcacttcattattatactaattttattattttatttccaatggttatacttgcttagttattttatttcacttctagtgggtgcttcacttaattattttatttgactatttcataagcaatatactattgatcattgcgaacatattagagtcatacagataacagacatgtagacataaactacatacataaattacaaaaataatccttgctcatggtcgacacgtgcatattgaacttcatcttcttcttcctcctcttctagaggtatttcttgacctatgccgtggacgtgctggttgtaatcatcctcgtctgcaatattgtccaatccaacaattctccttttcccttcacgaacaacatgtagtttcttgttacacgggtcaactatgtagaacacttgaacaacttgtttggcgagaacaaacagttcatccttgtacgcgttgttagccaagttgacagtggtgaaaccttctgtcacgaccggaaataacccaacgggcgttccttacgtgcgtgtattattccttgtcccaggaggcaaggtacaccaaaagttgatacaagtcagagtctaacaagcggaagcgtaaatagttaatttattacatgggcagcgaaggcccagcacacacagagacaaacgagaaacagcgaaagactagggcgacgaccacaggcgcttgacggcaggcacgagctagacaccaaagccttcatcttctaggggctcctcttctggggttaggaaaaattgagcaagactgagtacaaccaccgtactcaacaagacacacccacaagtgcagaataaatgcaagggagtacaaaggagttatactataaagggttagggtttgcagtaaacagcaattaaaggtacttagttgctcaaagctattttgtaaacacgattctagaactataccatattatttaacaaggccgtgaacccacacgaacctgccttaacccaaggcctacgatgattcagaccgaactggcaacccgaccctgggtcccagctcgtcccaagccaacccaggccaaccattccacattttagttgttaagcaggttttaagaattaaaacactaacttgggtacattgctcggcttgcccataaccgagggcgcggctattcgaatagattttactctgatcagaggtgtacatctttacccacaagacacattttcctcacgtgtagccacgtgccacataccaccacggtatacagaaggaagacatgacatagtttccaacccatcctagccatagacaagagtaccgacccaatcccacctacggccggaacccccgggacaggcaggcaggactgagcccctagcagcaggacaccggccctgtgccatgacatctcgactaccgggccgcagctcgtgtagccttcatttgtcctagagatgtccatcgacccctgacttcttccatctccatccgtgtacttttgtttataaccagactgagccacaaactaagccttacccactagacatgtggaagtacggtagtgctttgcaacagaggcccgaagaccggtccttatatggccgaggtgctactatcaaaaccatgcaccccgagcccagcctaaaaccattttggggattttgaatagagggggcggtgtgaagccaattccacaataaccaaaccattccatagtgtccaggtgatatgaatattcccaacgtctagagttgaaaaaccacctaatgttacctaattaaaacgcgaagcatctacctaaaatcatactagtgataccatgagtagagtgtccactagttggggttttgtttattctagggtgaacaaggtaataataacaataacaataataataaggtcataacaaaggtaaataggcatggctagataaaacagtgataacgcgggaatttaaataaagcgataatgcaataatttaaatcaacataattttacaaactgggattcaatatgttcaaagatgatgtgacttgccttgctcgctttcccaaacgtcggcttcaacctccacgaagagcggatcttccgaagctgcagcgtctacacgaccaacggaaaagaaaaggcttttactctaataaactccatataacaagcagaaacaaagcacaaaaatgggttcttgacttctcagggaaaaattagagacttgaacggtccaattccgagttcaaatggccaagttatggccatttgaagtttatatgctctttaattgaatatttgcgaatttcttcatttaaattttaatttaaaatcggatttattgcgtcagccgaggggaggggcgcgcggaccgggtccacgggagtggggcccacgcggcagcctcacggtccacggtggactggttgcacccggctcacaccggccagcgccgtgggtcccatgcgtcagccgcacccgagggcgcgggcggctgacggccgggccccacatggcagccgcggggcgcgcctgaaagcggcctcgccggcacagccgacgggaggcggcgcgcccgcgcccctatggtcgccggcgccggccataggcatggcggagcggcggccgagagaggggagggaagggggaaacgaaatgggcggtccacggctcaccccgggtcgacggcgacgacgggaacagcgaccggagcggaggaaggcggcggcgcggcacaggttgacggggacggcggcgttccggcggttggcgaccgaaacggataggtggacgaggtcggcgaggttgcggcgaacccgaagaaggcgacgccgaagcgggagaaggtccggggcgacgacggcggcggaccggagctcggcggcgacggtggagagagagagcgacggcgcgggctcgattccgacggagagagagagcggcgagtggcggaaacggtggagggaggcacggggagcgtttatataaggttgggagggggagagagcggccgggggagggggaatcggccgcggaagatccggccgccattgatgcgccggcgaggtttagggggaaacgtttccgaacgaat

SEQ ID NO: 24382 - DNA, 1704 bp, Oryza sativa
ggggaaaagaaagactttttagggtttttctttttataaaaccattttaactttgtttatttcttcttaattattatttgtgctctgaaaattccactaaaatttgtttacgcattttaggcttttaggaaatatacaaaaatcctccaagccttattcgacttttaactttgcacattttaattgttggaggctttcacatggattttacttattctatgcataatttcgaggatgtattttagagtcgttttgggacgcgacaccttcattgtcaacttttacattgcgaagatcgacccatcgacaacgaaacaacgggactttgaacttcaagtaatctagctccaatatttgctcaactctaccatagtattgatcacgacgaccaccgtcactaccagcctcgatgcgtaacccactgttctgcactgtgcatttgctgtcttgctttaccgtgtgaaaggtgtatccatttatgtcatatccttgccaggtggtggcagtgcattcaggaccctgtgacaaccactgaagtgtttcactagacaagttttgcaacctggcaattcggttcttcagccactcgttgaatgaagacatgtgcttattcctgacccaactctctgatcggcttcggttctcttgtcggataactgcaaggtgttcgtcaacgtacggcaccacctcagtcatatgctgtagtaccgtgaaatgagcctaatcatacaccttccgatccagcctaatagtctttcttccaatagtaccaacaccatcaagcctcccttcttgatgagatcgtggtaatccaattgaagatgtttctgacatgtagtccacacaaaaatcgatgacctcttcggtggtgtaactctcgatgatactcccctcagggtgtgaacggttccgtacataacccttaaggatccccatgtacctttcgcaaggatacatctgcatcatgaatgctggaccacagtactttgtttgcctcacaaggtgcaccggaagatgttccattatgtcaaagaaagttggaggaaagtacatctcaagatgacatagggttttcacaagttctgcctgtagttcatctagtccctcgggatcaattatcttctggtcgattgcatggaagaaggaacacaaccgctggatcgtgtgtcgcaccttaggaggcaaaatattccttattgcaacgggcaacagctgtgtgataagaacgtggcaatcatgcgacttcattcctaccaacttaagatcttgcagtgaaacgagcctactgattcttgatgagtaaccagatagaacctttataccactcaaacatgttagcaaatcaatcttctcttctttcgagcgagtgtagcaggctggaggaaggtaaaccctgccggattccgtggttatgggatgtagctccgagcgaacacccatatcttccagatctcgtcgggcgttgagaccatcctttgtagtacctgggttaagcagtaatcccattaaactctcgcatacattcttctcgacatgcatcaaatctatttagtggcgaacttcaaaatccttccagtatggtagtctccaaaatattgacttctttttccacatgctcctctcttttgtcttttgtttttccacatgctcctctgttttttccttcgatgtgctcttctcttttcgctttccaactttcctctt

SEQ ID NO: 24383 - DNA, 1259 bp, Oryza sativa
tcctgcagcccaacaaggagccggcggtagtggcggtgcacagggcagccagcaagcgacacggcagcggctgcgctaaggttagagcaacaacggcgacgacacgaccgagggattgaaacctaacccgaggggacacggatagaagtctcaccgaaccaaagcgatcggagagggagggtcgacgtttacgatccggcggcaacacacggagacgacgacgacgctagacaaacaacggattagattagattggattaagaccctaggaaaaaatctacaccggtgaacggcatgggagcggcggttgccggtgaaccatggcacaataatgcaaacgggggcaccgggaggtagagaaggcgacggcgattcttaccaacacttacgcgacgacagacggcgacggaagatggccggtgacgagcttcgaagggcggcaaggtactgtccacggcggcgacgattttccggcgacgaacgacggcaacagaggggtggacggggttcacttcgcagctgcgatgccgagggaggctgcggcgaagcttggcgatgacgggaggagcagcaaggcctcaccggagatcaaaacgcgatggcgaacttcggcttgacggcgacgatggagctccggtggatttcggcttcggggaaccggctgccgggcttcatcttgctcctgcgaacccaatggagtcgatggcgacggaaagcggcggctaaggcggctgctagctgcggctggaggcgccgcaaaggccgaaaccttctggttcgcgtcggcaagcggcttccggctggatttggcacgaaggaaccaaaggccagggtagagctcgactttgcggagccgagggaagtggcggcgctgaccgacgacggccggggcgacggcgcacggcggctggagcggcggccggaggtggagagagagggagctcgcggggagagtgcttccggcaacggcggagagagggagaggtggcggccgaaagaggagaaggagggggctctatatatagccatgggagcccagggatcgagcccacgacgacgggaaaaactcgggaaagtttaggatttcgccggaaaaaggaaagattgaaccacgaaattggaaaggatttccatagaaacttttggggatttcttggggaaaaggaagaggagattgagaggactccactcccgcaactaatttggaaaaaggagcaacgaggtggccggatttcggaaggggatcggcgacactgggc

SEQ ID NO: 24384 - DNA, 759 bp, Oryza sativa
ttcctgcagcccttaacaatatgaaaagttcaaactgttcccctaagcatgaaatttaagaattcttgaacaaaaacatatgtactactcccctgttatttttcctttttgatgacttcatttccaaattgaaaaggaaattcatgttgctttttacaaattgaaaagcaattactagagtaatatatgagaaatgaatcacttacccaatcaccaacaacaaacaggcttacaagcactgggttatgaagatctcttttagtttgtaatgaatagatatccagacaagcaagtccaaaactccaaagaagctgtagacccatggaagcaatcaagtagctgaaaatagggagatcacaatatcgtcaattatgtatatagattatatcacgtatgcactgttgagctcctgctcaagcaattctgaatagtagtaaacaattttcatactttgcccaacttggtctcaaaacattaagttaaaaatggcacccatacaataatcaaaggatgtaacatgttgaatgttgacacattcatacacaacatctaatggaaaaattctcataagatgttaagttaaactttaatagtcacaaagaagagaacagataagcacaccaaatcattgggcagtcctgcctttttggtttaagacagataaataaattgtttttggtcccttcctggcatggaactgaattatatcaggaaaaaggccagtaaagaaactgtgagaaaagatcaaaacatcataac

SEQ ID NO: 24385 - DNA, 1083 bp, Oryza sativa
agatttacatggatttgtttctctaatggaaccgtgcctaagatgagaaatatatgattataggttttgctagattccaatgaccatagagcactaatcttctttctttacagttgtaggaatccttgataaggctgatggcttcgatggatgagcctctttatcccatcgctatactgatagatgagctcaaaaacgaagatattcaattgcgtctgaactccattaggaggctctccacaattgcacgagcacttggagaagaaagaacccggaaggagttaattccttttctcagtgaaaataatgacgatgaagatgaggtgcttcttgctatggctgaagaattgggcgtgttcattccttacgttgggggtgtagaacatgctcatgttttgctaccaccattggagacattgtgtacagtggaggaaacctgtgtccgagacaaggcagttgaatctctgtgccgtattggagcacagatgaaggaaagtgacattgtagactggttcgttccagtagtaaaggtaagaagtttattaatatttaattgttttttttctgtagagttgccagatttatcagttcgctgccaacttcactatgtaggtttcttgttactttggcatacaattgtgtgatatttgtgtttgtttcttgcctgtcaattgcaattttgttatatattgttgattgttctccatagaagctattttaacacattgcaattgttgactggaaacagtgccacaatggcattagttatcatgctttcattttccttttccttagtccattccatctagcaccactaatgaatactttatggacagactattttacactacatcgtgttgtattcagctaaccatgcattactcttttcagaggctagcagctggtgagtggtttacagctcgagtatcgtcttgtggacttttccatatagcatatccaagtgctcctgatcaattgaaggcagaattgaggaccatttatggtcagctatgccaagatgacatgcctatggtccgaagggcagctgcatcaaatcttggaaagtttgcagccacagttgaa

SEQ ID NO: 24386 - DNA, 737 bp, Oryza sativa
agttgtttactaccattgcttcacgattgttggaaacctgacttgctttgtttctggcattctgtaggaggctacaatcgaacaacttcttcctattttcctttctttgctcaaggatgaatttcctgatgttcggctcaatataatcagcaagctcgatcaagttaatcaggtgatgttcatgtttttttcttattgaaatgaatttatcttatcttttgtgatgttcatgctgtttttattagcgtgaagtctaatttactccacctcaacaattattttagtctagaaatcaaccctcaactatgacaccagacattttatacacacttcgactatcaaaactggctagaatacccctcaagggcaaacctggttatttttttaaaggattctcactctctaccagcctaaccttgaggtattgactacctgcagtgtttagaaaacatcagtcccacagctcaatataacatttcaattttgcttccctaatgactgataaattccttggtcatagaaaattcattactgagtccttttgatctttcaggttattggaattgatttgctgtcacaatcactgttaccggcgatcgtagaacttgcagaggataggcactggagggttcggcttgcaataattgagtacattcctttattggctagtcaattaggcgttggatttttcgatgacaagctgggggcactttgcatgcaatggttggggggtgcag

SEQ ID NO: 24387 - DNA, 2032 bp, Oryza sativa
aaatagctgactactagtctaaaaaagccagagaatctaaatatgagttagcagctctaaattaccaaaatattagtcatgcttgtaataataatacttgtcctacaaagcaacttatgcaagctactccttggaaagacaattgtgtatctcttgtgcacattttccttctaatgtttaaataaaaaattactaagttgtaaaaacactgtttttagagcacatggcaaaccgcttttctgcagaccgaggagtaaaaagactatcactgacagatgggacccaccaaccattgtctctcactctctcccctcgcaccgcagcttctccaatccgtcactttccccatccctcccgcgaaaagcagacagacgcccacaacccaccaccacgtctagggttccgccgctcctccggccgccgccgccgccgccgccgacccccctcgatctcctccccgagccgccataggtggtggcgggggcgggggagctagcatccgtccgtcaacgcacatcgtcactgctgcttcctggtgagcatccatccgtttcgcatatcctctttctcatccctctctacccacccactttttcccctcgaattcgcgtcaaccctagcttctcttctagatctgaaagctgctgcttttctttcaatttgctattcttaatacgaataacagtttcgtttgttccccaaaaaaagtttgggatgaatccccatgtcccacgttagatccgcccctggttttatgtgcggtattgttgtttgtggtatgggtaccaacagctttcgttgttttcaccttttgcagaaatctgccaccatgtccgacatggagtccatggctacacttatggagtccacaggctccaagctgcagcagcttcagcgtgcatttgcagagctcgagagccagagcgctgtttccttgaacttaaagtggaagcaactggaggaccatttccatgggcttgagcagtcgctcaagaaaaagtttgatgatctgaaaaggcaggaagaggagttcgaggagacggttgcaaagtcagagcagatgctggagcaacaagaggctgttgtcgtggcaaaggaactgacttctcttgaaaaactgcagcagaaaagggatgccgcgttggctgtgatctttggcaagtccaagctgaacttgtctacgcctcttatcaacccaatcagcaaatccgtgaataacaatgctgtgtttaatggaaacatcggtggtagtctttctgttaagtggcccaaacctgcaactgcgcatggtgcatacctgcaagatgaaaacactgctgtgaagcctcgttctcaacttgttgtcctctgtgaagagatgaatgttaacgggcttcataagttcatatcagacaatcgcaaagacttaacatccatccgtgaggaaatccccgttgcacttaggggagcaactgatccatatggcttggtgttagcttctctagaagacttctattttggagacaatcttatattggatggcaaaaaggatggaaaccttctgggtgtacggaggacgtgcctcatgttgatggaatcacttgctcagctgcaaactgatgctactactggtttcatatcggaaggtcaagtgcttactgcaagtatcaaggagcgtgcaaaaaagattgctcttgagtggaaatccaagttggatagccttgactttgatgctagcaatgggaactgcctggaagcacatgcgtttcttcaactcctggctacctttggtatatttgctgaatttgcacaagatgagctgtgtaagctacttccctcagtcagtcgtcgtcgtcagacacctgagctttgtagaatacttggattgtcccagaacatgccaggtcagtgctatcatcgattaataatgcagcttgttccattgagcatcaataataaatgggattttctatttccctttgtcactcagatgtttagagaacacattttgaccacttcaataattgttcatatatctatatagggctgcagg

SEQ ID NO: 24388 - DNA, 793 bp, Oryza sativa
taggttctatggctgtcaagtcgtatactgtaattgttcactcacttatttgatttatttatcctggaatagttaaagtacggggtttgatcatatcataaagttagcaaatcatttagccaccaatcagcttcaatgtagaagctgcagtgctgttctgaagaacttgaataataaagagctactttagcttgcaagatactattcagctatagttgcttgctaccttttctttcttgtgtggggtaacaaatattttctcttcttgctggtctgtacattttttaagcatatctgcgtgcattcctaattaattgtgattgtagtatatctgatgaattaccatattattcagaatgaaatgaatgaacgagagctgtctgccttgaaagctgctattaagtgtatcgaggagcacaaacttgatgagaaatatccgattgacctgcttcagaaaagagttatccagctagagaaagctaaggcagacaagaggagggctgttgaagctgcaaagccacagtctaagaggcctcgtgccaatggatccgtatatgcgccacatactagctttcctgacaaaagcttctaccaggctgctccgccgcagaggcattcctacccttacgagaggcagtatgtgtatggtgctgaggcccatcaccatcccacaatgataagctcagctccctatggcatctcacctgcccacacaacatattatggtaatggctatcaggttcagtaccaggtaccatatatccactgatggagagagcgggctgcaggaatt

SEQ ID NO: 24389 - DNA, 1747 bp, Oryza sativa
catgaaaactacatgaatcatgtccaatccagacatagggaatcagacatagggaatcagacataaatgagagtatgacatgaaaaaaattgcgattgtattagatcttttagggaatcagagatgaaacactggcaatatgggttgttttctgtcagtttgcgatcaattttataccctttcagtaaaaaataactaatggtctagaattgtgcagtaaaatacattttttagaatggatacacaaaacatatgtgtaggtttctgtcgataacttctttcattatattataacttcggtgttccctttcattcttgaaatattaccgtaaattagtaatcagctgcatttccggtgccatgtcaatatccatgtggcacttgtagctagatggggtagtatgccaaggttttcatttccctgtttgatcacttgtttgacccttctttcttgaagtgctaacataatttagcaagagggacattaaagaacattatatttggatgtattgcaggttacagcgattctttcgtttgcagcagcttctgcttctgctggtgtcactattctttttgagagagacgtgcacttctgtaggatgtacccgcagctttcgtgtggtcgttacgagctttcagttatcttggcattcatcacatggtcgttcatagctacatcagctgtttccatgttttggttactagcttcgctttgaatcgtatcattatcgctgtcatgttgtgctaaccatcaggattccatcaaatgtactctgcttgagacatttagattttagatttctgttaatgaggaagcatccaaatcattctgagtaggtattatctgcttggctcaccaatctttggtttggaaagagtttatttgacaaaagtcgggcagatcatgagaacagtaatggagccaagtaatgttgtcacctagaaatcttctgtattaaggtcaagggtatgtatatagcatcgaaaatgaagggccgtgttgcaccttcatgtttggtgaagttcactctgacgaaatttgaaagaggtattggccatatctcttcctgagccacaccataccgtatgagatggagaaaaatggtgatcacgtgatgcaggcttggatatggattgtgcaaactgttcaagtgtcaactactgaaaaattttgggttttggagaattagatgcggtttcaaatgaattgcgttcagcactcagcagattggaattggactctgattacttggtaacttttgcggtgtaattttagtatgaattttttgcggctcatttttcgtccttgataaattcagtttgaatacacaaaatgttgacacttcattccgatcatactcttgcttggaacaaaatcaaaaattgtgaagcaaacgaaattgccactggctagatgcatttaggggtataagtggatcagccgcaaacccgtttattttaacttattttaacctacaagtccgtttattttaacttattttaacctacaagtggatttcatgggttagccatttacacccttagatacattcatgttgaggctagagaatcttaaggtttttacctgtgtgctattaaaaaagatgacccttgcctctatgccactaaaaagtttgagtctctctctatgctattgtcgaactttatcgcgtcctccacaccattccgtcgctattctgtttgggtttaaccatttggcagctctgacatgtgggcccaagtagga

SEQ ID NO: 24390 - DNA, 678 bp, Oryza sativa
aaacataccattagtataattacatcgcaacccagtaggattagaaagggtatgtataacccacataatttttgcaactacaagatgtttcttaagagtgatcaatgagcaacattagttttttacaacatacacctttgtcatctcgcagatcggtgggctgctgtccagcaatgatgtcgatggcctccaccaccgccagccccttttgcccttcacccatgcccagaggacgcaaatgcacagttcgagttcaaggtatccgtctactcaatctatgcagtactctgtaatctgatcgatttctgatttcttttgcttaatttgggggtacacagctggagctgccggagcggatgcatctgataagtcgctcgagattatgcgcaaattctctgagcagtacgcccgccgctccaacaccttcttctgttccgagaagtccgtcaccgccgttgttatcaaggtaatggaaccaaatctattttctacttctctcttgaatcctcgttaaactttacttttaaaaaaatctcactgcgtgcacatacaaatcaaatactagcaaaaatcatcttagccacaaacaaattcttctatgctgctatttcatgtgttctgtacctgcagcttgataagaagattattacgccctattgctgctgttgaaagttgatg

SEQ ID NO: 24391 - DNA, 683 bp, Oryza sativa
aagattacatgctgatgacggttcgcgactccaacccgtggtatgcaaccatagtgaattacatggtatccaaatacataccaccaggggaaaatcaacgaaatttgaagtacgaaagtcaccgtcatatatgggatgagccatacctatacagggtctgcaccgatggcttactaagaagatgtgtgccgactgaagaaggacttaagatcataaagcgatgccatgcctcaccctatggtggccattatggtgcattcggcacccagggtaagatttgcgcaaagtggcttcttctcgccaacaatgtatgaagattcaaaagaattcgtcagaagatgcacaagctgccagaggcaaggaggaatcactactcgtgatgcaatgcccctcacatacaatttgcaagtcgaaatattcgatgtctggggtatagacttaatggaacctttccctaagtcccgtaactgcgagtacattctggtggcagtcgactatctctccaagtgggttgaggctatgccgtgcaacaccgtggatgcgaagcatgccaaaaagatgttcacagaaatcatcttcccaagatttggtacccctaggatggtcataagtgacagaggttctcacttcatcgacaaaaccctccgagacctcctacgagatatgggagccaaacacaatgt

SEQ ID NO: 24392 - DNA, 690 bp, Oryza sativa
acatataatcgattattcaaaaccctgtccacattggttggaattactccatcggcttgtcagccgatcggctctttgatcttcaatttatatatcttgtcagttgtaggatcaaactgactggcacgcccgcatctcataaatattctggaccagcgctggagctaagtagatctcccaggccattgtgttcatcgacttagttcgggccaacacagatctagcaccatcgaccaagcacggattttttttgtcaacaagagggaaagtgatatcaccaaagttcttgcaaaataagttgtttcccaaagttcgaatccttgaggggattctacgctccgttgaggagctcacaaagagccgggtcttagctaactctttcctcaagaggttgcacaaagcactactccttccacccactagtggttttcttttctttcggaggctagatctggcattcacaaacttctcctggctaaccacaagtacattggtggctcaagattggcacttagccgcttaggagtacacaattcccaagattaaaagatggaacaaggatcccttggagatgaaactagtactcaacgaatcttcacgaagttaacaccaagcactcacacaaactcaaaaccacaactctcacacacacaaggtccgagctcaaagatcggtggagagggggaaatt

SEQ ID NO: 24393 - DNA, 2960 bp, Oryza sativa
aagtgaacttattcctttccacgttgtacgatcttttctcagaaacaataattaattttttcctagagtgatggaaaatgttaaatgcatctgtaattctgtatgcacgagcaatacgtcttctttccccaccgaatatttcacaagcgttaaactatgtactcccacaataatgtatggggaatcatccagcatattttacatgtgtgggccaacagccgagatggaacaggtgcaacaaatagattagcatctgagaaattttagcacttataggattattttgctatagaaggcaagttccactgctgttctggtggaaaaggtacatgtgtgtttgcacagatttttttttattgataatggaagatttcatttggtcattggacgagtacacatatgatttcactctcggaaaccacctgcctcttagttacatccaaaatgcatgaccggtgcacatctcaacatggtgtaacatatgatatcttaaccaactttgcacaattaaataactcctaatgataaccttaattaattatcactcacttcattgtcctaaatcaatttccattagcatgttgatgccttttgtccattaggcaataattatcaggcatttgtgagttacatccaacatagtgtatcattcattcgccttgtcatgctattcaaatgaaaaccgcaccacagtatgcgacaaacataaaagtgtaaatcatggagcctttaggaatggagttaaatgccatcatatgtgtggcatatttacatgaatgccaccgtctattctgatactacctcctggtaagttgataatacttattcttttggataggataaggacatggtcttgaaaaacaattttaactattaatttttattataacatatataaaaatattaataaatatatactttttgaagaattttttaaaaccaatctctatagatgatcataattctaagaaaagtattttagatgctatttatagttaaagtttttaaagtttgattataggctttgtccataaagataataattattaacttggagatagtagttagtagtgcgttatgtagctttccattaagatatatattagcattttaatattatgaatgtgttttcagtagaaactataatgacacaattttctagctaactttaaaactgtgaaggcgtagattccatctttttaccattagtttttgcaaattcttatggtttaacaacatgcaaattatatgcataaaagtatttcccatggtgaatctaaagaaaatctgatgatattatactatatgagtttttaaaagttaatggttaaagatgaaaatatttgacttcagatgaactagagtgtaagaaaatttgaaataaaggagtacacgaaaccaaaacacacattgaacaaggacggtccagtggactcttgcccgagaaaactccaaatgctgtacatagtggcttaatggtaatttacctcgtagcaaatggccacattggggttcagaaaaatgtcgtcagcaggcccctcgaccagctacaattgtatatcacttggcctctggccagattggtggagaaaggcaagttctcaggctgcagaggaagcagagctccaatctgttcatgccaatggctgctggcacctgggtgaaggtaatttctcttgcttactcatacatatgcaattgattgtgtactcccttgatctataccttttcataagaaaggtttggttcagttttgggggaatttttttggctgagatttgttcatgttgcaagagtatttggctatttgctgcttcgagtgatggttatggacatggattagttgggaattggggcttgtttctgaaggttgttcatatattttggggagggttgtggattgaccctgctaggatgaaactttgttctaacccaagaattttgacatttggggattttttttttctagagcagatcactaaggaatcagaacatgaggcttagaatttttgtttttaaggaattagacttcgaaaattgagtagcatgttcagaagctagggatttcagattataaaaggttggggtttaattagcgaagaagtttcaggttgtgatgctatgctgcggtgttgattgggtaacagtgacggattgatagccatggacatgaaaatgagttgggaacttgggttttatgttggtgatagtaactgtttgaagattatataaagggtcaaatatcttcggtgtatcttgttgattccagttttccaaggtttgttgacaatgaagattattcgggagggcgttgtcagaatccatttcagtttcagctctctggagttgaccaagggattttgattccaaatttccagggcgatagcaaaatgctgacttcaaatttatgtgtcaataacatttccagtcagttttgagaagtacaatttgtgttattcaggtgtttctgaaaactgtcgactgtcttcaatatcagatgcacaaagaaaccctggaaatgcagaaattcgggccattaggctcatgaacatatgcaaataaaaagcgccgccacatatagacatccacatattagatgtcacttaaactaattagtgaattcctggaaattttatagaaattacaatcctgtatagaacgcaagaatttcatagcaaatactaataatcttcgaacacaaattgctcagcgagagagtagtaattttctttgcagattgcagcatccagttttgtctaatttgattagtaattgacatcagttaattaattaattaatcacgcgcagctagagcagaagggagatgggccgggagcaagaagctcccacgccatcaccctcgtcggcggcacggcgtacgcgttcggcggcgagttcacgccgcgcgtgccggtggacaacgccatgtacgccttcgacctcaagtcgcagtgctggtc

SEQ ID NO: 24394 - DNA, 650 bp, Oryza sativa
agagcaacttcacataaatgatgtgtagtattaagatgagctaggggattaagcaagtaatatacctcatagaaaaaggcaacagatacacggtaacgaggggaattgttaacaactcgatgaagtgttggttgatatattccatttgaccaaacctaacccaaatatgacatgtgataagtgtcacaagtttgatgacaataaaaagatgacaatgaaggtgcaaacgaagaaaaaaaaagaccttcagcatgtcaccaatgttgcagacgaaggttcccgggattggtttggcataaatccactcacctgattggtttttgacctgaaatatattcaccagatatttcactcaaatcaaaattgtttgcttcacccagttaaggctaaatatgaacagtgggcagcaactgtaatatggtaattacataattacttatgcatcttagaacatgcttagaatgttacagaagtgtagaagcatctcatgctagatcatccagtgagaaattctatataaccatgcacagctcagatgtgctctgccatgaaaaaaaatactgatctttaaaataattaaaaagaaactaaaatcaaggtctcatctttgatctgtattagttcccctcttctttattattataaggaaa

SEQ ID NO: 24395 - DNA, 680 bp, Oryza sativa
ttcctgcagcccttatattttaatgatggaatataaaattagataaagggtgtagcagcaaaccatggctcaatttcaggaatctcttccttctgcttttgctttggaggcctcccaggagcaacttcaatcaagttcgggttcatgactacttctgcctttgcctttgcaagttgagcttgttttactttaagttctttagcttgtgcttcaccaaattgattctagaaggtcaaattattagggtaagtaaaaggaaatatgataagtaaatacattttgaaaactaatcttaaaagttgatccttacagaccttaattctctgcagctcagcttgccttgaaagttttccctcctcaataaactgaaatccaggccttctagggcggaggagcttgttttggttgatgcccatcctttcatcaaagtgtgcacttgattttgcaagggaatccaagtctggtttgattatttggaaagcttccttcttttgcttatttatgttaacctacaaggtataaccaaaagtgacagtcattgcacagaagagttactgataacatttcatagtattcatgctagtaaaataagagatttacttttagagtgctcaaattggttggcttggtcatgttgataacattcccatgttcatcaatttccctaccctgagcatcaa

SEQ ID NO: 24396 - DNA, 2305 bp, Oryza sativa
ataggaacagatgatggcaccacaacaggtgcagcattgagcggttgttgagcaccagcctgaaaaacacagaaggtgcatccaatgagaatatacaggaaggatattaacttcttatacatctcaaacaatactgaaacaattgagcatgttcttatcagtaaatcagcagagacactgaacaggtacttccaaagttcatcatcaatgcaaggaaaagatctaatggctagttggctcctaatgttggatcaagttttcctaataaagcaggaggcagtattgccatagctgcattactctcttaatcaaggctaaaaatccacctagtaaccagtagtatcgctcatgtcaaccaacaatacaagcttatcccttgaaagtattgtgcaacttgaacaaattggacaaaagcactaacgatcaatctatcaacagaaacatttcgtaagaacagaactaaccctcctggactcctgataaaaacccttcactcccatatatttactaaagaattggcagattattcaccaacataataccatataaactacagaaatgtgactaagatgtaatctatccagttaataagttatccaaaacaaaataaagcaatcatttcttagataattcttgacttcatcactagaaaagaaaaatatggagacagtagcaacacttacattgggcaccagaccactccgggaatctccatttacagcgccatggtttgagttatccttatcacccttacccctctcatcgccatgcttcccattcgcatcggcgtcctcaaacctccgtcgctcccgcctcggcctctcctccttcggcggaggcggctccacggaagccctcgcccgcttccccccttccgggtcggactcgttgccaccaccctcgtggcccttccgcttccgcgaagaaggcggcggtgcctctcggtcggccgagtcccggcgctccacggagtccctgggagcgcggctcgacgaccgctcccgcttcgcggcgggcggcgggggggactccgacggggagagggaccgccgcccgccgtcgcgatggtggccgtggcggcgggagcggctctcctcctcgtcgtcgcggtggtggcggcggcggccgccgtcgtcgtcgtcgtcgccgccgccgccgcgcttgtggcggcggtggtcgtcgtcggcgtcgtggcggcggcggtggtggtcgtcgcgggagcggtggtggcggtcgtcgtcgtcgcgggggcggcgggaggagcggtcgcgatccatggaggcggggaggagggagagggagaggcggagacgatgggattagggtttgcgtcgaggtggctactatgggagattgggaggggcgaaaagcccagcgagattgggatctgcgggcgtggccgatcactttacatatgcttaagagcaagtttaagattacagctaactattccaaatcatctgtaatcaatttaatagtcaatttatataatagttaccgataaatatatactacactattaatatctggtctcacctatcatacacacaatatgtcttaaaatccatgctcatgctgtagctatagcccgctgctcatctctctcttcttctaacttcttaatatgtgtttatagcttgtttatagtctgctattatacatgctctaagcaggctttagaactgacaaagagtgacagactcgataatttctatttcttttgctgtatttattgactataatttcttaaccaaggatagcatttaatcttttggattaccaacataaaaggcatttttattcatacaatttgattatataacatttataccatataattattaatgttccagtttttccacttatagttttggacatcgataattcacacgattttaccattttttttatttctaatatcctaaaaaaatggttactcttggattcaaatttattccacaaagattatcatgccatatttaaatttctttccgttctaccctcaaacatcctcccctctcaaccatttctcacattctactatcaacaatcatttcctctcaaccaggagtaaatcatttaacgcattgcatttttttcatgaaccttaatctttgcttttaagagaaacctagaataacaatctcttaagaaaggtgatagtagcaataaaattattgaaaatataatgctaactttcgaaaaccggaagaagaaagcaggaagaagggaaggggtagagaaggagagagaaaaagaaaaataaaagaaaagaaatattccttgacatgtaggtcctagagtg

SEQ ID NO: 24397 - DNA, 841 bp, Oryza sativa
tgatgcagaccattcagctggagtactactagcttgattcaacgagtaactataagccgacacttgaatccatagacgacaggtgcacgacaaaagaccatcagactattaagaacaggccattcacgcaaggactccacagagttggaatgaagaacgaaccaggcagtaccccctccattttatattagaacttcattcatatcaaagacgttttaccttttttttctaagtcaaattttaactttgataaagttcatactcccttcattttgtgtctagattctttaatatctatatgaatgtagacaatgctagaaagtcttacattataaaacagaaggagtagaaaacatggtatcaaaatatatttaatgttaaatttaataaagccaatttgatcttctagatatcaacatatcggtgtccacatcaagagccaactcgtacgatgcaagtactacaccgttaccaatagctacagtcaaaaatcacattgcagtgttggcatccattaaaatcacagaaaccaaggcccaaaactaccatgtaaacaaacataataatgtgtccgatcttgctcaattacaacatcatcaacatcaaacacagagaacgaggggtcggagccatacattatcatcttgggaagtgtttggtctgttactggggctagaaaggaactcttcaaactaaagtgcaaattacaaatattccaaaatttggactaagagaatcaagttctaaatactggacaggaagacagttagcttgacatcatgatttgatcgcatgcctgaagggcctggtttgcatagtatcctacaaccccgggggatcc

SEQ ID NO: 24398 - DNA, 5951 bp, Oryza sativa
cctttggtggatggggaggagcagtcgtcctatgaccccatgggggaaaagttgaagatgatgagcggcaagattatttcggaggagcagcgtctagtggagttggagttggagttggaagatgaagaggaggtggaagatgaggagttggccgagctgataacggcgcgagacttccgtgtcagctgggaacatcgctttacccctcgctattccttcaacgacaccagtaagtaataaatcctcctccgccccgccgttttattctgcttccgtttctttctttacttcaacgcaatcaagattatttctgcgaatctatctatcatgtttcgtatcaccattatatactggagtatataccactatctatttgtgctccaattctggttgttccaagtgtcttgttttattttgggttaagagattgccaggctaaatacctgtgtttgtgtgtcctcaactatatatgcaacacatttagcatgtgaaacaagtgctaggttttcctaattacactctataaaccatcacagtacaaatcctgttaatcacaacaggatactagaaagattaaatttgaaccagatccgatagattatctgacgtggtgccaactaattatgtttcatatatatattgggccgcaaaagcatgttaaataatctgagccaatttgtcttttttttccccttcatctagcacaatgaattctgacagaattaaagtggaatatcaattagttgctgattccctacttattggagcaataatccctaattttgtatgtttgtttatcttcttttttttttttcaaagtagcaggcaggagatctgctagctaaatacattagaagaagcaacaaatagagtctagtttagtacatactaaataggatatctacagcgccaagaatagcaacttgcatatcaaaatccgcattagagggtatcagcactaaacgctaagggtagctcgtttacgtcttgtatcaccaagaaaaccaccttgttcttgggttggtcctggaagaccctcatgtttctttcaagccggatattccaccacgtaacaagcaaagctcccaatactccctttctgttttcacatggtgtcattgcacttgacttgttccaccaatctgatagacaagtgtaggttgagttcattgctgtgatctgtagtttttagcgaatcatttcctacactttggtcgtgaaggaatattccttagcaagatgattggtgtcctcgaaaaagctttagtgcagagagtacaaatctcattacatggccaatgtcttttaagcaaatttttggttgctagtaccttgtggtgtaacaatagccaaccaaataattggtgctttggttcgttgtttgctttccagaggctggtaaaatttgagtatgacacacttccagtgaattgtgcaagatacgcgctttttgccatatatgatgtcattttttatccctggctgcagtttaaccccagctaatagatctgcaatccaaactagttcattgatttcttcaattgttgttaggggccttagcaggaaatctgttgtcagatatttcaactagaatagagttgtttgttctctttgctagtttgaacagacctggcaccagatccttttttctcccattctgaatccaagtaaatttcataaaactacaggtattttgcacaatttatcacaaaactacatatttaagagcttgtttcacaaaactacagatttaatgtctctgtttatcacaaaactacaggtactttgtataatctatcataaaactatatatttaagaacttgtttcacaaaactatagatttattgtattcgtttatcacagaactacacatttagtgtcttcatttatcataaaactacggatttagtgtctccattattacaaaactacatattttgacaatgctaatacctgtagttttgtgataatgaagacactaaacttgtagttttgtgataaatgaatatattaaatctgtagttttgtgaaataaattcttaaatatgtagttttgtgaaatattgtgcaaagtgcatgtagttttgtgataaatgaatatattgaatttgtagttttatgaaacaagctcttaaatagatcatgcaaagtatatgtggttttatgaaatttactcatccaattatcgttccagaaggtagctttactcccgtcacccaacgtgatggtagctgccgccgcaaaaggttctttgttgattgtatcacaaggaacctccatttggcgaagggccctggcgaactcctgcagctccaaaaatgggtccacccaaatttcttggtttggctggcatacagtcgcccaatttaccaaactgtgtccaggggtgatattttctgggtcttaccctttccacaaaaaggctctcctaattctgtcaattttcttgatcaaccatttttgtacgtagaactgtgagatggtatgttgggattgagctcagagcagtcttgatatgttgttcatcttactcctcattctcatcaaggttaatgtctagtactccatatatgtgcttatccacattgtcacatcaatcatttaactaaaacttggatttttgagtcaaaaatgggacacaacaatagcatccacaatgctattatttgataataaatattactgctacttgactgcagcaaccgtatgtcccatgcgctatacggagggacctatcccaagatatgcttgctgtggtgataccttgcagatcttctctctccaagtgaaagaagcaaaaggtggtcttgactggccgctgcatgtgtatggcttggttgccaccagggactctgtagatcaaaggcgcaaccttcttttcaggtgcacaagggataattgtcaaattctcactccacaggtatctatcttgtaatttccttatacctttattgttttctcatttttcttttgcagcttgaagtgctcaacctatcatactagtagattactactgttctgtacacttgtttgtataaatatgttgtctttttggagttattagtgcattcataggctggctgcacctaaactgtcaattgaaggcatgtttgcaattttttttccttaccactcttttttcacataattcattggtaaaaactaaaaactgaggatttgtttagttcccaaattttttttcccaaaaacgtcacatcgaatctttggatatatgcatggagcattaaatatagataaaaaaaactaattgcacggtttgcacggaaatcgcgagacgaatcttgtgagcctaattaatccatgattagccataagtgctacagtaacccacatgtgctaatgacggattaattaggcttaataaattcgtctcgcggtttctaggcgagttatgaaattagttttgtcattcatgtccgaaccccttccgacatccggtcaaacgtccaatgtgacacctaaaaattttcttttcgcgaactaaacacactgtgagttgatagaattggcaccactatgacctatacctatactccttttgaaataatccactcgtggtgttggcattgaatctgctgtgtcaactcttcctaccacagttttctataaatcaacctgtgatgatagttaatattatcaacagccaaacatagcagtattgccacatgtataaccaagatgagcactcactgttgcaaataaatgaatagcatattgcatgcaaaacataaattaggtttgtttattttaggcaatattatggcatactttcttttattggtagcaaagctattgcatttaccttgtctatggaaatagaagttttgtgatggaccgtctttaacatgggctcgtaggaaataactgcatggattggttgcatactggatccttattatacggagggaaccaagttttagtaataatcaattggttgtgatgcctgcaggattcacacctgctgttaacaggcccatctcgtgcagttgtggtaattgatccagtaacgtttgaagttgaactaaaggtaaaaggaaaaacagaggctgaggataaggtgttgagcctaagggtctttatgcaccacactgtgcatgctccgcagatgtttgtccagcaaacatggggagcttgagttgacatgtgctggacttgtagagcagttgaggccacaatggtgagtatccaagttagagaggggtcatggccagatcatatacgagggttggtcgtttgtcgtacgggcagcgtagagggaggggattttgtgctgcttgattctggagatggaagaatgcctattaacagctacgatggtggcattgagctttcaaggcgtcgtcgcacaacctcaatgtcgtcgttgcaagaggcagtgctgttttcaagcctcgccgtgccgggagtactagtcttgtatgggaccttgggttttgtaaggtggaagctactgtttgttggtcgctccacgcgaccttgaggcaaatgctctcgggcatgccttgatccatactaatcactttagcttgttttgatttttgagttaacgtacagctcggctgcatatgcttgcgtaattgtgtttttggcgtcatggtctgctcaaccccagccgtgttcaggactagtaccatgtaacatatatatgcttcaatgtcagaatccaacctttttaactttctgctgttttcttaatgaaggttagctgcctattcacttcactgaacgtacatgaagcgcagcagcagtttattaaccaaacacgtatagttagccagcagctacgttgaatcaaacaacagatcgaagaggaatcatccgttccgttccaccgccaaatccaatgtcatccaatcacttcaatttgcatctctcacatcaccatctcttacccttattcagaccgcaacacccttacatatatagcgtcaagtaatggaagcaaccacatacatacatcgttgcatacacatgcaggcctgcaggctgcagctaatccaatcccgaccaagaagcaaccggttcaattcattaacaccaattaacatatggatggatgcaatcagcaagatgcaaaatgaacaagatattttccccacaagcatctgggactggaagggacatgacatgcccacccttgttatcgtcaaatatcaatcttgacattatatcaagccttcatcttcaagttccactatttcgcaaaggaaaaaatatgaattacccccctaaactatcgtcgtcggccgaagttccctctgaaccaaaaaatcagacatcactcaccctaaacttttaataccggacgaattacccccctcgacccaatccggagcagttttgtcctacgtggcgcacacgtggcaacccagtcagcatttctttttttaaacacggtggggcctgcttgtcattctctcacctcgttttcctcttcccctcctacccctctccctctcgtgtcgttaggagagcggtgggcggtggctcgtcgtcaggagcggccgtgcggccggtcggcgcacacggcggcgggcgtgcgagggcgggcgaaagacgcgcgagactgggaggtgggcggccgcgcacggcggcgcgcgagcgcgggcggcgggcgcgcgccacgacgaacgagtgcggctggttggctccggtcgacaacgtgcgcggtggggcaagcggcggcgggcgcggttccggtcggggatgggtgcagcagggagggacaactggtcggcggcgagcgacgagcggtgacgggcgtggaggggtgcctccactcggctacgggcgcggctgggcgaacggcggcgggcgcgtctccgccgactgtgggcacaacactagttggcagcgagcggcaacgggcgcggctgggtggccctggtcggcggcgggtggcgctccaggcgacggcggggagggaccg

SEQ ID NO: 24399 - DNA, 32210 bp, Oryza sativa
ccgccctcgtgcacccgccgcccacacttgtccgccgccgtgtgcgccgaccggccgcgcggccgctcctgatgacgagccaccgcccaccgctcgcctgacgacacgagagagagacagagagaggggtaggaggggaagaggaaaaggaggtgagagacaatgacaagtaggcccaaccatgtttaaaaaaaaagaaatgctgactaggttgccacgtatacgccacgtaggacaaaactgctccggattgggtcggggggggggggtaattcgtccggtattaaaagtttagggtgagtgacgtctggtttttgggtttagagggaaaattcagccgacggcgatagttcaggggggtaattcgtactttttcctttcgcaaaatcaaatatcatcccctcatactgagataaaaacagtaagtatgaggggaacttttagaggttaattaaagcacatttatacaaacaagtgtacagagcagtgaattgcctactggaattgtgcacacattatcgtcccctcgtactgagataaaaacagtaagcatgaggggaatttttagaggttaattaaagcacatttatacaaacaagtgtacagagcagtgaattgcctactggaattgtgcacacattatcgtcccctcgtactgagataaaaacagtaagcatgaggggaatttttagaggttaattaaaatacaaaccacctcattccaaatatgtgaatgcaccatggcaggttgcccatttcatatttgaatgaaaccataaggattactagataaaaactctatccaaatatatgccttaagatagacaacaacatgtgaataactcaggtagcaattagatacgatgatgcttgtagatcaactattattctaaggtaaaaatatagtacagacgattattgcatcacagaatagctactaaatactaaagctcctacacaaagcattgtgaatgctcaaccaaaaaatacatggagcacaaatacttcagcaccatcctctaaatgattcattcatataagctattagccaggtttatggtcatgtgacaaggaaggaatacctggtcttctcggttttaacttgtagttagaccatatgcatgttgatatgatcagcatgcagttattagatgaaagaacagcagcctggctacaatttctaaatcattacaacaataggtgaaaagaagtaaactgcaagatagagtatataggttatacaatcgtagatagaggaagaactctagtacaagagcaaagcctgatgtacaattatgagataggggatttctctagaattattatgaagccaatcagaagatagggacacccaattactcaattaaatgatgcaacctaatagcatacagatgcagtaagtaataataaatgtaagatgagctagtaagatgcactcatcaatgaaagtagtggtagaattgagaagcatcctcaagaagaaaagtgtagtaacactagcaatcaatcccaaagagacaaattttgcgagcccaagtaattaattagcaacaaatgtttgaaagaaggtaagaagaaacagtaagggaaccataaacttgcactagggtatattgcttcacaaatcagttcaaatttgaatggaaccataaggattagtggaaaagaactctatccaaacatgcattaagatagataacacaacttgtgaattactacaaattagcattcagatgtactagcagcaatagatgaggttgcaagaggagtagtagtagaattgagaagcatcttcagtaacagtaactacactgtaacaatcaaaattcccaagaggcacattttgcaagcacaagtaggagtaattagccacaattgttcgtctgaaacaaggtaaacaagagtaaagttgaactagggtagggtacaattggttggcagatctagcaagaactcagcaagcagatccatatccctactactccactaagcttaggtttgtctttcttcatacacaaaaaaaaacatgtcatctgatccgatccgatccgatccgatctgatctgatgagagagaaagtaggggaacaagagaaagggggatggatcaggcggaggcggaggcggcggtgcgggagcggtagagcttgccgaagacgtggagggcagtgacgaagcctatgaagcagagcgacatgacgagcaccatggtgggcgagaggcggaggccgggcgcctcgtcggtgtagaatcgcagcatgttgctcccgccgccaccggagaagcccccggagccgccggcggtggaggcgcggcggcggcgcatgccggcggccgcagcggccgtgccgcgggggccaacggtggcagggcgggcggccccggcggcggcgccgacggaggactgggactgggaggaggagcgagccatggcgattcgggtggaagacagggagacgagacgacgaatagtctactctctgggcttgggtttggatctcacatgatatactagtactgtacatacacccgcccgcccatataggtgtccaaacgggcggcacggcccggcccggcacgggcacggttccggcacggcccgtttcggcacggcccgttaggcacggctgatgaaacgggccgtgccgtgccggcccacgtgccgagccgccggcccaagcacggcccgtggatggccgggccgtgcccgtgccggcacggcacgcccgcggcccacgggccgttcggggcacggcggcccgtgaaggcaggccgccagcccgccagcctgcagtgcacagtgtttttttttaaaaaaaaagcaaaggaaatgtataaggaaaaaaaattaaaaatggaaataaaatgtttaaaaaaaagtaatgatttactaatgttaaaaaatgaaaaaatggtatttaaaaaatggaaataaaagttttttaaaaaagtaatgatttgctaatgttaaaaaaaagaaaaaatggtatttttttgttgtgttgaaaaatttaaaaatatagattgtgattcattattttgaaataatttaaagataaatccacacttgcgaaaatattgcaaaagaatttgttaaaaatagtaatgacctttattgatgtttatatcattacaggatacaatgatacatgctgcctcgttaaaaactttgtcatgtaaaaactcataggggaaaatgagaaaatcatgacaaagaaaagagtacagctcaaaggtcagaactacttctaacaaaattctactggggttggtctggatccaggtagagttgctcgaactgggcggccaattcttggttgtccgcagtgtattgggcatgttgtcgagcaagctcccagtctttaacgcttagtagcatttcgacgtggtcgctgcgcagagtcgtcctccggtcttcgatgattcggccgcatagactgaaggccgattcggaggacaccgtcgacacgggcaccgtcaacacatcccgtgctagttttgaaagcacaagatatgttatcttgtggtcattccaccacccgaggacgttgaaatcttgtgcttcatggtggatggcgtcgctgtccaaataaccggacaactcttcggccacaacatgcgaagaggcgtctccacttgtagccgacgaactgccaccaccttggattgaacttgaagacgatccaccccaaatcctaccccactgtatcttcttcttacctgtagtggggataggagggggtctctgctggcgaacttcctgaaactttacttcatatcttccaaaaacctcatataatttacgtctaacctcagtataaaaagaactataatctacacctatagtatctccaacaagtgataaaatagcagacaatccccttaatttacacctaggatctaaaacaaaagcaagagcatacaacataggtatatttttccaatatttcaaatatttttgtttcatgtgaaagacaggttcagttagaacgtcatcattttcgtattctttaaataaagtagcaatttcaagaaggttgtgcaaaattatattagcagttggataataaacttgtgacaaagttagagtacaatcataaaaagtttctagaaattggtaaaatttttggacaattgcccaaacatgctcgttcagtactgaagacccgtcactgtttcttgggccaccacgtgactgaacaaaatcagaaagtaaactactataaggtaaaacaacttttaacattaaatacgttgcattccaccgatgctctgcatcggtggcaaacttacgagctttcacaccggccgcattgcaaaacctcttccatgcagcaatccgcgggttagaagcagttaaccacgcgattgcttgacgaacagcatcgatgtggtcacctaccctcttcatgccagtcttaacaatcaaattaattatatgacatgcacaacgctgatggagtagaaaagattgagcatacacacaaaataaaggttgcaatatttcaatagccctagaattagcagatgcattatctagggtgacagcaaatattttatcagcaagattaaattcattaattacttccctaattctttcagctatgttttctcctgtatgtgagacatctattaacctaagccctaaaactctcttttgtaattgccaatcatcatcaacaaaatgaacaactacgctaagataatcctctctagctctactactccatatatctgaagtaacactaacagagaaagtacatgtactaaacagttccttaagtgcagttgcttccttgtgataaacattctctaaatctctagttgatgtttgcctactcacagctttaaacctagggttatgagattgctgaatgtaatgttcaaaagcaggggactccccaaagttcaggggtaaatcttgcctggcgattaaccggacaagagattcccgagcaaccatgggatcgtactcccaactgtgtaccgtaccgtctgggtttaccataagttgctgctgccggagttgtattccttgcttcttggcacacgactccgcatggcgcttgaggtgacctgtaccaccagaagaacgagcagataaaatttgcctacatattctacaacgggctttcgatacctcccttccgtcggggcatgtttcctttatctcgtcgaagctttgccacacaccggaggttctcgatctcttcgagccggtgtgtgtcgaaacacttccgctcgcggttccggaaaatccttccgaagctgtctccgcctgaaccggtacctcctcaacgacagccgtatgaaccggtacctcctccacagatggtggagttggagccgatccggaggtaccgtcaaaccccgacatgtagttggggtcgaaatcacccaaggtgaacgacggcgactggtatggaaagttcggatccattctgaaaatttaaaccgacataaacaaattttcgaatatttattgaattcacaaacacaatacaaataatacacaaatttgaatattacttacatctttccaactgcgagctcttcaaacctctgcgatcaaactgttgaactacgaaactaattttgatttttgacaaaatttgagcaaattttgtcaaaatcaaaaaaaatgcacacttgagaacaaagagagcacttaaaacacttgagagcacaagatgaggagtgtgggatgaggagaaatggctggggttcatgccctatttatagggcgaaatttgagattttttggaattttttcgaaatttttatgaattttttagcctcccaacggttattttcaaatttgaacggtcaaatagccgttagtgccacgtggcgccttcccattcgaccgccgcccgccctgtccgcgcctgacgggccgccggcgtgccgtgccgtgccggcccgctacagtagccgtgccgtgccgtgccggcccgcgggctcggccagcggcccaagcacggcacggctactcgtgccgtgccggcacggcccgttactgtagcaggccgtgccgggccgtgcctgctacaggttcggccgtgccccgggccgcccgtttggcccggcccatttggccacctctacccgcccacatctctctctctgttttttttttcctcttcctgttggggcatgtaatgtaaccattcccacgaaacaagtagtaatccatcataactaagcagatgatgttgacgactactcttttccgggtaatacaaatccaccttagatttgcggtactaacagagtcatctaaaccaatgaatttagaaaaatatctatcttctaccctataattcatcaactacctcttacatccttcatacttcattcatcatcatcagatccaacggacgaaaatcatctctctcaaatccagtggctcccatttctcccaccttcttcccgggaatatcgcgcatcaataccatgccgccgccctctacaccgtgcgttcaacccgccacgaagaccgcccctccttcccagcgaatcttcatgttgcgtgttgccatgggtcgtccccgccacgaagaccgactcctcttcgtcggcatcgttggcgcgaaggtctccgcctcgggcaacccaccggcatcgtcgtccggccaacggtacctccgcggcaccaaagtccattcctcatggatacatcgaggacggacatgactgacgacacaacagtcgcaaccgttgctcaaggttgctactgttctcctcttgcacccatcttcattgttgactgaacctgaatggacggtaaccttcttctcgccctctgcattgcaggtctgattaagctctagtctccttcacttttaccttcccacttgtttctgccttccggtattctttgttttccactagcgtgtgatacatgagtgcaaggtgctcgatgaaaggtcggcaaggagtccactactaggagatcaatgcttgtggggggcaatgcagttggatctgctggcacaaagtggcacaggttagtgcctgctcccacatggcttgcaattggcattgatatctagatttttcagctctttagaaacaccatccaactcgctggagatgtgctgataggcgagctttctgggagaaacaatgtgtgcattatactgaactccattcaccagatcaacatatatataggctgcgttcttttctcagttcaacagtgattacggaaaacggagcgatccattagcacatgattaattaagtatctgctattcttttttaaaaaaatggactaatatgatttttttaagtaactttcgtatagaaactttttacagaaaaatgcaccgtttagtagtttgaaaagcgtgctaacggaaaacgaggactagaactgagaaaagaacgcagccttagtggtataaatttagtccttttttatgtgttaataccttggttcatcttcatgtctgtaagcaatgttggcaattcagcattttttgagagaaatgatatcatattgaaaggtccacgagttcagcattttctgtaagtgtctgtttaactcatatgcatgttgcaggggttccacgaggacgctaacgaccgtgtgatttattagtggaaaaaatgcttcagcccaaattggtctactgttttcagtcaatgtgaaaggaagcttaatgatatcaatgtatatatgggagtttagaggagttttgggtttgaggagcactctgtttcttcactttagtctctctcttccagcctatttatgattggagaactcttattgcaggaattgtcatttaaaaagagaagggtttgtcaaactaattcctttttgctacagctttcagtactgtccattaaatctgatgtgcttctaattaatcttatacacaatatgccaaaatttcagcattttaaacactgttgctttcatttgcagaacaataattggttaataaaactaacactatatttccattaccagctggtctgatgagtggtaattaattagttgggtgttgcaaatatacaggtagagagatagcagaaaggtatgccaatcagagatcttgtgggaattctcatctgtactatctctctacctgcatagattatattggagtattgcataatctcacaaaaatgatgggtcttcagaaggaattctagagatatttttgaaggaattctagagataagtctacgtgtgttgaaaattggggagtttggcacaaggatggaagaagatgggaacatctaaaattggggagtttggcacaaggatggaagaagatgggaacatctgtactatggtagtatggtctatgtgagattatgcaatacttcaatataagaatgggagaagatgtgaactctggttctctgaattatttaagtcaccagcaataacattacgacgaagtagtacagcaagattttaggcattggctaaccttttctgatccatgcaatggtgatggaaaaatcatagttgcaagccaagaattaactggacaatatgaagatacatatatgaaatttgtgatttttctttgtatagagagtctttttaatggataacctcgctctgcatcttactctgccactgaggccactacccatcttaagaggatatgattttaatctgcgttgtgcaggtatagatgcatgtacatttctcaaaaaaaacatattttagttaaaatacttggcatggatagcatatttacaatccgttagccatgtttttgttaaaactcttcatatatatttttaattcgtttttaattggttatctcctcttttcatcaaacgtgagcatttcaagagattattacgactattaagcaggaaaagtcctgattgaaaggaaacttgctgtcattatatctttttatatgcacatttaatactatttttatcatttatggatgtctaataaaatagcttcagatgttggcaaaccttccacgccaatttagtctaaaatttgattaccatgcacacacatatgttgtcgcacacatatatcgccattaataaatatcaccgtagcgttagcatggacacaatactagttaaaattggttagtggagccaatttaaaaatcaaaccaacctctaagctgatttaaatcgatctcaaggtaaacacccatcttatcgacgaattataaggtttataagacaaacctgtaaaaagcaccgcattctcgtagtgaaggcggataatttattatgcaaatcgataaagatggacagactaatgctacgtaaaagataaaatagaaacatggctgaaatgaaaaggtgaaagaacaattcgattgattgtgtaggggttgtggtggtggttgaggtgttagaatcaaatcagccttagctcttataaagggatcttatctccgcgtggcattctccacgtcctattaggtttagagatccaataggacttaataaaccttgaacccaaacgaggaaccctgagaaccaacaaatcaaactcggagtcgaactatatcggtttgaccagccctaggctgttgatctcctctcctttcttttcccttctttgtcttccccttggtctctctctctctctcttaagaaatggacggcacaagtagccgatcaaagcaggactagacagcggcgaccagatgccgatgaagaaatccaaaggaagaagcagctccccgaaggaatccttctaactaccacctatctacctcccgcttttgttcggacaaggcgaatttcctaagattcatccaccgcggatacactaagcgttcttcccattggtaaatctgattcttgcaaatcaacatcagacttagaagcttcatggggtctggtctcgccatttggcaatttaagccaaacaaaatacagggcctgtttggcacagctccagctccagctccaccctcctagagctggagctcagccaaacagtttcagctccactaaaactgggagtggagctgggtggagctctctcacaaaatgaactagagttgtggagctgggtttaggcagctccacaactccactccagacccaactcctgaagctaaatttaggagttggagctataccaaacaggcccacagtacagaggttataaccaatacaaaagcaagcgcgaactagtcagaaattagaatggagaagtagacacagaagaagaggttgttgggacagtatcgatagccgagcggcgagtatggggagtcctacgtatctcggggatgtagggggaagcgggtgctacatgtggttgggcagccatggcaaattaaaggcccgagatcgacgagctgccaatggcggccagttaggaagaagatgggttcaagcgatggcggttcacctaggtggaatcgatcaaatgactaaggatttggggactagggatggaggaggcgattgaggtgaaagggctcaccgggatttaggtgagcagttgtggagtcgagccatggcgcccaggaaggggaggccgccgcgagcaatgagaaaggtggcgccggtggtgcggactggagaaacctcaccgttgtgctgctccataaaaatggttgtgacattttggaacagaagtagcagatatttttgtatataactaataactctggtcataacaattttatgttcttgtccaggtgcatcatgcatggaagagggtcggcgcggctgacagggaaggaacaacggagaggagatcgaccagctggctccctactcggcgtggtggcctgctcccgcgtcatcgtcgccgctgccgccggaccttctcctctccctccttgcaccaccgaccttctcccgacccactggcctcctccccactcgccagccagcctgcgcagagaggtgagagagaggaggatgggagagaagaggggaaagaaagaaggtattggcgtggacaccctgacatgtggggcctgtgtgggtcccatgctgcctcagctgccatgtcggacaaaaccagggtaaaaaccacctaaggatctaaagggaacggttttgtaaattgaggggtgccatatatctggtttcatggttaggggacgattttgtaactcgatgacaaattgagggaccttcggtgtacttttttccgaaagaagaagggaacgactagctaatatgggcctggaaatgatggatcgaaagaggcccattaattaattagtacaacaccgaacgaaaagaagcgaacaaatgcatgcgaagttgcaacaaagaagagaagggaagtagccgttaaacggcagtagctagctagttgagaagaggtggttttgataatgaaatgtatatatagcgtagtagctgtagcttatatagggagttggcacgtacgcctaggtctagctagctagcgatcacaccaggatccaacacaaactgaacaagatccacgacacaaaagatcgatcgatcgatccatcgaaaatggcgaagcgcggaagcaaaaagaagaccaccgcttccacccgtgctctccctcttctccgacgatcggcaggcgagacggggacggccgagagcaaggaggagaccggcgcggcgtctccgatcaagaacgcgatcaagaacgcggcggctggcgagatggcggaggaggagaagttggccggcgcggcgtctcctctcctccgactccgatcagcccggggagaaacggggacggccatcaagaacgcggcggcggctggcgagatgggggaggaggaaacggcggcgatggggatcacaagaactcgcggggatcaagaaacaccaagaaagaaaaagggaagaagctggtaaaagaggcgatcaagaaacaccaagaagcgaggaaggcgaaggagatcggcggcgcgcgtggcaggaaggagagcaaggccatggatgacggcgcggcggcgctgcgaaggaaagcgcgagagatcaccaaggaagaggaggatgacgaacgtttgcgcggggagatggtgtcccgggttcgagcacggattcgtaagcagcaaccagacgaggtaactaataaaatcatccttttcgatttatttttaatttgatacgaattaattaatgacgatgaatcaatgatgcatatgcactgatccatcgatccatcgggagtattaactgtttgcttcttgtcaataatgagtagtatatatggatatgatatcatgcattagctaatttccacctattgaattagctacttaattagcttgcattatagatatgttaataatttctatctactactcattttaattaggttgcattttatatagatatgttcttaatttcgtttaatttctttccgctagctttctccgatcacgtacgtactactgctactgcatgcattaccattttaggagtactagctagctactagtagtattataatattggtgcgtcaatcaattactagctcgatctgcactagtaatacttaatcaattagtgtcgtctcctcgcctcgttcgctctattatacatggatgcatgcgtactatactcacaaacgtaggcatgaatattaaattaactcgctgcatgcagtagccagtagttgcatgtagcattttaaattccaactctcgatgaatgaatgaaattaagaaataatgaatgaatgcagagtaagttggatgcgttctccattggcgtcaacgctaatgtgcgatcgtaccacaagctaatgatgaagagatacaggcgcatgaaacgtatctgttgcatgacgctggccggggcgccggtgacacctccgaccacccggcggcgatcgccagacctcaagatgttaccacgttccacattgtgggcgtcgtcgacacagatggtgctcgtgttcgtctgctcttcagggacagcgacctatactttgttgctttcaaaactggttcttgctggttcagattcaacgatgaacacataccaacattcctcacgcccactgtacctatagcttacacctcgggctacatgaacatgtgagtagtacctctcactcgcctgcctctagctagtatatactactgctatccacattattcaatatatatatgatgacgcattgcatttgcatctctctctctctctctctctctctcttaatgcttgcattctggatacacacacacacactactgcatatgatgatcgacttcactcacagctgacagtttcttcatttttgcatggcacagtgcgcaagttcgggttggatatcactgtctttatgatatcttcaatgtaatctcaagatacacccctgagtcggcacaagagaagaccaatgagaggcaacggatacttcagtgtgcagctctcatgttgagtgagtcacaaaggtttggccacgtccagctactggtaaagagacagatccacaaaatgatgagtaaaaagattactgccaaacagaacaagaaaatacacagttggggttccatagcacgctactgcatatcccacgaatgcaaagaagacgtcctgcatcatttaagcacattgatcgttctgttcaaccccgatcaaaacaagtatgagaattacaaaatagttggcagaagaaaattgctatctcgagcagctgcagcagcagcagaagcagcagcaagagcagcagaagcagcagcacgaccatcgcaagcagcagcagcagaagcagaagaagaggaagaggatgatgatgatgatgaggatgaatacccatggcaatgccaaacaagagcaggacaggagctcctgattctcctctacgacaaaagattgcgtacccaaggccatcaggagcggaggacatagggtccgactgcctccaccgcttcaagctgaagacgagaccaacaagcagaagatgatgattaagaaaaagaatacccaccaccctgcagttccatcatcgtctgataatgtggaagatctccctactgtttcagcgccaccagttactccaatggtggtaacacagcagaagaaccacaagaaaactcaggctgaggaggttgatgaaaagaaaaaccaagagaatccaaacacagatgccactattggcgctccatctggaggtgaaaaccatcagaatcgttcattgatcagctgtgacgggattaacctgtatgaatctgatttggacagtctacgcggcccacattgggtgacagatgcaatcctgggctatgccttggccaaattttcaagagcttactcagatgatggcctactcctggtgcaaccaacgaacgcagcattgctgaacaataaacactatgttgctgccgaggccgaccacttgctacttgctagtcgtcgcctggtcctcataccagtaaatgataatctggatttcaaccaagctggtgatgggaaacactggagcctcttagtcatccacaagaccagtaacgatggtgttatccagttcatccaccatgacagtgtgcgttcaggggataactcatacaatctgcatgctgctcaaaagcttgcaaatgttctgcggggagtgctgcccactgctggagatgttattaacgctgaaacgccccagcagactaatggaaatgattgcgccatacatgttctggctgctgtacaggtcatatgcagatggtggagagccaatgccaacaagagtggcccagctgattggatcaggaaattggacaaaagaatcagtgaaggcaacattacacagatgagggcctccctcctgcaggacattgaaagagactgtcaaaagaagaaatcgaaagatcaatgagctacaatgaaatcctttaacgtgaatctttgcaaacatgcatgaatcgtgtcaatttgtttggtaatatcactacatactgcagagtgcacaattaaaatgtgtgtactacgacagtgagcttatgttaccttcaagttgatttgatatcacatctgcatattcatctctcctggtcttctgatccatgactaagaaaactgttcattagttgcagttgcatttggaattaatttcactagtaagctcatactttgtattttgccaacatggactgcataggaagtttgaatggtttcagaccttgcatgacctttgcctacctgaatgtgattatcgtttggaatggcttacctggagattgaccgagtagttagttactggctgcacactcaaacaataaataaatcaattgcaggaatgcaaaaataccatgggcagccacaagcacaacttatttgtatgctacaagaacaaacagcatgcagaaggaggattagagaggagagaaggtatgtggcgtttggaaagaggcgaatttccgaagtggaaaaagcaatcagctgcgctaatcccacagaaacataatcctaaacctaacattgtctagtgtgaaatttgagacaagagcaacccaccaaatctatgtccatccgtatcgacacataactcgttgggccaggtatgatcatggtgtggtcggtgagggagagggcggagatcgaggaggctgagcgcgccttggtcgcggccatcggtgatctgccttgccgctccagcgccaccatccccatccccctgcccagctcagctcaatgcggctcctcctcccctgctttatgtgggttgggatgggctgttttatgtggcctcttgttattaactagcaagagacacgcgctacgctgcgtgtggacatggatagaatccaaatgagctcatgacatacaacacatacaaattctgttcaagatattagtagttttaatgtacagtatacacgctgtaaaaaattgttacaatccaaaataagcatgacaggcaattgtagatataaacgggcgcccaaacgtctgtttgtttcttccctgatatattgacaattttgaaagagaataataagatattgatggggcacacaacccaaatttttgtcaaatgcagaaacagggcctagctaaagggataataaacctatgtgctttcagataaacttcatatatactgggtggagtgcaacaaaaattctaagaaagtaatgtagcttggatggcaaaggaactaaatcaaaatagaattgtttcaacgatttacgattccactgaactaacacaacatacatctttacatgccttacctgcaaacacaaaatatcagtcattccatagcattttttccgtactattcttaaaagttaatattttattaactctatcacacacacatatataacattaggacaaaatgaactaaaaaacatggcagtataactgcttcagatgttaggacatggttacccatggaagatctggtggtaggcctttaaaaataaaaatatttcatgagataaactgcactaaaatgggagtctctaaggacatggtagtaattagttgtatggtgagtacattgctatgagagaaatcatatacacaattcatacatgactactaaaatgtgagaaccaaaaaataatgtttgctgaggcaatgacaggctctagtacatccttgtgcactataccttgctaaataaaggatttcctgcaagaggaatccttaagttgcaactttgagattctgtttgagaaaaccaggagggcagatgcactgaaggaatgagcatagtagcccaaatacaggcttgaatagatttatccttcaccctactgcattccctaaaagaaaaagaagtatgacattagtgttttctcaaaagtaaagtgacagatgtacatgaatagggattgttttttttttaaaaaagcatccatatatatatgcattggccatgtttttaaaatgtgatacaatagaagcaggccaaacataacatgtaagaaaatcaaccatggaatcatcgtagcatgtggataagtaccacaggcaggaatcatcttcccgtaaatcgaaagaagcgaactttaatcaacaatgtagcccgtaatagggtgtgctatcaatcctatgtgtaagccttcgtgcatgcttagtgcacagtccagtcaagaaagagtgaactaatctattgcggaactgcggactgtagaagcacaatcaagttgtatgaacttgaggacagtaagcttccttgctaaaatgcataatggacgatttgtttctgtgctgtatcaaggcgattaggagaaagcattaaaattaaatggcagtcattgaattatagttcatctcatccttggtaacaaatttattagcaagcagactactaatgcgtgtctctgggtcgtccccccggtcgacgccgtctcgttccgttcgcaagccgtcccctcgctggaccgcgcgtcccccgctccttttcgcccgggcgccggtggaagaaacccgttgtgtgggtatgggtgcttgaggcgacgacccccagagtgaagatttcctcttccacccctctcagtctcgacccccagagtgatgagattccggcggcggcggcggcgaggagagggagaggcgagaggtggcggcgagagggagagggaggtgcggcgggagagtcggagagagaggcggggtcgacggcgcctgcataccagatctgggacggctggaaggtcggcgacggcggcggggcggacaggtcggcgatggcggcacggcggggaggtcggagtcggcggcggggcagagcaccagatctggcgacgaccccgccgacgaccggcgacggagatgactcggcgacgaccccgcgacagcaacgggcggagggagcgccgggccgttctccccgcctcctccgccgccgccgcgcccgccaccgccagcgccgccaccgagtctcacgggagagagagggtgagaggcgtcgagccggcggaggtgtcgaggcggcgctggcggtctcctccacgcgggagtaattgagagagggggaaaagagagggggagggagtatagtaaaatatctatgtgggttttttggtttctactaggggcgcgtctgatgcgcgagtgttcgcgtagcgcgaacgagaaacaacaatcaaaagcggtcgcttgacttcgccatacgccactattccgctggttccacgcatcacgtgtccccgcgggactcatctattgcaagcctcgatactactctccataatcgtaattaagcaccatccttaactaacgttttaattagggaaattaatgatttactattaagatttctttaaagaagaaacataactttatattttttaccataaattattccaattaatatctatccaaacactatttcttttaattttctttgcatggactaaatgcctacagaaattcttaaaaactttctaccagtaaactttacacgagaattaaaactctttactctcaaactttatactcgaaaactttatggacataaacttgatactcggaaactttatacacataaactttatactcagaaactttatactcaatttttttatattggaataaatatatttattttgtaaatcatgacttctaaaggacacaactcgtagtatactccctccgtcccataaaaaaccaacctattactggatgtgacacatcctagtaccatgaatctaaatattcctatgtccggaattcgttgtactgtaatatgtcacatccaatcctagattccttttttttatggagggagtatctagtattgaagcaaaaaattaaagcaataaaaataagtcagcaagcagaaactatatcgcacatatatagtgtaaatgcaagaagactaaatgagtttatcacataaaaacatcccgtgtggatcccactctagtaccaagaggcggcaaatatagtggttatagtgacctgagtagtaccctaaggtcctgagtttaaatctgccgtttcgctactaggggtatcctccattgttaagggggtttcctagatagtaccctcagttagtgagggtactctaagagtatccctgattggtgatgccctaagcccatcaccaatgcagctctccaacccgtgtccctagctaatgccgtcccattttgacgccgcggcgtgccccagcagaatagcgtcccccagcagagggacgcgtctctaccagcgcctggactgggggatcgatccgggagacgcgctgggtcgggagtagcccaaggacactgctccatcccctggtttttccccttccaccctcgtccccttccaccagcgacggcatggctccgcggcggcggcgaccctcctcgtcgctcttgcggccgccggcgacgggagagagagtgacgagtggtaggagagaggtgaccgtcggcggcgagggagagagggagacgagcagcggagaggatgccgacgacgacctagagacctccgccggtgccgcgccgccgcggcctcctcctcgatgcggcgcagccggggctgctccatcgggacgacctagagaccttcgccggcgccgatctagccgcgagggggccaaatccgggcacgacggcgccggatctgccgcctccagctgccgccggtgccgaaacccacgcgcggctctctgacggcggggcgaggccggcgcgaggcggggaggactgcgacgtccaccgcaacccacgcacggctctccatccgccacctcgacccgcacgacgctctccgtcagcggcgacaaagggcggtggcaaggagagatggcgggagagagaggatgagggagagagcggcgacgggtgagagagggagagagaggggagcagctgccgccaccgccgccgccggcctgcatccaccgtcggagtccggcgacggcgacggcacgagaagcggaggggaggagaagagacgggcggagacgagcctaccgatggagtaaaggggaatttaactatttgctactattgcatttggcacttatccaaatgcccctcttatatttgctcctttttttgctcttcttaggtgatggcttcttaacaatttaccacttttgcctacgtggcgtaccaccatggcttgcaaacccaaaaaagtagtgtgggacccacaagtcagcctctcttcccttcacttcatcttcctcctcgctcatcctccagctcgccgacggggaggagccccctcctagtccgagcccggtgccggcaagctcccacgcgcatgcctccctccgcgagctccctccctacgtccctccaagcccagcgccggcaagttccctccgtgctcggcgtcctgtgaccctctcctcggcagcggggaccatgaggcgtagctccggtgggcgaggaccattaagatgtacgcggccttctcctggcacaccggcttgtcggaccaattgagcacatcggcggccctcggggtaaagtgcggcgagcgcgcggtccgctgccgtggcccgcgggcgtgtcgcccacggtggcgacgagcgatggtgtcagcaccgcagacaacagctgcgacgcgttcgccggcacgatggagaggttcaggagtgcgcgcaggccattgttcgttagctccatcggcgaggagagggacgtcgggcatggtgggaacttgccggcgccgcgcctggagggaggtagggagggagcttgcggagggaggcgtgcgcatgggagctcatcggcgtcgggcttggagggaggcggggagggatgctggactgggagggggctcctccccgtcggtgaactggaggaggaagatgaagtgaagggaagagaggctgacttgtgggtctcacactgcttttttggggttacaagccacgtggcacgccacgtaggcaaaagtggcaaattgttaagaagccatcacccaagaagggcaaaaaaaaaaagagcaaatataagaggggcatttggataagtgccaaatgcaatagtggcaaatagttaaattccccatggagtaaatgagggagagaaagagagggggagggagaagagaggggtaatattgtaaaatacctacgtgggctttttgggctagggacactcgttgggctactatcgttgggctactagtggtatccttgattgcgaggggagtttcccaaagggtgctctcagttagtgaggacacccatagagtgtccctgattgtagatgctctaagttaagcttgcattagcttatagtgaggacaaaactccacgcctgggtcagcctgacaacatatgcgctagaatgtgtaaagataatggcaaggttgaaaggcaatatattcaggatatgacaagaaagctgaatattctttgagtgatggcagtggaactgaaaattataggaacatgagagaaccattaggaataagaaaggggacccggcggcggagatgccactggtgatctggaatgcttgttgctcctcgtcgtcgaaccatctccaccgacgcaaccggcctagagcacgtcaccgccgcctcctccgcctctagatccactcggtcgtcggcaccacctcgccactcgtcgaccactgactccaccgcccggccacccgccggcccgttgccctacgccgaccccgtccacgctggtgcacggggtactcgtcccgccggtctcgccgccccctctgcctggagcacgccttcacgccgtcggccggcccgtcgccctacgcctctccaccaccgtctccgcgttgcttccgcccgacctctgctccaaaccaacgctgggtccccttccgatctggaggccgtcctcgacccttcgcctcggcgcgccgccggcctggacgatggggccccgcctcctgccgtccgtcgggatgccgcgtggacgcctatctctctcagctcactcatatactcccttcgtactcgtggttagctcttcattgtaaatatatggtccacctgtcagtctcagagattttcttggttcctgtgcctaagctggttgtaagtgctcatctctctcctctcctctctcatctaaatatatggtccacatgtctgtctcacaaattttcttggttcatgtgcctaagctggttgtaagtgctcatctctctcctctcatctctcatccacctcagcatttagccttcttatagtcctctattatacttgctctaatagctattaatcagacgctaatcgcaatgttaatctaacttgtaatttacgtagttagattagatgatccaacaattagaaaacttctgtgtacacttttctatgtagatgtaagaaagaaacaactggtgctttttatattagtatagagatagatatagattatattataggaacaattgcttatttcacctcgttttgaactctaactaccaatttcatactacttttttgttgtttatttatttgaccctccttttcaaaaaggcacactttactacaggacactatgatttcgtggttttacccgtaggacactgtccaaactcacttttatgggaaaacactcccataaacgtggtaatttgccaatggacaccgctccgattaaaataatgatttccggttgaggaggagagagaaatcacataaaatgtcaaaaatgcccttgggcccacatgacagctctccatctctctttctccctcctttcactcttctccctgtcacggcttgctcaacggtggcggcaacgtccggagcacgcgcgacctactcggcgatggtggaggaggcagcgtggcttgctcgggtgcaaccaccgtgacgaagccgctggagtggctagctcgggcgacgccggcggtgaacgagccaccgagcaaggccatggatgccgccaagcaaggccatccggcggccaggggcagcacgtgtgtcaccttgtcatccctatcaacctcatcggacaccgcagacgtgacgtcgaccccctcgggggactccatctgcgccaccgcgctgtcgtggacctgcattgacgggactccatctgcgccatcgcgccgtcgtggacatgcattgatgacatcctagacgccgcacgttcgagcacttttgcgtgcataccggcggccgcgccgtgctggaggaggtgcagcgaagcctcagcctcggcgacgtccgaagcacgcgcagcctactcggcgacggtggaggaggcaacgtggcttgctcgggcgctactgccgtgacgaagccgctgaagtggcttgctcgggcgacgccggcggcgaacgagccaccgagcaaggccatggacgccgccgagcaaggccattcggtagctaggggcagcacgtgcatcaccttgtcatccctatccacctcattggacaccgcagacgtgacgtcgaccccctcgggagactccatctacgccgtcgtggacctgcattgacgggactccatctacgccgtcgtgccgtcgcggacatgcattgacaacatcccggacgccgcacgttcgagcacttttgtgtgcatgccggcggccgtgccgtgctggaggaggtgcagcgaagcctcagcctcggcgacaacgacatggagccgagcaagtgcacgcttgtcagggttatggataccacatacccaatagtaattgactaagctcagcggggcccaccacataccaagtcttatacggaaacaaacctcatatatagaaggagttccggataaggaaggataaatagagttctatatggaaatgacaaggactactcggattgtatccatatttatctccctagtcttacttggacaagggggcatctatgggtataaatacaagcccccctaggaggagaggggatacgccactgttgacgaccaaatttggtaatctaaggatcagagatgaagaagaaatcgagaagaaattgagatggagatcgtcccagaaatagagtgaggatcggctgaagtccgaatcggctacggctaagatcggcagagttcgagtcggacggggttagccgattgagccgaatgtgacaatatgacgcagcatatgttgtcggtttaggttgatgtgcttcatgatgatgtccgcgcatggatagagtcctgagaaggcaattttatctattaattaggatattttatgtaaattccttagagatatgtttgggcaaaagtctgctgcaaagacttatggtatcttagagtttgttagagataagagtcgtgtccgatatggacatatcttgtaattctcgggtataaatagatccaaaccccatgtaatcgatagaacacacgtttaatacaatctcggcgcatcgccaccctttttactttcgttttgtttcgatgagttcttgctttcgggttgagctgcatcggtttcgatcttcaacaagaggtaaaactcgttatggcggcttgcgttctcgggattagtgcttacatctttatgacactctactcttgtttatgtaattcgtcaagttatcatatatcttacataatcttcgataacatcgttatctaacctacaatcggctaacatcgttatcttggactctatttttgacagacatagatttgaacagcttggttgacatgttttcaactcaggaaatagatagtctcatctccattattccagctgacaaagcaccagggccggatggtttcaatggattcttcatgaaaaagtgttggcatatcatagctcaggactattatagactggcagctcatttccatgttggaaatgttgatttggaaatccttaatagctctttcataaccctggttccaaagactgttaatgatttcagacccatttcccttatgggtatctaaaaatcttaattaaattgctagccgacagacttcaagggataattcttaaactgttgagtgataaccaatatggtttcatcaaaggaaaaaccatacaagattgacttgcctggtcttttgaagttagactttgaaaaagcctttgataccattgagcattctgcaattatttcagttatgtagcatatgggttttcctccaaaatggattgagtgggtacagatggttttctctactgcttcttctgctgtgttattgaatggggtgccagggaattctttcaaatgcagaagaggagtcagacaaggggatcctctctcacctctgctttttgtgttggggggagagctgttgcaaagagtaatcaacaaagcttttcatcaaggccttctgtcaaaaccaattaatgaaagcagtggggatggtttcccaatcattcagtatgctgatgataccttgatcttgttaaaagcatctcagaaagaagtcttctgtttcaaggctattttgaatatgtttgctcaatccacaggcctcaaggttaactataataaatcaagtctgtacccacttaatatgcctcaggacaaagctgtcttactatctggcattttgggatgtaagatcggttctcttccattcacttatttggggctacctttgggaaccaccaggcctagagtggtagactttgctccgttggtagacagggttgaaaggaggctgacagcaagctccatttttttacctcaaggaggaagattaactttgatcaactcagtcctgtcttctatcccaacctactacatgtcctcattgcagctaccagttactgtcatcaaggccattgacacagctcgtaagaattgtctgtggagagggaataacccttcttctacaaggaaatctctagcttcctgggatagggtgtgcatgcctaaggagaaaggaggcttaggagtgatcaatctgagagttcaaaacacagcccttcttctaaagcatatggtcaagttctataatggtgctgatttaccatgggtgaaattaatctcacaatcatattatgagtataaagttccacacttgatgatgaataagggttctttttggtggagggacatcacatctcttgcagacatattcagggggatagcaaaatgcgaaatcaggacaggaagaactgcccttttctagaatgatttatggaatgatgattttaagtgcaccagctaccccaatctctttgctgtgactatgtatatgtctgattcagtcaaggccatgtgttcaagacccttagaagactcttttgcactacccctctcagatgaggcttattcggaattcttgcagcttcagggggttctggacagtttgactttacaatcagggatgggggatgcttggaattttatctgggactcagataagtacacagctaagaaattctataagctaaattattctgcattgcaactccccaggcccatgatttggctatggaaaacaaaatgtgtcatgaagatcaaagtctttgcctggctaatgttctgtgataggctcaatacaagagatatgctggatagaagatattgtgccaaagaagatgatgatctcacgtgtgttttgtgcaatgcgaattgtagagagacaaggctacacctcttcttcttatgtcctttcagcatcaggtgttggcaatacctgggaattgagtggaataataatttggagtttttcccaatgatatccctagcaagaatcaaatttgctcagaagggtttcctggaaattttctttttggcagcttggcacatttggaagcaaaggaatggcttcatatttcagaacattcagccctccttccagacatggagatctctttttgtcaaagaagttcttctgcatatgtgcagaatgaatgatcctttaaagcaaactgtttttaattgggtacaaaccttatagtctttctgtgtgacccgcatgtaatctctgtaaccttgtaaatattttctttatttataaaattacactgttgggcaaagccctagcagttttcctggtaaaaaaaaacatatgctaatagagggcagccgaataggctaaataacgacatttgcttagattatataggatatctaccactctaggaatcgtccagtgacttgattgtctagatattgttcttcttttcatacttaatactgcatcagttgagtttgatctattaagtcgtgcttagaatttcaatctctagcctgccttctggttgccgattagggtagcatcggggtttcagccgatcttacctgatttaactacatctattttatacacctgattgacatgttaaatctgcgctttatagtaagatcttgtcgcatttaagtatattagtcttttgtttagtatattttacttgctttaatatcttaatatagagtagtatcggagtattagccgatacatgctagatctatataatcggctatgctataaacgtatatagtcttgttattaatatatattttgattggagtgatttatactgtctcggcatgacgaccgatctatcccaatcacttgatttaattatatatcgacataaggactatatgtcgttaatatctacatccgatcaagtagatttagttctttcttacttattaatgattgccgatcgatgcatatatgacatcggctcaaagataaatgatatgtcgtcggcacctagctgatcggctatcgtttatggatttaaccacggtttctttgtccttgtttcttgttgattgcaggatcaaatcaactggcacgctagcatacccgaaggcgagttttggacctgcattggagttaagtagatctctcaggcctcgtgtttttacatcaacaatcaacggcggcgacggcccgatgctgggcaaatctaagccgtctgatctaatggatggctccaatcgtccctgcgccggatgatgcgccgaccgagagagaggggcaaaaccttagctcccaaatcgttctctcccgatcccattgccgattagggtagtatcggggtttcagacgatcttacctgatttaactacatttatcttatatgccttattgacatgttgaatccgccctttatactaagatcttgacgcatttaagtatattaggctttcgtttggtattttttacttgctgtgatatcttaatatagagtggtatcggagtattagccgatacacgctagatctatctgatcggctatgctataaacacatatagtctcattattaatatatatttcgatctaagtgatttatactgtctcggcatggcgaccgatctatcccaatcacttgatttaagtatatatcgacataaggactatatgtcgttaatatctacagccgatcgagtagatttagttctttcttacttattaatgattgccgatcgatgcatatatgacatcggctcaaagataaataatatgtcatcggcacctagccaatcggctatcgtttatggatttaaccacagtttctttgtcctcgtttcttgttgattgcaggatcaaatcaactggcacgatagcatacccgaaggcgagttttggacctgcactggagttaagcagatctcccaggcctcgtgtttttacgtcaacacgcttttggcacgcccggtgggacagatcagaagtcagaatcacaacagcaattttcctcatggccgagaaaccgccagcatcgccgtcttcggctggtaaagatggttctgctaagtcgaagttcccgaggcttggtctatctgagattaatgatgacaacatcgtacccgtcactccggataagttgacacctgagcagcagatggatcttgaggcaatgatggagcaagcacggaaccaattcttgaactcattcatggagacccgaaagggaacgcttgttcagaaatataaagtaaaggtaattgctgatgttcctaggacaggttcttccaaagatggagaagtaaagcaagcttcagatgatgcagctcaaacaagtgataaaggtgctgcagatgactctcagggggttcaaggtgatggctctcaaggggttcaaggtgttggctcttagggggttcaaggtgatggttctcagggatttcaaggtgggaatcttaatcaggatggcaatacggcacaaggatttttcaataacttctaagatcatgtcgactatgctatgcaacacgctttgatcaaccaatctggagtgctagtcaatactttgtcaaatatggtgaagtcgattgttgatggcacaatagctgaataccaggctacaggaccggtttatttgccaggaggtgttttcccgaattatcggcccttaatcaccgataatcagccagctgttaagtcagttcctctcaatgcaccatcggctcagccgacggcaccagtatcagctcctgcacctgctgtaccatcatcggcaccaggtcaattagttaatcctcagttgttggtgagagaacagccacaacatagtggacagaatgtgaatcggctaactcaagaccaagttgcagttatgttcttaccacctcagcctactgctgacccaatacaacaacagccgattcaacagacaccaccaagccagcaggctttgcagtcaacgcaacagacgccaccaaggcagctggttgtgcaaccgatccagcaaacgccattaaggcagcaggttgttcaactgattcagcagcaaggtgtgataaatgcatcggctgggtttgcaacatcggacaatcagataaggcagcatactgcgaatcaagttgtcccagagcatttggttcatcatgtacggccagaccaaacggtgatgcctcaagttgttcctaagcatttggtgcgcaatattcagccaaactttcaaaattaccagggggcaatttgaattatcagtatcagtctccttcaccgcaagttcaatatcaacagggaggaccggctcaatcccagtttgtttctcaatacaatcaattcgagcccatgccacaacaagctcaaggagtgcctcagcaacgaccatgggctgatatgattgcagatgtaatgagagacagtttggactcaagccgaaggatgctgggaatatgtatcggcacccataccctgaatggtttgaaagggtacaattgcctaaccgatacaaaattccggatttttcaaaattctcggggtaggacagtgtttcgacttatgaacatgtcagccgattcttagctcaatgtggcgaggcatcggctactgacgccctgagggttcggttgtttcctttgtctttgtctggatcggcttttacttggttttcttctttgccatatggatcaattaacagttgggccgatttggagaagcaattccacagttatttttatagtggggttcaggagatgaaattgtccgatttgacggcaatcaagcaaaggcatgatgagcccgtgaaacattatattcagaggttcagggagatgaggaataagtgctacagcttgagcttgactgatgcccagttagccgatttggcttttcagggtatgatagctccgatcagagagaagttctcatctcaagactttgatagtttgtcacatcttgcacagaaggtaaccttgcatgaacagagatttgcagaagccaggaagaactttaaaaaggttaatcatgtttgtcattacatatatggatcggacgatgatgatgaggatgacaccaaaatagcggtagccgaatgggttagaagcaagaaagttataccatgccaatgggtgaagagttctggaaaagaagaaaggtatgactttgatattaccaagactgataagatttttgatttgctacttcgagagaaacagattcaacttcctgctggtcatacaattccatcggctgaagaattgggcaagaggaggtattgcaagtggcataattctgggtctcattctaccaatgattgcaaagttttcagacagcagatccagtcagctattgagggaggcaaaattaaatttgatgattccaagaggccgatgaaggttgatggcaatcattttcctgtcaatatggtgcacacatctggccgaacaaccgatggaggaagagctagaggctttcaggtgaattcggctaagattatcaataagtaccagaagaactacttcaagcaacatgagaggcgttataaggaagataatggtggttttgatcctcattgggaaaaaaagttctttagattttgctggaatgagggtatgaggctgccatctattgaagactgtcctgggtgtggtgatattgcggaaagttcaagacgatcgtataatagaagcaatcggctaaggcagactagggttcctgttcatcagaggttgggcccagtaaaccaggatcatgacaaaggagatgatgaggataggaagactcagtggtgttcttttggtatttttacaaagaatcaaaagagaagggttcagaagttgaggaatagagaacgctttcaggagttgagcaagagatcaaccatcggttgaagaagacgaagccaaaataggagtggcatgttaagagtcaagttcctgtagccgatgaagcaaagagactagctaaaggaaaaagtgttgtgactgtatcggttaacatggttttcacgttgtctgttgaatttggggtcaagcaagctgatgtcgatgaaattgaagaagaatcggctaagttacttttatcactagaacaagcagtcttcgagaagccggaaggaacagagaatcggcatcttaatccattgtatataaatggatatgtcaatgggaagccgatgtccaagatgatggtcgatggtggggctacagtaaatttgatgccttatgctatatttagaaaattgggcagaaacgttgaagatctcattaagacaaacatggtgctcaaagattttggtggcaatccatcggaaaccaaaggagttttaaatgtggagctgacagtcggcagcaaaactatccctacaacgttctttgtcatcgatgggaagggttcctacggattgttgcttggaaaggattggattcatgccaattgttgtattccttcaaccatgcatcaatgcttgatttagtggcaaggcgacaagattgaaatcgtgccagccgacaggtcagtcaacgttgccagtgccgatttagcgctttgggagatggatggtctcgattgcttatctggaaaagtttgggatggagattttctaaaagtgtccgattctgatatacagccgattgaagatggagaacccaagctattattttgagggcgtcgtggagggttcaaacgtctacaccaaggacacaatggatgatctcgatgacaaacagggacagggtttcatgtcggctgatgatttggaagaaattgatataggtccaggtgat

SEQ ID NO: 24400 - DNA, 10841 bp, Oryza sativa
atttgaataaagctaccccaaaagacgagtatccaatgccagtagccgatcagttagttgatgctgcttcagggcacaagatattgagttttatggatggaaatgcaggatataatcaattttttatggctgaggaagatattcataagacagcttttagatgtcttggtgcaatcgtcttatttgagtgggttgtaatgacttttggcttgaaaagtgctggagccacgtttcaaagagccatgaattatatatatcatgatctgatcggctggttgatcgaagtttatattgatgatgtggttgttaaatctgaagagatagaggaccacatagccgatttgatgaaggtttttgaaagaaccaggaaatatggcttgaagatgaatccaacaaagtgtgctttcggtgtatcggctggccagcttttggggtttcttagtcatgagaggggaattgagataactcaaaggagtgttaatgccatcaagaaaattcagcctacacagaataaaacagaattgcaagagatgatcggcaagataaattttgttagaaggtttatttctaatttgtctggaaggttagagccttttacactattgttaagattgaaagccaatcagaagtttacttggggggcagagcaacagaaagctttggataatattaaggaatatcttagctctcctccagttttgattcctccgcggaaaggggtaccttttaggttatatctatcggccggtgagaagtcaatcggctcggttctgattcaggagttggaagggaaggaaatggttgtattttacttaagtcatcggctcttggacgcggaaacgagatattctcctgtagagaaattgtgcttgtgcttatatttttcctgtacaagattaaggcattatctattgtccaacgaatgcactgtcatatgcaaaaccgatgttgttaaatacatgttatcggctccaattttgaaaggaagggttggaaagtggatattctctttaacagagtttaatcttcggtatgagtcaccgaaggcagtcaaggggcaagcaatagccaattttatcgttgatcatcgtgatgatttgatcggctcggttgaaattgtgccatggactttattctttgacggatcagtatgtactcgtggttgcggtatcggcttagtgataatttcccctaggggggcatgctttgagtttgcttatactattaaatcctatgcaaccaacaatcaagctgagtatgaggcagttctcaaagggttgcagttactcaaggaagttgaagccaacgctattgaaattatgggagattctttgctagttatcagtcagttgggaggagagtatgaatgcaaaaatggcacgttaatggtttataatgagaagtgcctagaactgatgaaggaatttcggctagtaactttgaagcatgtatcacgagagcaaaatactgaagctaatagtttggcccaaggggcatcgggatataagccgatgatcaaggatgttaaagttgaggttgctgcattaatagccaatgattggaggtatgatgtgcatcagtatttacagaatccgtctcaatcggcttctcagaaattgagatataaagcgttgaagtatactttattagatgatgagctttattatcggatgattgatggggtgttgctttaagtgtttaagtgccgatcaggctaaggttgtaatcggcgaagttcatgaagggatttgtggcactcatcaatcggctcataagatgaagtggttgctttgacgtgcagggtatttctggccgacaatgctggaggattgtttcagatattacaagggatgtcaagattgtcaaaaatttggagcaattcattgggcaccggcatcggctatgaatcctatcattaaacattggccatttagaggttggggaattgatatgatcggcatgattaatccaccatcgagtaaggggcataagttcatattggtagcaaccgattattttaccaagtgggtagaggcgattcctttgaagaaggttgattctagggacgctattcaatttgttcaagagcatatagtctatcgatttggtattcctcaaaccatcacaaccgatcaaggttcaatctttgtgtctgatgagtttgttcagtttgccgatagcatgggtattaaattgttgaattcttcaccatattatgcacaagctaatgggcaggccgaggcatctaactagagtttgatcaaattgattaagagaaagatttccgattatcctcggcaattgcatactcgtttagccgaagcgttgtggtcttatcggatggcttgtcatggatcgattcaagtccctccttataagcttgtttatggacatgatgctgttttaccatgggaagttagaatcggctcgagaaggacggagttgcaagatgatttgacagccgatgagtattataaccttatggccgatgaaagggaggacttggttcaatcaagattgcgagcccttgcaaaggttactaaggataaggaacgagttgctcggcattacaacaagaaagtggtacctaaaactttttcggagggtgagcttgtatggaagttgattttgccaattggaacttgggataacaaattcggcaagtggtcgccgaattgggaaggaccgttccgaatctataaggttgtgtctaagggagcatacatgttgcaacgactcgatggagaagtctatggacgagcgctaaatggaaaatatttgaagaaatattacccaagtgtttgggttaatgcatgctcggctagtgttgccgatgtatgatagccgatgtattcacatcgccttgagatggccgatattgttatatcgccctttgttgtttttcatattgtaatcggttgtggtttgccgatgtgcaatggccgatattgttatatcgcctttggttgaagttataattttatcaatgcttgacattgtaaaattaggggggcacatatatgaaaaattgcagatttttgagcaaaatatggagttcttttgaatcggcataaaagttattgagatgagttagatacagagccaaagtttcttagccgattacaaaaattcctagagtctattacacaagatatcactgagacagatagcgttgaatagccgacacggcccgttgcctaatttgttcaacttctttgatggcttgggcgtcttgagcatcggttccagggatgactcttagagacttggtcaggtcagcgacattcttgatagccgattttagccgtgacttatgttcttcaatagccttcgggagatcggcggtttcttgtgctccagatccagctcggcattacatttttgaagttgtgccaggagtttaatcttatgagcttcgagccgatcaatattggacttgattggaccctcagatagctaatcaagcttggacttttcttcatgtacaagctgccgattaatctgaattgtggcttcaatatctttacgttcccgacgttcggctagtcttagcttggctttctctagcttaaattggtgctgttcaagatagacggctggagtaagggcatcggctagctcatctgggattagagcttgaacttcatgtagccgagtcctgatcgacccacagtcaaccaccaagctgtctaatgacgacgcctctagccaatgcgagatatcttcaagtgttttctttacgtcatcagataagggagctaaagccttgctgctagtatcttcttctgtttcatcaagataatccttgatgtcaaaagaaaataaatcggctaggacctgcaaggtggaaaaatgacgatagctaaatatcaggacagactatacaaccgatttgatatttttgaaggtaaaacttactgggatggtaggagcagctggttgttcttcttcatcaacattgtgactacctgcagccgatggagaatgatcacttgattcggtctgcacaggaggaggaggtggctgcaaaagaataaagtgttatgaaagattggctataacaaaaaggatttatgtgataatcttactggtggggctggtttaagggttgctgcagccgatttcttcctcacagcagtcttctttttctgcaaatacaagattaatgatcgatcggcaatgaattaacatgactgcaaaaagggattaatgtaagtgatttacccttgagaaatgagctggggcagaaggagtgggaggagttcgtttgggagaagccgatggtgttctttctgtatcgctcacttcggctgcagcttgatcaacatcctcttcgatctcttcttcatccaaagcttgctcaatggatgaatctagggctggcaggtcatcggttggcttagttttctgtgacttggttttcttctttggagcctgagccgatgggtctactgccaatgacctggttttcctcttttttccggcatcggctgattctcttatgagcccttgaagaagagttgaagtcttgggggcattatagccgatgacaggaggagatggtccacctccattaggaatgagacccggagcatattcaatgtctctgccactattacttttgcgagtgggagaggattctgttgtctacaagatgagaagaagattaatcatgtttcaaatcggctaataattgttcaaacttgacaagggtaaagatttacctgaggaataacatcggggaacagatctgtcatatacatagaagctggttgatggaagatatgttttttccattcaccccaccatctgtcaaagttcttgctcctgaaccttgccagttctatgttctcgatgttgcccaagggaggtcctgggatgttgagtaactgatccatcatcagagttgatgaaatttctcctcgacattggattttatcagcaaagaacaggccaattggtagctgtcccattccaaactgtctggcagagctcatcggatggtagaattcataagaaacttgtatatttcttccttgatgaataccaacatgaaggatgtatgggttgattgaagttgagaaaacttctccagatttctgctatctctcatgattgatgtcttcaaatctgaagtccgatgggagatccaagtcggcagaattctcatagaagaaccagacacgggcgtctttttgaaagttttcataaaagctgcagaaccagtccttgagcagctcagccgataactttgctcctgaatcggctggtgtggatgcatattccccataggacatacacctgcggtgggtgcgttcttctccatcatcatcagcaatcggctctagtcttggaaattcggcttctgtcatagatggccgattaatggctttcataactaccagatttagccaagattgcaataaccaccatggtcctcctgctccaaccactgagccgacagaaattttagacgatgcattgttcagtgtttgatataggtagccgagaaggattttgcctagaggaaattgcctttttgattctagggcttcggctaaaaattgctagttggttgtagggccgcaacttgatccacagaaaaggaatttctcaagccacatcaggaggaaggccacatgttctcgaggagtgacagacccttggcccatatatgctgccacataaccagaccaaccacctatgcttttggttctgaaatcgaattggttcttagtgttcaaactcatagggttagccgatgaagtcacatctaatccagtgatcatggtgatgtcgatcagagttggggtcatcggcccttggttgaacaaaaaggcattaatggcattggaccaaaaataggtggcggcagccattaggggctcatccttagctgaattggctatagtgagggcgagtgcctggccgattccaatatcatcccaatgaacctgcttgctagccgatacgcgcttataccatgtagtccagcttttctcaggggaggttttctcgagggatggccaagatttgaaggtgttcttccaatggctcagattagggtttgctaatctaaaggggattctattggtttctgcaatgatgaattcagtagggtcggaatcaccaattggaccaaggaaatagtggttctcatgcgacagacttggaattgcacagattggacagatgctatggatgcaaacaagaatagagaagaagaaaacaatatgaggcaggagaaaaccaatatgttgcaaaagaaagagatctagccaatggatacttacctctgcatactcagccgatggcgcgacagatggactggcggaggtcgacatcgccacgagcggaaacttggccggggaggagatcgccttgaaatcactatatagtctttcttgttccacttgcaaggcaaggaaaaaaatgtcagtttcgttattacaaccttatttttttatgtcaaagacaaaaagctacgtgcaaattcttattggatctcggttgttcttaacagcgatggctattattttttatgttcatttaagtcttcaggtagcaccaccagatcttcaacaaggtggaaattctcatatttcgtatgtacggtctaaattattttccttagatacaattactacaatagtttactattataacaataagtaaaaataatatgtaagatggcttaaacaacataagcttacataaacattaggtgatgtgatttgaatttaaaatagtatgtagataatgattcaaatttaaaaataagatgatgtggctctatgagagaacaaaatatggaaaataatttagaccgtacatctaagggctaaaaaaattgagatgatatggcttaatgagataataaaagaggagtgtgacaccctgaaaattcgaacaacgaaaaatcaaaactccaaaaatatgggccttcaaaaaactttttcaataaattgcatcatgccgattctcttcgcctatttcattggaatttggtttcgaagtttatcagtcgtgaataggggataaataattaggaataaaacctaaaattaggttggcaaaagaaataatcaagatataatttaaaataaagattaggtgaggatagaaataaataaaatattatcgcgaccatatttgtatcaattaaatttaaatgcgatggaataagaattaactctaattaaattcaagtaaattatgtaaaaataaaaataacacatattgagtaaacttcatttatgcaagatttagaatttatagaatcaaatttatatgggaaataaactaacatcgggataaataggaaaatacactgttcattgcaccctagccctaacccctcctctgccgcgcgctctggccgccctgagccccgcgcgccgtcaccattgctgccgccgcgcgccgtcgccatcgccgccgccgcgccgcgccgtcgtcgtgtcgcctcgtgcctcgcgcccgcgcgccgctcgcttgtcccgtcgctgcgtcgcgagcctgccgcctcgcgccccgcgccactgccgcgcgccgtcgcgtcccgtcgtcgctccgagccgcgcgccgcccatgctgcgcaggcgccgtcgccatcccactgccgcgccgcgcgtgccgccgtcacctcgagccccgcccctccgtcatgtcgcccgtcccgtggccgcgcgccagtctcctcgcagcctagcgcccagcgcagccgcgccgccgtcgcttcaccccccctccttctctcccttttccccctctctcccctataaaaaccccaccttccccattctccccactccattccctcctcctcccctctaccctcaccaccgcgccatcgttctcgtactgccgcgccgccgccttcgtgccgctgcgccgctgcctttgtgccgccgtcctcagtgccgccgcaccacaccgtgtgccgcgccggggcttgcgccgccgtcgccgtcgtcgccgccgaccgccgctgtcggtaagccgccgccttcccccccccccttgcgtccaccgccgtcgccgccgggtgggccaaaagccgagagagagaggaagggagaaagaagccgggagggagagagagaaaagaagagaggaagggagaaaggagccgggagagagaaaagagagaagagagaaaaaaggaaaaagaaaagaaaacgaaaggaaggaaaaagaaaaagaaagggagaaaaagaaaagggaaataaataggaaattaggaggagatttaggatatttaaaatattaggaattaactataggattaactaaagtgtagtatttgcaaaataatactataatcatagattattataaattattcttgataatttctataagaaatcaattcgcggtagtaatttagatgtaatttcttatagattattatagattatttttggtaatctctataagtaatcaatttgcggtaggaatttagatttatttaagaactaaaataaaggtgttgaatttttaggaaaatttcttaggagacacaaaatgtcttaggttgaggaatagttctatttcgcgaataatatagtggatataacaatcgcctctcgtgctcgcttttcgatttggtctttattagattttatttgaattctagtggaattcaaatcaattctttgcacgtacttgtagagcctgagggagttgcggatccgagtgaaggccaagacccgctagactttgagcaaggcaagtcatcactattctttgaacatgttgatcccaattgcgaaattgttttgtttacaaataaaattacatgcaatgatgaacatcctacttgtgattatgccatgccttgattgttgtctacccttaaaatctttgtaaccatgattacgtatgagtccctagtcaattatgacgattgcttagaaatgctattctagaatcttgcatactcatatttgtcaaatgctatatgcttgggcaattacctttgggaaggtaattgagatgcagcatgtggagacatgagcgtcacattgccatgatgttgatgacatgatttgtgaaaggagaaataaaattaaacaactattttcgactagggcggacggaggatttgggtggtgtccggaaaaggctagtgccgtccctggtcaattaaggaccgagccatgaagttaagcatgaaacgacccccgtacaaccgcacttctcgtatgggtatagacctagtggaatagatagctgagcagaggcagtatccatgcatagtggtttcttgatatgtgaggcaggggctctacggtggggcagccattggtaggacagcgaagcgggtgtctacaatggtatcgccatcggtaggactgccatgtgagaatctaaacataattataacctaatgcatgtgtgagtcttcctttcccgggtgcgccagaactcctctcactgctagaaaccgtgtacgcctagagtgcatgaggatgtaaagttcatggagcgggtactgccaatgcgaggttatcgaaaagctttgccgtgacgcgtctcatgtgttgggacgaggctcatgtgttgggcagtcgcggagtgtgggtaacgtgtacatccactgaagtgtgagtaaaccgaatctattcaaatagccatgctcacggttattgagcaccgggacatgtattacacttggctagactctaaattcttaacttgtatgggatgggatattgcatgatgatttttatgctgttggagccacttcctgagagacaggaaggtggacgtcctcagaaaaccatgacgactcaatggcgggaagctatccttgggatcacaatggatggtggacagaaccgtcattgtttaatatgaacactggtactaaaatttggtcagtctatgctaggtcttaggcttgtgaaaagaattacaaaacttgctttgcgcaaaagaaccatagccattccttgaaatactcctatcatgtgcattgttgctgtggtggcttgttgagtacggttggtactcacccttgcaatatatacacttaatcagaggccggagatgaagtttcggaggatccctatgcctattaccaggagggtgatgaagacgatggcgctcagtaggtcttagttacggttgttgcctgtggcaatggtgtgccgctggcttaactccgctgccttatctacttctgcttttggaatgtattccggaccgctcggttcgataatctaagactatgccggcgggcttatgatgtaataattcgcactagactcttgtgtgtgtgcatttggtatttcagctatgaactcgtgtgtaccagactacttgatctagggaaatggtactgtttacacgattgattcctgttataaaaacgggggtccacaaggagagataattggaaccatagattaatcatctaaggactaaaaacaattgatgatatatgacttaatgagagaagagaaaaataatgatgaactatataggtatataggatatttaaaaaatgatggagagatatattgaaatattatgtgaattatgtgggataatttaacatgcttatattttaaatctctaaaatttaataaattattaaattataaataatgtactccctccatctatttttgatagacatatttccaaatctgaaaattttatttttcataggcatatttcaatccaacaacatatcctcttaatgactttctcaaatttaatgcttcactctccattttttcacacaagattggctacatgggtatcgagaagtgtaaatgttaatggatcgcttgtttacgaggaataactagtagcatgtttaaatggatgat

SEQ ID NO: 24401 - DNA, 32429 bp, Oryza sativa
atgcccatgtagccaatcttgtgtggaaaaatgaagagtcacgcattaaatccgagaaagtcattaagatgataggttattggattgaaatatactatcaaaaataaaattttcagatttagaaattgttgatgtgaaaacacgaggcctgggagatcttcttaactccagtgcaggtccaaaattcgccttcgggtatgctagcgtgccagttgatttgatcctgcaatcaacaagaaacgaggacaaagaaaccgtggttaaatccataaccgatagctgatcggctaggtgccgatgacatatcatttatctttgagccgatgtcatatatgcatcgatcggcaatcattaataagtaagaaagaactaaatctactcgatcggctgtagatattaacgacatatagtccttatgtcgatatatacttaaatcaagtgattgggatagatcggtcgccatgccgagacagtataaatcacttagatcgaaatatatattaataatgagactatatgtgtttatagcatagccgatcagatagatctagcgtgtatcggctaatactccgataccactctatattaagatatcacagcaagtaaaatataccaaacgaaagcctaatatacttaaatgcgtcaagatcttagtacaaagggcggattcaacatgtcaataaggcatataagataaatgtagttaaatcaggtaagatcggctgaaaccccgatactaccctaatcgacaaccaaagccaggctagagattgagattctaatcacgactcataagatcaaactcaactaatgcagctataagtatgaaaagaaggacaatatctagacaatcaagccgttggatgtatcatagagtggtggatatcttatataatctaagccaacatcgatatttaacctaatcggctacattctactgacagatgttagccgattgtaggttagatagcgatattgccaaagattatgtgagatatatgataactttgacgaattacataaacaagcttagagtgtcataaagatggaagcactaatcccgagaacgcaagccgccataacaagttttacctcttgttgatgatcgaaaccgatgcagctcaacccgaaagcaagaactcatcgaaacaaaacgaaagtaaagagggtggcgatgcgccgagattgtattgaacgtgtgttagtttgattacatggggctcggggtctatttatacccgagaattacaaaatatgtccatgtcggacacgactcatatctctaacaaactctaagataccataagtcttcgcgtcagacttttgccaaacatatctctaaagaaattacataaaatatcctaattaacagatacaattgcctcctcaggactctatccatgtgtggcaatcatcatgaagcacatcaacctaaaccgacaacatatgctgtgtcatatcgtcggactcggctcaatcggctaacctcgtccgactcgaactctgccgatcttagtcgtagccgattcggacttcagccgaccctcactctgtttacgggacgatttacatctcgagttccatctcggtttcttctttatctctgatccttggattaccaaatttggtcgttaacacaaatatgcctatcaaaagtagatggagggagtaattgttagtggatgatgacatgacatatttgcatgctaagttttaaaaattagtgggctataaagtatagtaagagaggatatcattaagaggctacattgattgtatatttttttcttaaaaaaagtagtcatatttgaaagagcatctatgcctctagttggttttggtttattgatgacaaacgattatgggactaatgcacttattgagtgtataagcaagtgattagtccgatgaagaagctaggaaatggacttatcgatggatgagaattaaagagaagatattgaagatgcgggtatgacgtgactatctatggcaagacggtgaagcgcaagcgacgctcagctgcgatggaccatgcggtggtgaagggcaagcaaggggcttggtgctgacgaatctaaaccggtggtgaagggcgagtgaagaatgtgtcgtgatgaaccgtgtgtcgatgtaaaaacacgaggcctgggagatctgcttaactccagtgcaggtccaaaactcgcctttgggtgtatgagcgtgccagttgatttgattctgcaatgaacaagaacaaagacaaagaaaccgtggttaaatccataaacgatagccgatcggctaagtgccgatgacatatcatttatctttgagccgatgtcatatttgaatcgatcggcaatcatgaataaataagaacgaactaaatctactcgatcggctgtagatattaacagtatataatccttatgtcgatatataattaaatcaagtgattgggatagatcggtcgccatgctgagacagtataaatcacttagattgaaatatatattaacaacaagattatatacgttcgtaacataaccgatcaaatagatctagcatgtatcggctaatactccgataccactctatattaagatattaaagcaagtaaaatatgtcaaacataagcctaacatatctaattacgacaagatcttaatgtaaagggcagatttaacatgccaatcaagcatataatatataaagtagttaaatcaggtaagatcggctgaaaccccgatgctaccctaatcgacaaccagaaaacaggctagagattgagattctaagcacgacatagtagatcaaacttaactgatgtagcattaagtatgaaaagaagaacaatatctagacaatcaagccgctagatgtttcatagagtggtggatatcctatataatctaagccaacgtcgctatttaacctaatcggctgctttctactgatagatgttagccgattgtaggttagataacgatattgccggagattttgtaagatatatgataactcaacgaattacataaacaagattagagtatcatgaagatggaagcactaatcctgagaacgcaagccgccataacaagttttacctcttgttgaagatcagaactgatacagctcaacccgaaagcaagaactcgttgaaataaaatgaaagtaaaaagggtggcgatgcgccgagattgtattgaacgtgtgttaatttgattacatggggctcgggtttatttatacccgagaattacaaaatatgtccatatcggacatgactcttatctctaacaaactctaagatatcataagtctttgcggcagacttttgctcaaacatatctctaaggaaattacgtaaaatatcctaattaatagatacaattgccttctcaggactctatccatgcgtggcaatcatcatgaagcacgtcaacctaacccgacaacatatgccgtgccatattgtcagattcgactcaatcggctaatcccgtccgactcgaattctgctgacattagtcgtaaccgattcggacttcagccaatcctcactctgtttccaggactatttccacctcgaattccatctcgatttcttctttatctccgatccttggattatcaaatttggtcattaacaccgtgtgaggccattcgaagccacggattatccgcattagtcatttgagaaatggaagatgaaatgtcaaagatcaagaagatgagatcttcccgatgatcaaatgaccttgacgttggtaaccctccaagtgaagaaacaatatggtgtgaaggtactcctattggtataactttgctttttaaatttgagtttaggatgccgtactattaagagggataccacatgcatataattggttgaatactagtgctcaaaatgcttcatctttgtgtgagttgaaaaacctaagccaaaatttcaatccccagttgtttcttttgtcacaacacttacaccgggtttctttgcaagtttttcgacatctcttgatggttttggaccatgttttatgttaggtttgatagcccatgaaactagctttccatatagtccaagatcttcgaaatcggagttcggagtaaaaaagttattgcatttttacttgagcaacatcagactatcagatttgaaatcagactatccgatgtatcggactatccgatttttcacagaacttcactctctgtcttgatttgaaaaaatcctatcaagtgagtttttctaagtatcgaagtatccgatgtcggatcagaaagtccgatgatacaaagactccgaaatttcatggaacttgagtctctgtttaaggacaaagtttttgcttctaaaatatcggatactttgatttaacatcaaatagtccgatgtctcggaaagaccgaaattttatggaactttgttctctgtttctcattgccttggaggtttaaaatatcggactatctgatcttgtatcgtactatccgacgtgggctgaaagattcccctctaacggtcacattttggggggatctatataaaccccccaccaacccttttctagggttgcccaaactgatttcatcccaatcttgctttgtgttgagctttgtgctaagtgctttggatttttgaactctctccctctctatctcaaatcccccttgttctttgtgacttggatctttgtgtgtggatttggagtttgagagtctagtgtgtgtttctctttatcttgagcactaggatttgtccaagagttgtgtggtgtttattactcttggaggttgagaactcctagatggctaggtgtcgttcttgggccgccgatctacgtgtggttggccaagagaagtttatgaaggccagatctcgcctccgcaaggaaagagatacccttattggaaggaggagtgcatttgtgcaacctcacgaggatagggttgaaaaagacccggctctttgcgagcccctcaatggagactagaatcccctcaaggatttgaactccgggaaatacatcatcacataaacctcggtgatatgctcactctctttgccttcttgttatattgctttgtgccatgctaatcttattgtgggttgtgctcacctctttgcttgtggattggatctagagcttttaagttgttgcatgtttggttgttgttgtgcaggttagatagtctgatctcagttcagataatctgatcacataggactatccaacttgatatcagacaatccaaccctgttttgttttagcttccgcatttatttctaaaacgcctattcacacccccccctctaggcgacatcaaggtcctttcaatatgcattggttgtgaagtagtcataaggcgagccaattttggacataaactgtggttgcgaagtacttcctccatttcatattataagactttctagcattgcccacattcatatacattaatgaatctagacatatatgtgtgcctagattcattaacatctatatgaatatgggcaatgctagaaagtcttataacatgaaacggaggtagtagtagggaagtagtagtaataatatagtagtaagatggaaaaaagtctacccttaactaaagcccaagagcaagtttaatagtatagtcaattattagctccaaaccttatatagccaatataatagaccattcatacaatagttacccgtaaatttgtactatatcattaatacatggcctcatctctcttacacacacaacgtttagaagtttgtgctaccgttggctacaaatctgtagcccgcttttcttctctctactctcttatttcctccacatgtgcttatagcttatttgtagccatacttgctctaaaggggcgagttgcattcactagataaattttaaataaatttaatgaaaaaaaatattataaagcatgacccacaaaagtaactatttctccacctctctcgttcacaccacctagtccgccgccgccgccctcccaagtcatggtcacggcattgtgattatggaatgtgggcacgactgtggttagggaggaaggcgtcgccgccaatagaggagaagaagaaccggagctcatgaaggtgggggaggtagtcccagccatagtcgacgaagaagtggttggccgcattggctcaggcgaatacaagggtgggggcaccttgggcttgagcggcttagcctcataattccactgaaatctcaccagaaaaaatagtgaaaattcatgtgtctaactttgaacacattacttagccctagacttagccaatctctgactccgcccctacgccagtagaggcaaaacatggcaacaatgtccccgtcgcatggtggctactgggtgctcgccacatggtggggggagccgctgctgtggctatggcagccctttcgggcaggaggtggagcaggccccctaggtcacctccttgagatcagtggtggtctgggacggatacgtggatgggcggctatggaggagagaggagatgaggtgacgttgcatgagctcggtgagggcgaagccgctgcctacgttgctcgggggagaggatagagaggagactaggcagccgctcgagcttagtgttggcatcgccgctgctcggaaggtgacgacttgtcgatgcctcgattcatctttaatttcgatagtcaccgccctgtaaactattgggcgcctcgcatcaaactattgttgctattgacagttgcaatacgggggagccgtgacagcggagagacgggcgcaaggcggtagggccgacgtccgccttcccacggacacctgacggtgagctcatgctaggacaaatcaacgttaggtgaaggtgggagtgccaccatcctctccttccttcaccatcaacgcggcgccgccatcctttgtctcttgccgactcgtctattaaggaagggcggttgacgagcttggaacgggaggctggaggaggagagataaagaagtgagcgattaaatgtcactgatatgtggggggccactattacttttttttagaaaaaacattttacttattattagaatgtcccacgtagatgccacatgggttgaagatgaagtcaaccctcagtactgtcccttagggctatatttactttggttttggaagacgtgggattttgctgtcgagggacgtgcaattagatagggatgtaaagtggacttgtcctaattaagatcgaagccgaaagttccttggcccagtagatgtgcttaggacacgtccctttctaattacggcccgttccgtggtgaccgactccgatccgaggcgagacgcgacgcgagagagatccgatccgagtagaagaagacagaagagggagatggaagggggaaaaacacaggaaaccctagcttagcagtaccacgcacccacgcgggctccgtcaaatttcatccaaaaaaaaaagtgtttccgcccgcgcggcggcttccctgagagagatcgatcgatcggatatccttgtggattactattaattgttgcatggcaacgaggagaggggatcgaagaaagaagaagagtagtactagtactagtgacggcggggagaggatgatgagggatttattgatgatgcagcgattggaggtggaagaagaagaagaagaagaatcccaagcggaggattatgagattgtgatgttccgccgcgtctggacaagatggcacggtcgtaactttggctccttcgacgataccagtcagtatctacatcttcttctcctctcttccaactccaaaacacaagattaattaatttctattctagcgattaataatccttattagttaacaataatcgatcctatgtgcagcttatccggccatgcgttacacgtttggacgcatcccgaaatcaagttttgctggctgcgacaacggattgcagatcttctcaatcaaactcctcctccgcaacagaccatcagctccagtggccacttcatgtctatggcctcgtcgctaccagggactctcttgatcctaggcgcaaccttctctttaatcgcactagagacaactgccaaatccttactcaacaggtatatattattaacctcttcttcttaattcgagtccattaagaggttgattgactagctcatatatatgctcttaattgcaggatccctttctagtgctaacaggaccgtctcgcgcaattgtcttaattgatcctgttcaatttgaggttcagctcaaagcaaagtccaataacaacaccctgcatgatcatcctgaccaagatcaaattgttaactttggagtggtggattctggctatcttccaggcccaacgaggcattgcatcggcaagcggagtgaggtcgagttcacaatctcagtgcttgatcgatcaattgaggccactatcatcagcgtccagcttgttggtggctcgtcatggccggatcatctccaaggaaagcttgtttcccgtacggccagtgcaattcatcaagaaatcgtgctacttgattctcaaaaacaacaagatggaaaaatgcctatcgatgatggcggcttcattcagctttcaaggcgtgttgtttcggtagaactggctggccaactcatagttcaagtgctggctttcaattcccagcagcaagtagttgacaatgacaacgacaacaagaaggatgagattgttgcaaaacacgagattgtttttgatcctaaggaagcttcattgagtgtggagacgtgtgagctacaactaggaggaggaggaggaggcccatgtaagcttcaaatctctgttgcttggtctctggtcgataggcttccccctgttggctatttctaacttacccatttcgatcgctgccattccaaattactatcatgctagctagtatctctattcagacaatcatatatatatttgagacatatatagttccaattaatcttataaaaaaactggctaatatggctattcgggtatcgcccctgtttgatttggctcatgatggtttgcgtattttgggggtggaatttcacgaatctgattcccgatgttgggtttgttttgagtttttgcgtctgagctccgcgttcatggggcgattaagggcaaatgctgcgtacctgtctctctggttcgttaacaaattttctctttcctacaaaggccaggtacaagtaattattcaaagaaaaaatgaaggaaataacatgtataattagctgttgatgggtaattgggtagagatctgtttgaaccagaataaagatgatgatcaccaaagtaaaggttggtgacatggcatgtatgtaatatatgagtatatattgtgagatgcaaagaagatctgggaatcgcattttgtgtacaataagttgttcaagtgagtccaatctttgagtgatgttctgtgttacatcactcttggagtgttatgtaattgttcttcacatcaaggcacaagtagtctctgacatgaggttcctttttccgtaaatttgatttgctcactgctacttagctatacagggtgaagaaagaagtgcgaaatttccgaataaaaacaatttgtgcttgattgcatagtgtggatatggcccaagctctttggactgttggtctggaaaatgaataagtcccaatagttcaggtgttggactgacgggattgggttaaattaatgcctccttacatacataaaggaacctaatggttactgtttgtgactttttaagttccacataattatttagatgttctatagttcaggtgttagagcagtgtgatgataatgtagggtgagtcatattattttttcctctactgaagtgcaatttctaagatagtttcacgctgcatcctttctttttaattttcatgcaacccagtttaagaaccaattttaagaaagtcataaagttgttttggtttcaaaatggtctgtagttctgtagaaagctttttttttggtgatgctacagcagtaacagtaactagtcttcctcacaagcaaaagctatattagactttgaggcacaatttgtacccgtgggcttaatttttaaatgctgcactccttttcggacaaatggagttgcataaacactgatcgaggcatggaatgtcatagtttacatatttgagatttggcacaagcgttcagtgtgaacgttgcagccaggattcgattcctgaactcctcacttttcgcctggattaaatgaagggatgaaaatatgtggctcttcttatcttaattccattggatggctagctcctagccatcgcaacaatacttgtgtagctgaatcagtaatgcaccataacgatggtgaatgcaagattttaaattggaaaaactcatcctctcacaacctacaacatctaattagctttgtttccctgtacgtggtttctttagataatttagctctgttctcggctattcagttatgatattctatgggtctccccatagtcgagtcctctcgtaggttggcctttttgctttcttagttggtcggtgtcttggtcatggaggctaggcatgcaggcggtgaatttagtggcggtggttgtcagaggtggtcgggagccagtgccctgaatcgacggtcttggagacagcggtcaggagctggcaccccgaatcgacggtctcggcagtgacaacagcgggagccaacgcccctcctatttgacggtctccttgacggcaacagtcaggtggtggcgccactagtaaaaaacaatttttctagatgggcgacagagtcagacggggggcgacgaaggctttcgtggctgctcggcgcttgcagtcacgagccagatgttggaagccccagcagcggcggcaacgcaccgggagacggcacgatcgaggcaacctggtgcaaggtggagagacagttgaaacaccggtcgagaaggtccggtgggatgccgtgagctcctagctgcgccggcggcaaggaaggacgtggctggcagcggcggccgcccggatgccacccctccagagctgggggcacagctcccaagagcccctcgaagatttcagccggaaggggtggttgtcaagccggcgaggtggacgactggtgcagaggcggcggccgacaagccgacagagacggactgcgtcacgactcggcgccggaggagcacgttgcggtggggcgaccggggacagggagggcggccgtgcctacggcgaccatcgtgccacctctaggtaggagggagagggcgagggagaaggggagagggatgacgagagctcgacccgggccgcgctatctggccgctctgccacctcgtcgctggtggcgccgcccgccagggcgggaacgacgacgacagagcggagagccatggggcgaccgacgcgggtggcaaccggggccggagcggcgtccggcacgggctcagggccgctaccgcctggtcggctacatctcggcggtggtggcggcgatgagccgccttaatcgagcaagttaatttacaccgggggttaacatgtgtatgtttagtggaaatatcaatcctatgtgtaccgggcaattccaattctcttttaatgtggttaatctttaatatattttttaagtctaaaacaaagtccatgcgcgcggacacatgtatgtatgtatcttggttcgcactcatgcatgcacgttaatcaccagagttctactatattattatatgtgacctttttcttccctagtttttagcagtcactattgattaagttttcttctcttgactgggccttaattaccattttcatctattttcgcaaccacatagtaatatagctatgtcatgcggtttggcagctttgcatacatcacaaatcaatggaaagtggagggaaaagaaagaaaaactaatataattaacctgaagatcgatcgagtatggattcgaatgataatggcaacgaaggaaacagcaggtgccttttgaatggcaggcaggcagcaaaagtctcaaaagtgatggacgatgaatggatcctgcaactacaagtgactttaccatgacatgacactaatgctaatgcccaatgcaccgcaactttgcactaaaaggttaaattaaagctagctaggagaagaaacaatacagtatatattagtgcccccatatgtacgtggggccggctacctgcaatcttattggtgcatgatacatgggaggatctctctatttatataccaatcaagggcaaattgatccaagtcactggattcatcgtcatcaaccatgattccatatgtgtgtagtttgtacgtacatacacaggtggtcttccatcttaagtcttcttcagacttccctggtcttttaatcgatcttcaatatatgcatcaagcgaccatgcacaaatgtattcctatatatcgtgcacggggagttaacatatattcagattgtcatctataaatatcagtaagatgtacatgtggctgtaccccaaccacatgtgaaaacaagatttttgcacgtggtcacctaagccgactgcatgcgaaaataatttcggcaaaaaaaaatataaaaatctcctgccattgaagcctaaccaaatgtttcaactccaccaaaaaaaaaagcggagcgggctagaatatatgctctcacaaaatgaattagagatgtggagcagagggttcggtctgctccacaacttcaccacagaccttagctgttggagttaaatttaatagttggagcccaccaaaccttaaaattatacactttcctatctctatatataagtatatacttgtattgattgcatttgatacggtatacatgcaagaagcatatatatgctttgtcagctgccaccagtaatacatgcaagagaagaagttgaaaacatttggtcaagggtggtggtgatgaacaaacgcatataccagttacattattattggtagggaccgtatatatgcttatgctggctggtgtcatcgtctcaatgggtacacatcgatgtgtaaaaagttaggcctaagcttctactttagtatcaaatcataacaacataagatcgcatattaaacataccatatactatgtcttaaaatataagaattttttactctgacatagcatccgagatgttactttaacttaaaaaaatctataaaaataagatgttttaaataaaatagttacatattatgatatttgtttattgataaatttagtaacatcaatttttcataatttattttttattttttattaatagttaaagtcaaaaatatttcatttgttggagtattgtaaatctagataaaggttgctatactttgaaaaaaaaagtatataggccgatgtatatatacccgctataataattaatcgataggaagagcatccatcatatatggaggctgtgagtctgtgagcagctgtatgaatgtcgttgccaaagggacatcatttatacatgcatatctctctttattatcagctttatcgtttggcttataaaccaaacaacatatttgcaaacgaaaaataatttataaataaaacttttatataagtatttttggtgatctaaaagcaaagactaaaaaataaactatgataaaaaaaaccccctaaaatcaacttcaaatttaagattgaaaatttaaattttgggtgacaaacataagcgaaaaggcgaggctttatgtatattgatctaagtaattcttttcctatcattcgattcattgttaaatatacttttatgtatacatacaattttacatattttacaaaagtttttacatattttacaaaagtttttgaataagacgaacggtcaaatatgttaaaaaaagtcaacgacatcaaatattcagggacgaagggagtataatatatggatacccgcagaggcctctcaattaatgaggtcagaaaaggcattttaattcccttgcaacaaaacctgactaataggttcgttcgagtctttcttttcaccggcctgacgaaagcgggacaaaactttattaagataaaagaataacaaattagcaaggggcaaagttgtcgtggaaaacataaaagcacaaccaacacccttcctgacataacgagaaaggaatagtaagagagtttaataatatagtcaactgctatctttaaatttaactatagttaatttaatagtcatttcatacaaactagtaatatttggtctcatctgtcatgcacacatgcagctgactataaatctgtaacccattgctattctttcttttcatttatctttttgatatatgtttatagctgacttatagtctgctattatacatgctctaaaaataaaaatatttagacatccatcttgatcaactcagcttcgcaccgattccacggctgaatattacattgttccttaggatcaaatatatctacgtaaatacaaatgtgtatttagtggtctaacgcatgcctgcctgaaacagtactgtgtgagcgtgtgcattttgatctatgttaattgttgcaaaataacaagtattcctatttatatttcaaatagatgcatggctagctagctaattttgcttaattaaaatttgcctccttattcaccaagacgttaattaactttactttaggtttccagtagtactagttaattaagttaagtagcaaattaacgacacgtagatgagatctcagagagaaataaaccgccgcatgaacagtgcggaggtcttcctagctagtgtgtactatattatatagctagctccatgtgtggtcaattgtgctgaaagcaaacccacttacatactttcggtcactttcataataactgcaaattagttgaacatatatatatataaagtgaggaaaggaaatggtaacactgcaaattaagttcatgagagaattgtgatcaccttagcagatcgcaatagcaaggtgctaattgatcaccttagctcaactggttaatgagctttcttgtgatgaaacatgcgtacgcgcgcgggcttaacatagataccctcttttacactaattattttttagcggtaaacatcgcgataacaaggcacgtttgtgtgacttcactaatataaatatatgccggctcggtatatcaagattttgatcattaatttcttaaaattttatatagttcagcaccacaatatgttttaaaatccagcatgataataatttataattcacatgtgaatctatatagaaaattgatagtaaaaattaagtatatttaacatatatagaacaaaaagctaaaacaagctaagtaattttggaatatgcatgcaatgcaacgatataatccaacagctaagccccctctcatgcatatattgcgtgcgttatgcatatcctccgtccttctcgagttgacaaagtatagttgattaaatttaattgcttcgacatgtacagggacgtccactgtactcatgtcacaatcagagaaacttaagtacgtaggagtagtatgtatttacatgggcagcaaattatacgatccgtagatttaattaattaattagtaggtagctactccctccgtcccataatataaaaatttaggaccggatgggtcatttcatactacaacgaatctggacggaatattgtccagatttgttgtactataaaatgtctcattcggttctaggttgctatattatgggatggagggagtagcttaaagttagggcatgtttagcacagctccatctctcctggagttaaagcccaagtaaacagtttcagctccacctaaaatggaagtggagttaggtgaagctctcaaacaaaataaactagagaagtggagctaaattttggcagctccacaattccacttcagactcaactcctgaagttaaatttaggagttagagctctaccaaatggacccttagtatcaataactgtccataagaccgactgaaactagaagatacgtatgtacgttaaattaaccagtgtgcatgcctgtgtacgatctgtatgttcgaccaacggcgaccggccgcggccggccgatgcacgaagctgccctgcaggtagcaacaataacacgctacgtacgtactgtaatatactccctccgtactcgtaaaggaaattgtttagaataatgtttaagtcaaaccttagaaatataaatcatgaataactcttaagttgttatatttgaaaatataaaaattatatgaatagatttgtcttgaaaaatactttcataaaagtatacatatatcacttttcaataaatatttttatagaaacagaaagttaaagttgtattttggagaccgtgtcgctgtcctaaatgactttctttactaagtgtagagggagtacacatatatgtacgttgaattatattgattggagacattattatgtactccatctgtttccaaatgtttaacgctggttgattctattttgatctagtcaactagtactacataaaaaaggaaattggagggagtagtgtgtctgcatgtgtgatcactagcgagctgtatatataagtcaccttcataaaaaagtgcatgtctatttcgtgaaaacatttttacgcaattgaggtcctctgctgatagatgggtccgagaggctgtagaacccgcgtgtcagtgagcagtactacatatctgcatctatttttatgctcttccttttttctaatcaaaataattaatacaacagtttatacggtagaacatattttgatagacaaagtagcatctaaacttttaccgacagataattgtcctctttttagtgttgtggtatagcgctagttaaccacctctatcatactagtacattttatatacaccttgatcacacactttcatagttttatcaagctaaacctctcccaaaatacctcctaattaagcaccatagaaaaacccaaaatcttatcttaaaaataatttctgaaacaaaacacctgccatgcatgttgaccatgtaaaatgcgccgcggcggagtgggtgaagattctaacctgacggtgccgtgtgcctctatcaaaccacgagaagccaaccagtaaggagtactccaacaccacaattatttttagttttgatatttgctttatgccaaggacccagtgtccttgctaaaatcgtttgtatcgtagtgtttttttctatgaaagattgttactttttttttcacccctgtaaatacacacgcatatcctattgatacgagagtgttcgaaagataaggctgacatactttgagattaaaggagttatcacggtgactcattgttgatgaatacgttgcctaccactgaatgaaaaataatagtaagtttagaactagaatcaagtgagtaggtttaatcataaaaaaatctaaccagttgagctaattttatctcgtggaaagttgttattttctatagccaaatacgatatattttattgtctcggtcatatatatgcaagcagtaccaatttttttcctaaaaagatgttagcatatattttttcaacttcttatatatggatttttggtaattaagataaatgaaattgataataattataaccttggtaaattactagtaattacttcctccgtttcacaatgtaagtcattcttacatttcccacgttcatattgatttaatgaatctagatagatatatatgtctagattcatcaacatcaatatgaatgtgggaaatgctaaaatgacttacattgtgaaacggagggaatagttaattgatcgtcatttattttggtattaaaaagaggttgtccatgttatgcgaagacgatgataggtagctagggccaaatgcatgtcaacatcgatggcttttggactataaagatgtgaatgcgacgcttgtggtgagcggtcaattggtgggagtgggatggcttcttttgcccaatcattcacattcatcttggtgttccattgtatgtgtatgtatgtcctaacctgacaaaatatatcacattaataatttgaatataacaaaaatatgacgtatactatagactcggaaagatttacgatattttgtgttgtgatgtgaaagtgagtgtttgaaaaggtaagagaatatatacagatagatcgaatcccatcggtagcctagcttttttaccacaaaagttatattagtgtgggatcgaataataacttaagtatacctccttttctatatagtttgttatatcaaaaggataggcaggtaacaatactaagaattatgtaagagaataaattagattagaataaaaagaagagattatgtgatgggtgtcattttcgtgatgaaaggatatgtaagtggaggatgtgcgcggaagaaaaatatatggaggatgcaattggttgatagtatggattgccaggtggatacgcaagaagatggatgtaggcaacaaagaggatgcgccaccggctaattccattccaaggatgaatgatggaccctggataagtggtctggtcaatcatgattcactaatactactagtaccacttaacaaaccaaagaaaatacaaatttttaaattttaaatttaattttaaagttgatttgaagatattttcaatatagtttcttttaagtattggcttttaaatcgctaaaaatacatatataaaagttttacatgtaaattagtttttattctttaataagcggttttggtttattagaaaatatgggcaatcaataaggaccttaaattttaagctactcttttcatcctaaaataaatagacaaaatgcgagatattttttttagatttatagcatttgaatgtgtcgcattgttttattttagaatgggtggatgatgtatttagatataagctacaccgataacaaactgctagtttgagaagacgaaactatttaaagatgccatccattgtgcagttgcagcgatggttgccggttaatagcgagatatttaaccatttgccacatttagatgtgttaattaactttttttcactggacccacacgtcatagacatatgtggacccacgtgtcattgaaataggggtggcaaatagttatttgccaaatctaaaagtggcaaatagttaaaatccccgttaatagctactccaagttgatagtactatatctttctgctacactaaacttgatcatggtggggcccagaaagatttagtgttaagctactactgatcgagcaagcaggaattttttgattattcggtttggactttggactaacaagaaagaaaaagacaaaagatgcttatccgtgaaaaggcccctttgacaggtgactcaaaagcaaacctttccctctcctttctactggccttttatttctccttttttgttaatttccttccgacagaaactaatttctcctcttttaaattaaatttggttggggtcacctagcctccaatcgactcgtgtcgaccagccactcataaacaataactagctaatacgttctctggatcttctctctcaaaggttatgttgccgctatatatttacaggttggattattacttttatatgcttctatacctagatcaatgccaataaaaagcactcaaggtgagcatacctggttttgtcgtattctgtcctacccattcttatcttgtatatatagatgcttatctcaactttttggtgggtttttttggcatgtgataattattaacaaggcaatggttttgatatatcttaaaatgttacaaaggttttatcctccttttgtagaattttggatcgcagcaaatggtttatttctattttagctgtcaacataatgttagtctagtttcactagccccgtccaaaatatagcttgagttctcaacaaacttattaatagcctacgataaaaaagtgtcactcttctagttaagggcctatagtaaggacctagtgagttccaaattccctaactttaatctaggtacgacaacatacggttgaaaagtcataactggacaattaacaaaagagaaaacgtgttgtagatcagactattgggaacaatttaatctgctttcaagccattgttatggttacgacttataaaccaaagtcaacacttctacttttaacaaaccaaaaaggctaggttaaaaaatagaaagcgacaaaaaaaacccttaaatcaattttgaaattcaaaactggttgagttttcttttgttaaaactcagaaaatatattaattactcctaaatttcattattttttcttacaagggtaaggttgatgttaaaagtggtttgccaaatgttaggaaacatttatcaaccgtgctaagaaaataagaaaatgagagagcattctatacttataactggtgatgtactcatgtccacatcgtgaattaattttatacatagtgtgtgtttagttcctgaaaaaagttggaagtttgaagaaagttgagagtttagaaaaaaaaagttgaaagtttatgtgtgtagaaaagtttttgatgtgatatgatgtgatggaaagttgggaatagagggaaactaaacacggccatagagagcaacgtggttcattgcacgcacaaaggatccaacttctcattttgtcttgagagtgtcacttgttggttgggccacagcccacatgatgcatagtgctgccaagtggacgtactcactctccatctctcatcgccggatccatcgatctaaccctctctctgccaaaccttgagtattgctctacgcactcgtgtagcacatggaaaaactatattggctctgttataaaatatgaagatttctgaattttacaccgtgattaagaatatttgtgagtatttgtgattgattcacataagaaaataggtggagaaattaaataagtgtattattatgattgattgagaagagaaaatatgtgtacaatggacacattttgaccgccaaaagttataatacaaagggagcaatagatgtgctggtttatagttggatcagaaattgggtcaaatgatatacattaattcatatagcactatcacataggcactacaatgagaacaaggactatttgtagtatgcagtagtggtttaaatggtttaaatggcgtgatggtggtctaaaagtatatgggcattgggcaagactgttgtcaccatcatttccaaagttttgaaaaaaaaagataaacttttgcttagatagatttcaaaatagaaaaaaaaaacagaacatgatgtgcagctgtcgaataaaagaaaaaaggtacacggaatatagctttagcgaaaatagcagctccattgtttggtcttcagtcatagccaaaatttgagtcttaaaacttagttttaaagttacttttggtgtttttttattgtagtctatttttcagtattagtttataagccgctaaaaacacaagtataaaaagttttatttataattattaatattatttgttaataagcgttatgatttataattagatgtctatcccatgacaaagttaaaatctcgctgaccttttttttactgaggatctttcatgagaaaagaacaatgatgcatgcattcatccaggggaaaggaagaacacaagcagcatagcaacagtagattgactatagttgagcacaacagtaagctgttgataaccaagagaagaatctacactgcactccacttgtcttgtgctatgttgccaatgtgtgcactgtgaagaagaagcactcaccaaacttgtccactcctccactcccagcaatagtatttatggtggcccctcaccagcacaggggcgcggatcaggaaagattaacaggagggtctgaataaaatatataaaattatagccacctcttctaatagatgtatgacagaaaattttagtgaggtcttcgtgaggtcttccatgattacaacataggtagtggggtcgtagtgaggtctcgagaccctagagatcccacggtggatccgccactgccagcacatcacctgatttgcactgcactgctcttgctttccccctcctgttgaagttgcagagtacagcagcagcagcagcatatctatctacctattccttcttactcctcactttatactccacttatttgtcaaatctttatttttctactatactatttctcttttcaagggaaaagaaaagaaagaagaatatatgttgagcagtgagagagatttggaggtataaagagacagacaccaacctcctccatcttcaatcccttccttccttccattttattttcttttattttcccaacaaagagaaaagagggtgaggagcctccatccgcgaaaagcaactccacccgacaacctgccccatgcactttccgttattctcatttcacccctcgcaattttacactccgccccccatgccctctcaaaactaattacaatccagtccttcaccggtcagcgatgcccactccggtggccgccgcgaggcagtgcctctcgccggccgccgtccccgccctcgacgccgccgtcgcctccgctcgccgccgcgcccacgcccagactacctccctccacctcatctcctccctcctcgccccgcccgcacctcccctcctccgcgacgccctcgcccgcgcccgcagcgccgcctactccccacgcgtccagctcaaggccctcgacctctgcttcgccgtctccctcgacaggctcccctccgtctccgcctcctcctcctctggcgccgccgacgagccccccgtctccaactccctcatggccgccatcaagcgctcccaggccaaccagcgccgcaacccggacaccttccacttctaccaccaggccgccaccgcccagacccccgccgccgtcaaggtcgagctctcccacctcgtcctcgccatcctcgatgaccccgtcgtcagccgcgtcttcgccgaggccggattccgcagcggggacatcaagctcgccatcctccgcccggctccgcccatgccgctcctcggccgcctacccacgcgcacccgcccgcctcctctcttcctctgcagcttcgccgccgcggacgacgccgacgtcccttcgcctgcggggaacctcgcgggcgcgggggaggagaactgccgccgcatcgccgagatcctctcccgcggccgcaaccccatgctcgtcggcgtcggggccgcctccgccgcggacgacttcgcggccgcctccccgtatcgtatcatccatgtcgaccccaacaccatcgaccgctcagacctcggcgtggcggcggcaatggccagcgccacctccggcctcatcataagcatcggagacctcaagcagctggtccccgatgaggacgcggaggcgcaggagaatgggcggcgggtggtggcggaggtgacgcgagtgctggaggcgcacagcaaggtcggccgcgtctgggtgatggggtggtcggcaacgtacgagacctacctcgccttcctctccaaattccccttggtcgacaaggattgggacctccagctgctgccaatcaccgcggtgcatgctgcccctgccgccgccggccctgctgctgctggtggactcatgcctccggcaaccactgttgctgccttctccaagccagctgcaaggtcaagcctcttctcttctcttctcttcacttttgtatccacgaattctttatgcataagatttttattaccatccatttgctgactgccgtgagttaaatgtcccccctttctttattgtcagaatgtttcttggatagtagtgtatctgattaggtgtgctagtacgatttgcttatgttctttactaatttcattttcttaagtgttgatttgtgtgctttgcccattgtagtatggatatttttttcaacttgtgcaattgatttagtgtactactgtaattagaagcagcataggtagctaaaaatacataaatctagaaaggtttgttttcttccactgcattttttaaaaaatgtttttacacggtcaatgatgtacaaccgtttttgtttaatgcgatggtttagttactatgttctaagttccatgttactcctgttatgttctatgttcagtcctgttaggtgcgacaagagttgctggatattttctcttctcggaagtgggttccaatttgttgtcatcagaaccttccagaccaacttccttttagatgctctgctgttagtcactacctgtgttatttactgatttctcagctcttttttattttttgcctttaggatatttaatgggattttcttcttataagccttttctctgtagtcctattcttgtaatattttggattttattactacatatgtgtggccatgaaggagaggttctatagccagtgcagaatccatataatgcacatttcaaactgcttgataaagagagactaaagtgtaaaagtaaaataatatggcttgtgtactaagagatgcaatttcatggtaaaagagtggtgcttctgctgcagcacatctgttctttactgttgtaatgctcaaattgctgatagtttgggtcatatatgtgggcagagattatttgtcattaatatgtagtatcacctataatgaattaccttgatgcatagggctatgtgtggcctatataccaatgaactccactgcttccatgctttgttctaccttgtagcctgatctccttggtagggtctttctgtatatcaaaatcgcagcaatatcctgaaattattgaatcaaggattgtttgatttgaactgctttcagttatgtttacaaatatgtcccaccagaattttgcaacactcttctgatttctgtcacagcatagtattgtatggcattttattcagctgtagaaatgttagtgcttaagcattgcaggtattaatgacaaagtgacatatgcataactccaatataaagcaaagatatgcttgtgccttgacctcatagtttcaaacttgttattgcagcttgatggactcctttgttccttttggaggctttctctgtgataactacgaagagaacagcctgacagcaaattcatgcccacaggccctgcggtgccagcagtgcaatgataaatatgagcaagaagttgcaactatcattagcgcaagtggcattacagctgaagaccatcaccagggaggtcttccttcactgctgcagaatggcagcatgatgggtcctaacaatggatttgatccagtcaaggtgtgaagctacctatgtcttttggaacatttatgttaagtactgaacgcagcaagcactgcttgttgatagatgaataatttttggtcgttggtataaaagatgcacagttttttttcagtgcaggttagagatgatcggatggtattgaattcaaaaatattgaatctacagaagaagtggaacgagtactgcctgcggctccaccaagactgccagaggatcaacagagatccttacaaaccatttccacgctatattggtgttcccgctgacaaagaaagatcagcaaatccaagcaaaggttctgagtcaattggggttcaaaaggatgttattaaaccttgtgcagtgtctgctgtacattccagctcaactgcaaggcctatttcatctccatctgtcaccaacaaaagaaatgaagatcttgtattgaaccttcaagccaggcattccaagagtgatgaaaaccttcaagaaaggggcatgcaatcccaacatggcaccctgtcgaatgctgacaatccggatgatcatgcctcaccatcatctgctgcacctgtggagactgacttggttttgtgcacccctcgagattgtagttcgaaaggttcaagttccacctgcagtaaacgtgtagaggattcagagaggtctgtccatctggtacccaagaaggtggatgatttaaatctgaagcatccacaactctctgttcaacctaactcttgctcctggagttccataaatgttgggaaaacatcacacagtacactacactcagtagcttcaggaggcttctctgcctttggccaatggcagaaacggtcaccccttgctgcacaaaattctgatctgagcaattacaagctacttgtcgaacgcctgttcaaggtagttggaaggcaggaggaagccgtgagtgctatttgtgaatccattgtgcggtgccggtcaacagagtcgcgccgtggtcctagcaggaatgacatctggttgtgttttcatggttctgacagcatggccaagaagagaatcgccgtggcacttgcagagctcatgcacggcagcaaagagaacttgatttatctggacctaaaccttcaggattgggatgactccagtttcagagggaagactggcatagactgcattgtggagcagttgagcaagaaacggcgatctgttctcttccttgacaacattgatagagctgactgccttgttcaggatagtctgtctgatgctattaagtctggcaggttccaggacatgcgaggcaaggtggttgacattaatgactcgattgtggttttgtcaagaagcatgatacatggcagcaaaaatgggttggaagagggcctttcattttctgaagaaaagattctggcaactcgcggacatcgactgaagatcctggttgaaccgggtagggcaatcaccagtggatgccctagtggtaaggtggtagtttccccaaggcattttctcaccaaaattcaagcatctttgtgctctggttcaatcagcaagagaaagctcagcatgtctgatgaccaggaaaagctacaagagtcgccaagcagtttgaagcgactgcatagaacatcgagtataccgttcgacctgaacctccctgttgatgaggatgaaccctttgatgctgatgacgacagtagtagccatgaaaactcatatggcaacacagaaaaatccattgatgcccttttgcattcagttgatggatcaatcaattttaagccgtttgactttgataaacttgcggatgacatgctgcaggagttcagcaacatactcaggaaaaatctgggtgctgagtgcatgttggagattgatgttggtgcaatggagcaaatacttgccgcagcatggaaatcagaggacaagggccctgtgcagacctggctggagcaggtttttgccaggagccttgacgagctgaagctcaaatataagcatgtgagtagctctacccttagactagtgccctgtgaggacacattaccaacagtgaaaggagatggtttaggagttttgctcccaccaagaataattctagattgttgatgatattatctgtatagggatcgctgtaattatctgtagtccacaatagtatagcattatttgttggctaaataagctctagtctagctgatgcattgccttgggttctctaattagctactgccagtactgtcatatcattttctacctcagggccttttccagatatatgggcatccgaatgtatattggttgtaactactatggattgtcaatatttgattgttctatatatacatggacacatggtgctcggtcagtgtacttgtgtggttcatgctgaaatccacaactgcaaggttgcttacatattttgttggccaacttgtatatgtgctctcatctcgtcttgatttgtggcaggagttgattgctactccaataactacgtttttattattcctgaatgatgctatcatgtacggtagggtgccgatgatattatagagaccttatagttagttgttcaatggtccatagaaagttgcatggcagcatagtacttgatgcgcctacttgcattagaagcgaactcgaattggatgctagtagtagcagatttgtgatttgctagactccaatgcagaagattccaaacaatctgatggatgcatccgtagtcactcacactaatcagtatcaacaaaagatgaactaggctgtgaaatcccaatagtagttcagttttgatcatcatgattatgcaaataaactccattgtgagtgattcagtatggaaaaattaaggtgcagagcttaattcggatcataattgtctgctcaatggcacatacaaactccagacattgaattgcctggcaaactccaaagggttacacggtataacttggacactttcagaactaatcaaaactgaacgacccgctagctacaacaacaattggacaatgcttgtttagtgatctgaatatggtgatccaacagatcaatgaatccctgtgttctgcagggccgcatgcttttgagcaggtaagtagcccttgctgcttattatttctctttctttcagcagttcatgctatgatggatatgctatctatcaggaaaacaatccattcttcacttactaagctactagtacacggtgactccaataattttcaagttaatttttcacttgtgcttagcatcttcggcccagtcagtgccgttcaagctgtgatctgtttggtagtaaacaacatccccgacgtcgctgacaaagtgatcaactctcaagctcctcagcagaacgccaaacaggtgaagtggcagcggacctgacttctctggctccctgtagtatctgcccagcactggccttgctgcctttgtctgtttttttgttcccatcaaaacaaggcaattgtttcagtactcagtgaacttggtaacagtgcaccgtacatacatactatctagcagaggtgaataatgctggcagtgtacttactgcttctacgaggtgataatgaggaatttgggggaaaaggtggtggatgacatgggtgccaatgtcatggtggatgttgttgatccacccgtagtcccgatccaccgttgtcaggccaccgcggaggtagctccattcctgcaaatagtggtcattgccagatgttcagccctattttcagtgtttgtaagcagaacttaatgaagtatagagtgagaggaagtatagagtgctcataggctgcacccaactcaataacctacagcaacttttcatgctttattctggaaaaactatgatccaatcaatacagaaaaaagatatacctctccacgataccagggaaggtcattgtgaccgtggtggtgcagataagtcaccaaatcaagccacatcacgaatacctgttttgaatgcagacaacgcatatcagatatctagcttttgggtacagtttcagttagatatcccataaatatgatggagtttcttagaagcaaaagcagaggattaatagtgaatagtgtatcttacaagatatgggacaccgtatagcatgagcaccggaacagacccaaacacgcacgccaaggcgacgagcaacgaaatcatgatgcaccagcaggtggtggagacaatcacgtcactcttctccttggggctgaacagatcgctgctcggcagaaagtgagatccggtcttgcccggacttctgtaccactgcagcacattcaagcatccgtatagaagattcagttgtctttctttcttttggggatacagattcagttcggtttcagttgagtcattcattcagcacaattgcgtggagttgccgggtgaggaggacattcagagacttacgaggtagacagggaaggcaagcaatggaaatggtaatgtaaagcgcagtttcttggtgcgcgtctccagcttccggtacaatttctcggtgatctgctcaaacaaattgcaaaagcatatataaaaatttaagcagattatagagtacgtatctatatgttgagagccagcttatatacaggtgacaagcaaaaaactcattcagcctctcgttattttcttattcagtcaataaagctgagcagatgcttatgctaccctggcggccttattcaaatgaacctacaacttaattagcatatatatatatatatatatatgttatgaatcaaatcacgtgatgtgtaatatgatattcgatctgacgctgagctacggatcaaaaagtgatccgattcgcatctgggatccctggtgaataatttagcagcaaaggcacgtgagccagatctactgtctcaatcttgttggtattactattcacggaccacaaaggaaggctgatattttgcaacaagcagggtggatcgttgtggtctgctgcagtggtcatgtgcccttctctccatctgcattattattaatgcaattgcaggtgagcatgtcgcataatacttactgttcgtttggctgtcctgtcctttcccgtcctgccaaacgccccagttggacacgctagcgaagaatacggagtatatttgcgaaagtcatatatacagttttggtactatatatgatagtagtagtaccgcgaattaagcaaatgtaattggtgtatctttttcaaaagggttgtaattgttgtacgggcgatggattgagacaagcataattaaggatagtactaggagtggaatgaagttgagaagtgcaagcaattgtaggatgggcgagagatgagaagaaattagtaagagaggaggtgatctgaaggagtgacaaaccgggtgccaggactcgtccttctcgatatgaccgtggttctgatggtgtgttctgtggctgattctcctgcatatgacattaataatatcagtcagatgctcagatcggatgggtcaacgagatgaattaccatagcagtgatggtccaagatgctatggtaaaccaagactagcattgcctaattgcacatacagtatcatgtgaagagattctggatttgacaggacaggctagttccacgtatataggatggagacccgaatatgtgctgttttttcaacttgctttgcctgcatctatgcttttgccgtgtgccgcgcgtgtggtaaagcaaaaactttttagtttctaactaattaactggtttcagagcattaatttggtaggtgtgcaatagaagtaggtaggtgaaatatatatatatatatatatatatatatatatatatatattctgtttgtgcatgcaactcgtgtgattttgaaaattgatatacatgcatgtatgctatagagagagagagagagagagagagagtataggaggagttggtaccatccatggtaggggacgaggatgaaggagtgcaggaggtggccgacgacgttgttgagcatggcgctgtcggagaagctcccgtgcccactgtgtttgcatgcattttcaatttgtttttcatggagatctcgatggattgatgcatatatgcatatatgagaaaagaaatggaagcgatgaatgaatgaatagaaattaccagtcgtggccgaggacgaagagcgcccagaacatggtgccctgcgccgcccagtagagcggccaggccgcccaggcgacggagacgtcaatccgagtggcggctgcggcgaagagggcggcgacgatgaggaggtcgcgggcgacgtaggagagggagcggaggggggtcttgcgccagcagtgggcggggatggcggcgcggacgtcgccgatgcggaagggcgggggcttggcggcgtcgaagaagagacgggcgtcctcggaagccttgcagtccgcctcctgggtcgccgacgccgccattgccgccgccgtgtcgtggtggatctgattccgatttgtgatttgtgaagcgcaggcagcgaggcgaggcgaggcggaaagggagaagagacaagaaagagaaatttgaggggaggtgtttggtttgtgcctgcgaacgcgaatgcgatggatgggccgcaacgcaaccaaacccaacccaacccagaaaccaagctcctcctcctcctgtgttgccttctgccccctttgcgttgctttgctatctatttataggcctcctttgctctgctcctttcttcccatttcatcaccacaccacacgcttagcctatgtatgcatgctgccttaccttttaggattctcttgcatcctcaattaggccttgtttcgttccttttttttttcctcaaaaatatcacatcgaatctttgaatatatacatggagcattaaatatagataaaataaaaaactaattgcacagcttacatggaaatcgcgatacggatcttttgagactaattaatccatgattagtcatatgtgctacagtacccaacatgtgctaatggcggattaattaggcttaataaattcgtctcgcggtttccaggcgagttatgaaattagtttttttcattcgtgtccaaaaaccccttccgatatctggtcaaacgttcaatgtgacacctaaaaatttgctttttgcaaactaaacaagaaat

SEQ ID NO: 24402 - DNA, 12244 bp, Oryza sativa
cattagcacatgtgggggtactgtagcacgtatggctaatcacggactaattaggctcaaaagatttgtctcgcgatttccatgcaaagtatgcaattagtttttttaatttatattttaatgctccatgcatgtgtccaaagatttgatatgatgtttttggacaaaaattttgagaactaaacaaggcctaaacatggccaaaatccatactactatttcttgctaatcaatacccatttacctataaaactaataacatatatttgtacattacagctaaccaaacccatacgtagggctaactaggatgtaatgtaaaaaaaaggagcagactgaaatggacatggggaggaccgaaccgtttggttgctcggtttctctagcgttgtgcatgtacggtgggaggaggggatcgctgtaaggtgactccccttttacattagtaaataagtatattttctcccttttcaccacagctttaaaaatgatcactccatttgcatcgttgttctatggccctcacatgtcaactgatggtgacatgtggaaaaaaaactaattttggacaaatagtaacattacactagtcacctgatttttttttccttccaagttaagttgagtttaagatttagtggtaatgtagttcatgctaatacctacctcttatagttttcttttataaatttagaaaacttttaggtccagtttttaacggttttcacttattcaattattttcactggatattcacccatgttaaaattgcatatttgaacccttaatactgtggaatattggatgaaggagacggttttagagggatacctttatgggcaagtggaagccagggaatgggtggttgtgcgatagggtggcgaggtggcgatgatgctgctagtggtggatgcatgatttattggttatgtattcactcaacaattgtaggtgtcatgtgactagggtttggtgggcttgggttaggagaactaaggttacgagccgagagtgtaggaggagtggatttgttcaaaaaatgaaagataaaaaatagagtaaatttcacaaaactatatatacattgaccaaattattacaaaactaaatttaaaatgatgtgtcataaaactacagatttaacatcaaatttatcacaaaactatagatttatgattaaatatcgcaaaactatagatttattaatagagttatcacaaaattacaagtttagatccaaaataatctcaaaccttaggcgtttaaaactcaaatataacaatagtgctaaggatttaaatcccaaaatctgtagttttgtgataactatgctactaactctatagttttgcaatacttagtcataaatttgtagttttgtgataaatttgatgttaaatctgtagttttgtgataatttgttcaaagtatttgtagtattgtgaaatttactctaaaaaatatagtattaaacctcgtcaagtatatacatatgtaataatacagggaatgcccattgcttcatccctaacgttgtggagcaagggggtggttggccgatgttggaggcagagttgatcactagttggagtagttaggaggcaagagtggtggttacggatctgtcaacatgcatgagcctccagagatgagaaggagagacagagtaggggaactcaccagagttaacgaagtgggtagtggtgaccgtggtggaagaggagagagggaggcgatatgatgaagaggaaacagttgggtgtgcattggccgatgccaacgtgccaatgccgataagacaaagggcagtggtgcgtagataacaggttgagacgcattgggacatggggaggcggggaggaatggatcacaagagcatgagagaacaaaggtgggtaatgtttataggtgttaacaaatttgaatcaatctcgacatttaaaaacgacacaggcaaatagataaccccttgaagtgctataacgacaaatgtttaagcttaaatttgaaaaataaatcccaaaatcaactccaaattttagattgaaagtttaaattttagatgataaatataagcacaagcaaaaagataaggctgacagtatttctcgaccggacggtggtcataataaattaacttaaaaatatcggcaatgtattgataaatagaactcatgtgaaaacgtgttagatgaatggccacgtacacaatcgattgatcgatcgacagctagctagctacaagtatatatgtgaatgtcgtacgtacgtgttaatcggtgccacacatagctaggcttttatataattgagttaattggtccttcatgtatctatcaatcgtccaaaaaacgtacgatcgacgactttgcactgcatggacacgcacgtacgtgcatatatatatatacgcacgatcgatttgcactagtgcagtacgatcatctcataaattattaaacaattaaaattaaattgtttggcccacgtttggacaatcaaacgtgtatatatatgtctaatttggagttccaatgggtacggtacgaaccagtacacttgactttattgtctttgtatttaattattatgatgattacattgacgatgtctttttctcctcggtctaataagctaggtaggtacgttaatcatcatgtgtgtatagcctaacaattaattaatgtcataaacaacaaaaacaagttatacaatgctactgctttctagaattaggccggcctacaattctgggcaatgtacatatatatacaccatccgtttaaaaaaaataaactttagccatgaacctgtgtgtccagatttattcttagggttggattcttttgacggagtagtacatgtgtactgtgtacacctaataagtcaacttgatgcatatatacataactaaccgagaatcacacttgagcctgcctacgtgatggctaaaacttcacatatataccttttgcgtgtgagcgacgagaagagaggaaaatcactggatgcaacatatagcacgtgttgattttatggtgtccactaacttaactgtgtatttaagtctaattttttttcatgaagaagaagcatcacccagactagctattttgtctttggatgattgatcggcataaattgtctctgtcttttttttttgtcatgaagccacattagtccaactattttatgttttagattattgatcaaaggtgcaaagtttacatatacagcatgtagagtcaaaccatctaatttcaaagaaagagcacattgcgcctcatatttagcaaatttgtcagacaacttttaccacataactgccgctagagtattcacaaccaattttgccaatggaaaactttgctcctggaagaattagtggaacctgtatactctaaaacttgtctgaatgattgagccaagaagaagaggaagaatttttgtcatttttaaatttttattttttaatatttacagcaatattataccatccaaaatatttacagaagtagcccctgccgcccaactggagagcggcaaggtgtgcgcattttgtactgaggtcccttgccgccctctgcaagggctgcaagggggcaaatgcaattttcgccctgctaaaaatgtatttttctagttttttttcatcctgttcgtccctcatgtcaccctgccaccctggtctacttctgtaaatattttcactggtataacatttctgtaaatattaaaaattaaaaatgaaaaaaatccgaagaagaattagtggaagggccatgacgtgtagaaatatgtgggaaacataaggcccattagatccaacagtgaatacaagtgtcaaggaataatagcccacacacacaaagagctaagaattttcagcctgtacacatggatatggacctcaatgtaggcccaagttgatgaggccttctcaattctcaacgagaaaggccccagggatatatatggctcctcaaggaaaaggttcactttgctcctttaagtatagttgtggatttgatacgtcatatttctcaaccacaatacctgccatcacgatttctccaactattaaaaccgtttaaatggttgtattaacggtggtttttactgacgtgatgttcatgtgacagcctaatcatcaaagatattaaaaaaaaacttgggaccacatataagtggcaagggagaaaaatggaagaaaaaaaagtggccttcgtgttcttggcagcagcagtagacgccgccgccaccggcgatgtaggaggaagccagaggaggggtttgacaggcggtcaacctagcagcgcagaacgagagtgtgcgcacacagcgatgacgagttgagttgcagaccaagctacactgccatgatagggccaactgtgagctatccagtcgccgagcttatgctcatgttgctgcttcgtcgtcgcctcctctcccttctcttgtccatctactgattggtaccttctctgcttttcttttcgttcttcgcttagctgattcattcgttcgtctctactacatggcgcccttccctaaaccctgattgattccatttttgcagcttcagaactagttgggtttgctccatctctgtcctctttgggatccaaccggtacaatacatgattgattaataattgataatgtattcactttgcgttgattcagaatggctgcccagtttgatcaaccgatccctggatgcaattatgctctcaagttttaatctttttggagaatttttaaaaggagaaaaggccccaaccaatacgtagactagaacatgaaggatattttctaattacatatagttttgaaccaaccaaagcgacggcgatcttgctcttgagccgtcatgctccaagattcacgtgcctagattaggaaatggatttaatttcatccctcgagggaacatcacctcattttttccatgccacttaataaaagattgaaaaactttaacaatatagattaatatgaaatatatcacttcacaaacagacaatgccaaatttgacttctacaagatgcaaaaaaaaaacaaagtaaactgaaaattcgcagttatatttgttatttgtagaagttgaatttgaatttgcatgtttacatcgatatgttgcatattaatctatcctatcaatttctttcattttgtatgactgtttagataacatgcgggaaacgagtggtatcctttcgagggatgaaaatactttcccatattacaaaacctcccataatgtgccgcctcctgcctctgccgcttgcccttttgtgccgccgacgaagtggagtaccatcattgccactgcgatggcaatggcagattctagagcatggacaacatcttcatgtgacacaaggtaagagacctgctcatcgtgatcgcctacttctctatcccactgacccactcgatgggagctcgattggggagagagaggggagaaagagggagaagtggccactaatctctggtcttatttttattttgtttttattatcattgtaatgccatgtatacgtcacaagaccaggtcatacaacacgtaggtgacatgtaagtgtgaaaaacattgtctatattgtcgagggagtcgtttagagcggttttggtaattggaggaatcgttatacccaatattatggttgaagaatacaaattaaatctaacctatataattaaattggtttttttcccgctcctgaatgcataatggtcagcatatgtctccatccaaaactatttctctcattctctccgacttgaatatctatctatctattgtttgtctgttttgttttggcttatcagatttaaggaatgatttgcatctttaccttgttgaaaaattattggctaatcaatcatatgcactcactactaaaaaaacattttttagcgacatttgccttttatttttctaggcaggtataaccctcgaagccaaatgtccgcctacaaaaatgtaaaccggggtaaatttttttcatccgcctgcaaaaatcaattttttcagacgaaccacttaagaggtccgcctgtgaaaatacctttatttttgcaagtggacctcttaagtagaccgtctgaaaaaattgattttcgcaggtgaaaccttatgtggtccgcttgcaaaaatcatgcctccaccaaaaaaaatatctaagtcaccgagtcgtccttatcttcaactcaaagtcaaccttatcttcgactcaacctctccccaccactcatttcccctctccacacacacactctctatctctcacgtgcgcgcagggcaacgacggtgttgggagtgactccgacgagtggcagtgttggtggcggctccgaggaggaatggtgtgggcggcggctccaccggctcgcctcctcgccgcttcccctcctcgccccctccgtcgccgggcatgacgagcgacgacaaacagctcgccggctaccctcctcgtcacctcctccaccggccacaacacgcgactacgacggctcgcctcctcgccaccttcgccgccggcttccctcctcgctgcctctgccaccggccgcaacgcgcgatgccgccggctcgccttctcgccgcccctgccaccggacacgacgcacgacgacgacggctcgcatcctcaccccttccgccgccggctcccctcctcgccgacgtgacgacaacgacgaacgcgccgacgcaacaacaaccgagtcgaggcgacgacgacggcgccgagtctacgactgccgcgacaacgatgacgacgacgtctgtggaggctgcgaatggaggaggagaggcggcggcttggctcctccctctcctatgtggggtggcggacagaggagagccgtcagccggagggggaggccggcggcggcgcccgtgggtaggggtggtggatttttttcatttgctgagatgattttcgcaggcgagcgatagtataccggcagtccttcccccgcctgcaaaaattgttttgggccatctggaaaaacgatttttctagtagtgacaatgaataatccaatcaattgcctaaaaaatccaatcatcaagtaattaagcttgcaagtaaaaagtacatgaatcggggttgcatcctgaaagaaaaaggaatcgatgatttagttgtccgctccagccggtaggagtagtgtagtacgaagaaaagatgaaataataaagcagaagctgcattctgcgagaaaacgggacagcgagatgtcatccacaaaaaagctttgctaactgccatcttctcttaattagcagagtggaataatgttgattagtttaagcttgagcctcagatggacatcgacatctcatattctcatgctttaatatgtggtaatggcattggtggtagtcatgaagctagaacactcttgcattgtgtggttttttttatgaatatataataaaatacgtacattgaaaactatgtcaaagtcttagaccacgagtaaaaaagaatccagggagcaggaggttcagatggtttgatttgctaaatatatgtagtagtacttcgttgacaataatactcgatcgtataaagggttaaaaggctattttggagaactgagacttactatatactccatccgtttcacaatataagtcattctagtatttcctatattcatattgatactaatgaatctagatatatatatctatttagaatgacttacattatgaaacggaggaagtatatacagctagcactgcatcatgggctcatggcaataaaagagctcgatcacatcgaccaagatacaaaatacacgaaaatctcatacactggaatggttatctggataacaaacttgcatgagttcgatcgatctggccagggtccaatgatcccatcgcattcgctagctagctagctaagcccatgtttatatgaaatccattttaagaagaaggcagcaactaccagctgaaacggtagttaatcaccaaacatgcgtatctacatcatgcatgatgctactatgttagcgaagaatttaatattattattattggtaggaagtagtacgaaggaagaaatggaagctagggagggctccacagagacacaggtggtggatgtggttgcaaacagaaacagaaagtgtcgcgcactgccatggttgatggaactcttgataacttcattctttaaccatatagtataagctactccccctccaaaatataagcatttttagctatgaatctagataactgtgtgttcagattcacagctaaaacttgttatattttgaaacggaggtagtaatatatcttcttttcaatttacactggaatgttatataaatggtcccttcataacttcacataaaaactatcgtgggctcgtcgactctatgtatctgttatggagacccacatcgtttagagctttttatttgaaaaatgcagaattttgttttttaccgaattcagttcgattacttaaagaatgctttaaaaatcctattttacaaaggctctatgagtttctaaaatctatttatttgtacgtgactctaccatacctactatactgagatagtccacaaaactagtaatccaacggttctcgaggaagacaatagcggggaactagttttcaatcggtgccaacggtggctgcggcgttacctctccacataatcccactcctgacggggcaagaaacgatcgggttggcacaacaaggctggagagcgacgacgagtaggcgaggcgagaggatgaggaaggcatcagcggactgacaacatctcctccctttggatctgaatctggattggtggcatctcctctctttggatctagatcggcggctgttgatgaaaaaaatcgaacacaccggcctaggagatctgcttagctcctgtgcaggtccaaaagttgttgagatgagggcgtgccagtcagtttgatcctgcaactgacaagatatgcaaatagtagatcaaacagccgatcggctaacaaaccgatggagtagttccagccgatagtgataatagccgatgccgataccagccgatagcgatagcgtttaagcaatcggctatatgtccaatgtagataataatataaaggcaatcggctgatgatgatgtaataaaataacaatataatccagtataaaccaatcggcaaataatgatatgataaataagtatcgatccgaaagttaaagcacacatcggctggaggtccgatgtcatgaaatgcacaagattagattaaacagtgaaacctttgttgtcatcggctaaattcaacttatatgtatatgcaatccttatgagccgatgcaacgtccagataatttactggctgaaaccccgatgaacccttattggcagtcaaaaagcaggctagagattatggttctaagcacgacttagtagatcaaacttaactgatgcagcactaagtatgaaaagaaacacaatatctagacaatcaagccgatgactgattttcagggtggtagatgcctaagctaatctaatctaacaacgcgatttagccgataccggtagaaaccctaaagcgagaagcaaccgatagagctaaattgatatgctaagactagattaacagagacatatgataaataggtaggcaaatatatcatccaaaccagagcaatccaagaggtcgaatgtactgatgcagccttgaacgacgccgacgtagacgatacaattgcctgggccgacggaacattggacttaccccttcgccagagatcgaacatcgatgcagccccgcgtcaggtagggatgaaaacggagcggatacggacggataatgctcataccatattcgttttcatattttttgccggatacggaaacaaatacggatagctcgaatacggaaacaaatacggactatctcgaatacgaataagaatcgaatatgatcggacacgaatacggaaacaaatttttcttggaacacgaaaaccaattcaacttctaatagaaacaaatatcaacatatataattagctcattttatataaaatgtagtataatttataaatatttttaaaattttaaataatattaataatgtggactagtgttaagagatgaactactattaaaatctaaaaaggtatattgaaggtcatagagttataaagaaatggggtatgtcttgtggcttctgcggatatccgaattattattcgtatccgacggaaaccctgataccatattcgtattcgtatcgagagaaaataccgtattcgtatccgtatccgaactatccgatccgaaaggtatccgtattcgtttttatccggagcggacggaaactatccgctccgttttcatccctagcgtcaggtgccaagtcccgccggacgataaaataaagtagaaaagataaaaggtggcgatgcgccgaattgtattaatcgtgaagatagattacatagaccccgggtgtacatatttgtacccatgggttgatacaagttcttgtccgacaagaaataaactttcctaaagataaaaggcaagataaagtctttataggacactaaacacactttcctaaagataaaaggaaactaacgaactattcctaattaatagataacttgccatgccgcattctctttgaactcggtctcttctggataagctttctttagtatatcaatttccttaactgaatatagcaagaatccgacaactgacgacttgacaattctcatcggctaatctcaggacttcaaagccaatgctgactctaagccaataactattccgggcttaccaaatttcactgttaacagcggcatgcacgatttagatctggagcagtggcgaggtggctcgagcaccgacatagtgacacatgtgagagtcacacatcttcttggaggtgatgttctgacaccctctcggcctcttcctcattagtgcttggtagtgaactcttcggatgaaattctttgttctggatgccaggaattgcaccaatggcattctagatgttgcaaccttctcaaggatattgcattggaagtatcctattggtgtcgcgtctcgtgccagcatccccgtaggttgggtttggtggctatggcgatggcatgatctatatgaatgactgacttatagcttagttgctcttagtattttccgtgttggttcaacgttagttatcgactgtgatgatagcgaaatatgactgacaaggaaacaaatacagaacaaatgagtgtggcggttgccattttctgttgaactctataagagagtcagggagaccttttggaaaactacagaatgaacaaccacattatctctataattgtcatcttgtggtccaatcaatccatgtattttcttcaatattttacaatcttcagtgtttgcacttgaattcatcccatagttatatttttttccttatacattccctttttaatcattgtttcaaatagttgttctttaccacctcttcctaactttcacttgcttgtttttcatgtccacacttcccaactcattaaatagtttgttttttgaaagaaaatgcatatgaaagtttttttaataaatatattgatttatttttaagtttattttaactaataattaattaattatacagtaatccctccatcccattttgatcactctctaaaattgctgaggtattcccaaattgattgtcatctaactggtgtctatccatttacatgtgtaagagtaaatgtgttgcgtttctatccgtttatgtgtgtaggagtaaatgctatagttacatatccgtttgtttatttgtgcatgagtaaattgtattattgcatcctcacgtgcatgtctaacataatattttgatcgataaggtttaatttaagaaagaatgatgttttttttcttgatcacgataacacttatgaatatgatgatgaagaggtgtgtaaaacatagttgaagatgtggaaatgggtggttgtctctccctctcctcctttcttctccaagtcaacagttcctacgctaccaaacccgatcggacgcggacactgacagagccgacgccgacggacaccaaacttcccttcaaatcaagggttataggagcacaccacgcgggtgagcctcaagaaaggaagggggcgagtccggccgccgtcgccatgtccaagccacagcagcagtcgg

SEQ ID NO: 24403 - DNA, 9232 bp, Oryza sativa
gcccttccccctctcctcctccccccgcccacctgcgacttctcccgcggccgatgggtattcgacaacacctccctcccggcctacagggagaaggaatgcaccttcctcaccaagcaggtctcctgcctcgccaatggccgccccgacgacctatggcagtactggcgctggcaacccaacaactgctcgctccccacgtacttcccattccttctagttctagatctgccatttcatttcttccagatggatcgatttgagttgattcgattgcaggttcgacgcgcggcggttcatggagaagatgcgggggaagaggatgatgttcgtgggggactcgctgaatcggaaccagtgggagtcgctggtgtgcctggtgcagcccatcctatccaagggcaggaagaagatcgtcaagcgcggttccttcaacatcttctacgccaaggagtatcgcgccaccctcgagttctactgggctccattcctcgtcgagtccaactccgacaaccccaatttccaccacatcgaccagcgcatcatcagccctgagcggatcgagagccatgccaacaactggaaggacgttgattacctcatcttcaacacctacatctggtggatgaacaacgaagacatcaaagtcaggtctgtacccaccaactttgatgttactacttcatttaaccaatttttagtttagctgggatttctagtgtgtttaaaatttctttcattttttttttatttttgcaggaggccaaattcaacttcttggtcagatcacgacgaggtgccaaggatcgagacctatggccgtgtgttcaagacttggtcgacctggctggaacagaatgttgatcctgccaggacttcggtgttcttcatgacaatttctcctcttcacaacaggtgatcataaaacttgcatttctgatttctctatctcttacctcctctctacttcctctctagttcaagcaatggcggttcgttacgaacatcaattagttcctccagggcagggcctaggaaaacttaatttggtaaccttgaaatctttaatgttgtggaccactgtcggtttgcaataggacaccctacctatccctgataaagtggtttgttactcctaattacgttctgtacaagcaagcttcctcttgttccagtctgcagagcacagccactatgtcattgtccaccagaaaatgaggtcagttggacccgtttgttaggtttgcacgtgataaactaggaacaaatttgcctgactttctggggttttagagtctttcaaattccatagttcactagttggtcttggaataattccacactagttcactagtaggtcttggaataatcactcctgtatccgtatatgcatcagaatgacagaaagtatggtgctatgcacaaactagttacttcggaacataccaatgtctgaaatcagaaggcgtggtgctatgaacttactggattaacgcacctcattcctcaccttttatatatattatttccaaatatttaagaacaagtgaaccaattttaagtactttagtttggaaccactagtattatttcttgttttgtgtgattctcaaaggctctttgttcttttctggtttgttgcttgtgaagcacaaggtgccacaccattccatcacactatgcacgcacccatgtgaaaacaaccctccttttgttgttgtaccagatggtccaccaagaaatttgttgggttcttatattgtatatagacacacatatatatagactgggagtgcacccttggtgattcttttagtgagttttcatggtttcttcaaacaaaaatgcttctgtgcttgtgggtgtgggcaagcaatttaaatttcaaatggaacatttgggataggcacagtatagcctacaagattttgcatgctttagtgattctggcccattttgacaagacaattttcagcaaacataaaacgacgtaatgttcgaaatgttgtacctcaaggaaactgttcaccaatctcagagaaactgcaatgatgtggataactaccatacccacatacacaaatctcactattaaaaaatattgatattggctttgcctgaaagaagagtttctactgttaagaataatgatctgcaaaactaaatgcagtgtaaaaataggcttaatatgcttcttaaataagtctttgtttgatactccctctgtttcatattataagttgctttgacttcttttctagtcaaacttttttaagtttaatcaagtttatagaaaaatgtagcaacatctttaatacaaaataaacatattatcaaaatatatttaatgtttcatttaataaaactaatttggtgttgtaaattttgctaaatttttctacaatttggtcaaacttaaagaagtttgactaagaaaaaatcaaaatgacctataatatgaaacggatggagtacatgtattgggtagccatttttggaaagttgaatttgcaatcttttgagttaggttggtagttggtagatggcaaaaaatttgggggagtgttacttccaacaaaactctgatgcttttgctaggagaatttacatagaaagattagtctatgtcgatgtcacctagaccagccagaaaaaagaagctgtggtagtagattctatataaacagtaacatgaaactctcatgtatgctctttgatgtcaaaatctgatgtttgcagtagtaagatcggtataggtggccgttggttcaacactgatgctgtcatcaccttttgccaatttaatatagacgagccctgcagtgagcttcatagtcgcactctgttcagatccattgctaagacattttaaaaccaccttactgttgaagttagtgctactggaagtctggaactgtggaatatactaaaatataggcatcgtgtgaggtggttgtgagccttgtgcgtcatgacctgtgcaaagcaaagtactatgtgtactactagtatactttgtgaagttagtgtcggtgtcaaataatagtaatatttcatcttcatctgacatcttgaccccaatcctttcaaccatgagacaaagcatacatcatttggtgctttaggctttgattttattccacatcatttgtacagatattgatttgcaaatgatttgagcacagttgcttataaatcaagtcgctttcttgacatgttgggacatttacattctgatgcactcatgtaccggttgaaattaaggatagaatttaaatcaatcgtgtgtttgtgtcagcaaaagacctgctactgtttgttgttgtattgaactaatgatatctgctcttgaattaacattatggtacatgcatttctaatttatttacatcgctgaagcattttttcccctcttgtgatgctatcttaaaaacagcccagcacaatgggggaacccgaacgggatcaaatgcgtaaaggagacacttccagtcctcaactacaccaagccactggatctcaaccatgacatgcggatgtacgacctggtagcaaaagttgctaaaaacatgaagaatgttccagtgtcgttgatcgacatcacaaggatgtcagattacaggaaggatgcccacacatcattgtattccatccgtcagggtaaactgttgacaccggagcagaaggctgacccacagaagtacgctgactgcatccattggtgccttcctggggtaccagacgtctggaaccagatactctacaccaggatcctctccaaatcctcccctccatccacacatccctctctccctccacaatgacaagcagggagcatgatttttttttgccccatcgtatactatataggaaatgtatcattactattcaatttttttggtagtttggtgaagaaaatcaagctagagagagaaaggatggagtgggctgtttactggtggcatgtaaaatcgttcaattgaattgtaaattagttttgagctaaccaattgagcaaacagcactgttgtagacactcggtactctggactgtgaaatcagctggcaatacatatatacaggggggcacagtgattaatctgagatcaatttgttagtattatgtgttgatggcgtgatgcttttgtctgagaagagcagtcggtgtgagattggcccagatggccttccttttgtgtttgggccgtatgtgtgcatacgccaccttaacttccatttattcactcatcgaaataattaatttcacgtcgatcctactcctgagaaaaatatagctccttgagaaatcttttatgtattctgaagttcatgataaatcttgtctcagaaattacccatttcagttaaccgaagaaatcacctacaacgagacgataaatctttgtcttggaatcagctaactcctaacttatcagttgccattagcgaccttagcaaggtaatgtatttttaacccggagagtttaactaactcacaagaaaaaaaaaacagtcaacctcaaaacaagtctctgtataatccaaactatttctcctaatgcattttcgttgctctataagcaacaactcgcagcagcctgcctgcatctctttccagatcatacctacgttcacatgggcttaacagctcagcttcaccttatgcggctgagatttgctctaataagtgttatcagatctaagtgaagtagcagtagtagtgctaaaccaagaagatgaggccaactcccatgttgtacgaatacttaccgctagcatgtatctttgcagtggagcacccttaaatgttggtatttgcaaattgccctctaatggtagttggctagttgaagagcatagcagcgtcgtgctctttttttaaggcatataatcacttacaagccgaaaagtctaagcctaaatacataagcgtttttttcgtttggctttttaaaaactataagtcactttacactaacactattaagtcaaaagctatgtccggaaagttttttttggcttatatgagatagagatataactctaccactaaactaaggatttcaaatctatttgcttataaattatataaactaaaaaaactgacttaaaagtctaaacctaaacaatgagacccttatacatatgcttataagccaaaatttagtttattttacatcatttgcttttaatcgttaaatttatgcatataaaagttttactctcttattttttgcttgctaataagccatacggataagaaagcattggtgaaactatgagccgctaggtgttattaggcacaaatcattttgaaacaaccttttttctatgttcttttattcttaacggatttatagataaatatgcatgattttcgaacccttagacaatgtgactttgaaaaaaactttctatatatgaattttttagaaaaccatttaaacactatttttaactttataatatttaatttgtttgtttgtaaaatttataattaccacaaatcatccatccaatcagccatttagcacaaaagaaatctagcttggacaatatttagttggctacatcaatagtgacggggcaactctaaatattattgatggtagtatatcaccccttaaataaattaaacaatctagcttggacaacatttagttaactatatcaagaggcaccagaacttttgaccctttgaccatgagtttcatattataataactttagatgagaaagttaaggacctgtttagttcccaaacaaaatttctcacgttgtcacttcaaatgtttggacacatgtatggagtattaaatgtagagaaaaaccaattacacagttcaccaggaatttgcgagacaaatctttaaagcctaattgcgccatgattgacaatacggtgctacagtaaacatttgctaatgatggattaattaggtttaattaattcgtctcatagattcctgtgagtctgaaatttgttttgttattagattacgtttaatatttcaaatgtgtgtccgtatatccgatataacatgcatgggtaaattttttttgccaactaaacaaggcctaaaatgtacaaatccctttgagatgcttttaggaaactaataacttgggtgtgaagtagttaagggtgatttatgtcatcaagtaaacctgtgttagtaataaaattgatgggagtagtgggtgagagagtgaatacagggatgatggggggttattaaggaaaaagaggccatatgtttgttgcaaagcaatagagaagccaagcaggcagccactaaattgggttggggtgcctcctcctccctttctttctttcatctgcttcgtcctcagatccgatctctcttctcttgttctggggttggggtctcacgacccgccgccttcttcgtccccgtcgctctagaggggatctcaccgccagccgtctctcgccatggcggcggccaacgcccccatcgccatgcgcgaggcgctcacggtatcctcttctcctcttactcctccccgcgagatctcactcgtaaccaaggcggagctaatggcgcctgactcgtatctcttctcctcgctcgatgcagctcaccagcctggggatcgcgccccagttcgtcaccttcacccacgtcaccatggagtcggagaaatacatctgcgtccgcgagacctccccgcagaacagcgtcgtcatcgtcgacatggccatgcccgcgcagcccctccgcaggcccatcaccgccgactccgccctcatgaaccccaacacccgcatcctcgccctcaaaggttccttcctacctagatctacctgctatctactctttcggatcttcacttatttcctagcgatctactctcctactccctaatctttctactatttgcttaattcaaggagccatagactacctagcacattcattttgccatcctaccatagctggaaaccatactgttattcttaccatttgcttcatcttgttcaattcatcagaaatgtgtatgctaattgtggtttacctctataatttcgcgcacatgtataatttccagtaacaatatgttaaggactgacaaattatttagcttcgtgatctactatcaaaaaattcacgatgaatctcgatcaactgtgcattttacaacttcaagagtacttactccatagtaaaccaacagttttcatattctcatgctgctcattcctagtcacagtttccatgcccttgctagttgctactgactaggagtcgactatcatttcggttttcgcttatatttgtagccatggccacaacatcaacttattctcccataactccataagttaagcttaattttaacctcggattgggcttacatggatatttccacgctgttcttcctaattgaatacatgacgtacagatcatctggtcttgcacttgatgtttataatatatcctctccaggcaattgttcacttgttatactgtttcataccattgtcacgatttgttcatgcttcatgcttttgtatgtctatttttaggttgcttcagattggattcatactggcaataaatttttctaatgtttaccatcaccagtgtttgtctgacattcaacattcaatttaaaatgcctagtttatacattgacatcatggtgtctggctagcttactaattgcttacgtagaagcagaatgatatgtctttacttttgcaactttccagctgtttaacttttttttgttgctggaatttgcagctcaaatacctgggacaacacaggatcacctgcaaatcttcaacattgaggctaaaacaaaaattaagtcccaccagatgcctgagcaggtacaaaatttgaagttttgccaaagtatgcgtaaccactttgtttaaattgtatcctataatcttaatgtattctttgcatattttattttcttttcacaatcacaggttgtgttttggaaatggatcaccccaaagttgttgggtttggtaacacaaacatcagtttatcactggtcaattgagggtattgaactattgatctgaacttttgtccaattattattcgctgctttgcattatttggatcatatccatacaaaccaatgattttttttgcatgtatttgttgtaatacaggagattctgaaccggccaagatgttcgataggacggctaatttggccaacaatcaaattatcaactatcgatgtgatccatctgagaagtggcttgtgcttattggaattgcacctggtgctccagaggtatgtttgttaataagtgccgatataacaggctgcaatggtgtaaagatcaaaatccttttgggcatagtgtaaaagactacatatattttcgaaagttgtaggaaatatgctacacctatgctggagcagttcttaaaagtttattacgtaatgctttgttctatatcatcctaacattgatgtgctctctttttcacccatcagaggccacaactggtgaagggaaatatgcaacttttttctgtggatcagcaacgtagtcaggcacttgaagcccatgcagcatcctttgcatcatttaaggtaatgtccggtactccagttatatttgtgctggttacatattctttgttctactatttgccaaattttccttttatttttcctccacaggtcgtgggcaacgagaacccttcaactctcatctgctttgcctcaaagacaactaatgctgggcagatcacttctaagttgcatgttattgaattgggtgcccagccaggtttgtctctggaaattttcaagatttgttttgtttctattttcaagtttgtagcagagtaagaaataagtagaatgccttttatcaaacacacatttgtcatttagtgtagtcagtgctattctgcaaatggttctatattccaccccattcttctccttgtaggccattaacagtgaataaatgttcatggataaatcattcctctgttcactcgttcttcctatcatttatttcagggaaaccagggttttccaagaagcaagctgatctcttcttccccccagattttcaggatgattttcctgtggccatgcaggtgaatatcttgcactctaaaggaagtataccctgttagataccgcatagatctaatttttttaaattttctgtcaattacagatctctcagaagtatggccttatctatgtaattacg

SEQ ID NO: 24404 - DNA, 536 bp, Oryza sativa
aatccatacttccccctttttccggttccacatccccttgccttattcctcttcatccccatccccaacactactagctattcatgtgtttagaaaaaaaaaaaaggttgctcctaacattatataaatgagtggtgtattgctatatttgtgtatctatatatgtgtgtctaacgagcaaagctgcagcaagcaggggagtggaaacctataaaagataattctacaaggtgatttgcttaagcttaaatgaaatttgcccactaaagatcaaatgtatttgactctaagtacccatttagcttccggtttgctgtgaagggtgtattcactgattaagaatggattctgatgatttatgaagcaataataaagcaatcaaatattgtattatcaggtatttctttttcttgatgttatgagttttaaagcaggaattgaaatgactgtaatattgacatgcgttatttgtctttacccaaagtgacagttatgaaataaatgtcctttcaaaatttgtggtttgggctgcagga

SEQ ID NO: 24405 - DNA, 27411 bp, Oryza sativa
tgcttaccccattccgttaagatgactaactatgtagggtcaaaattcattttgagtttgctctatcccttagttttttttttactaaacaagtggaaattcgtattaaaataggggcaacatttataaaatgaagcttaatgtaaaaaaaaaaggagcaaaatcataatgtcctcggaaaagtagggacgaacaccgttaaatcatgttaacaagagcacatacaaacttcagttaaaaatgacaaaatcaaaaacttcaaaaaatagggatacaatcttaactgaagtattacaaaatcacaaagttaaaacaaaaggtaaaatcgtagctgaagttaaagaacagaaataagaacacaattgtccatttttacccagagatgactacacggtggcccataaaccaggctgtcttacaaggtgatcttgtgggctttgtctgtaaggcctgtgaggccatctgaggtccgaaaccgggcctagctcgtccagatgttaggacgtcaaaattgcttgttagttgattggaataagtctattttgctccctcctctcttgcttcgttgaatcgtatccctcaatcacaaaaccggatataacaccttgcacaatttcaaaaaccagttcaaattgactctttgggtggtttcaaaagcggtttttccataatgacagatcgacttggtctaagtgttttcacgtggtagcccaatcattaaaggagttgaatatagaagggggacggctaatgggcggcgatcacaggcccacctgctccccctgtatgctcccttctctccccctttctcctctctttcttctcttcatactacagtacaccatacaattttaaaaaataaaaaaacaaagttgaaaaaatttatgtatagaaatacaaatactatatataaaaaaaattgaattcaaattcaaatttgaaatgagtatgtaaatttttgacttataaactttgggtctataaactaatatttgaattcaaattcaaatttgaatgggtatgtaaacttttgacttataaaatttgggtctataaactaatatttgaattcaaattcaaatttgaacgggtatgtaaacttttgacttataaactttgggtctataaactaatatttgaattcaaattcaaatttgaacgggtatgtaaacttttgacttataaactttgggtctataaattaatatttgaattcaaattcaaatttgaaacgggtatgttaacttttgacttataaactttgggtctataaactttaggtgtataaactttagatgtatagaaatactatatataaaaaatatttgaattcaaattcaaatttgaatcggatatataatcttttgatttataaactttgggtctctaaactttaaatgtgtaaacttgaggtgtacgaactataggtgcataaatttattaaaataggaaagtaatacggtgtcaaaaaaagaaaaccaggtggaggaagggggatccggatccgatcgccctgggcgatcgctcgcccagtagcaattccggcccgcaatgccggtttaccagtggcggactggacaaagttggccgttgatatcggcggggttggcaaataagttccacatcccgctgcagccgaggcacacgcagcaggctagaggggctcgcggtggcgttccacagctggtcctctccatcgccgccctcttccgcctcccaatcaacgtcgtccgttccacacggcggcaagcagcaacgacggaggaaaccccatgggcgctgacacgaggtcctccaaggtccggtgctcgccgtggaggcggcgtgcgaggtctattatgtacacgcgggaaacagagaactgtgtcgccttgacgccgaacagcctagcgacgtcggcgatccacggcgttgggaactcgaagagtgcaacgacccgccagatccttgcgacctcctctctatctcctcgactcctctaggctggccggcgtgcagcgcacctcctttcccttctcccctctctccccagatgtgggaggcaagcaacaagcggcgggagtggagctgggcggggcggctggtgggagatcctagtcgcatgacgtcccgtgcctcgtcgcgcacaacgacccaccgctcgctctcgttgtcgccgtgctctcatgcatcgatggcgacatctgcccgtcttgcattcacctcacaagccaccaccatgtcaactgagggctcttgagccaccgctgtcaccgctgccacctccgcaaggtgtcattcaattctgccaccaccgagcatgatttcggtagcaccacctatgtggtggacataggcgaaccttaaccctagcttcggcgagtcgctgcaatggatagctttgtgaccttctcccgctgtcgccgatgttggatcctcctagcggcgagtgggacagtggcggcattcgaggtgtacaatatctactaccacctggccatggtggcctggcgccaccgcctcgtgcagctggttggcataagctctctcagctcgtcctcgatgaccctaatgtcagccgagtcttcggcaaggtcggattccgcaatgaggacatcaagctcgccattctctgcccatgccgctcttcggctgcctacccatgtgtagctgtccgccgcttctcttcctttgcagcttcgccgccgcagacgacgctgttatcccttatcccaccgggaaccttgccggctcggggggagaagaattgtcgccgcatcgccaagatcctctcccgtggtcgcaaccccatgctcgtcatcacgggtgatgcgagagaaatagaaggactgacaagtggatcccatattttttttaatttttttgaccattgtaccttacaaatcggacccacttctatttcaactcctttgatgactgagctgccacgtcgggacacttagaccaaggcaatttgccacgtcagcaaaacatctttcgaaactatccaaggagtcaatttccaccggtttttaaaattgtgggtggtgttattctagttttgtggttcagggatgcgatttaaccagggtaaagagatgcaggatgcgaaatagacttattcctagttgttacttccacgtagattcggcccatcctcatacccatgcgctctggatgtaggcaggaatgtaagtacgtaacaacatatacacaaagtgttggaaatatagtcatatatcggtatattttaatccaaaatattaagacaataatcatgacatgaataatgtgaggtgatctagtgataaaattaaacataaccaggagcatgcttaagataaaataagcatcatcatcatgtagagaacgcaataacattgcgactaacagaagtaacaaaaacagagatagcggtagaatgttatacactatgaaattccatccctggattgtgaggtagaattgcctccgttggtgttgtcgatcggtgcaccagctccggctcccggtgcgccagctcccgctccaggtgcgccatctccagaagacatgatgcaaatgaaccgacgacgaacagaggaagaagagcagtcgtgcggaagcactccccaaaaacttgatcacccgcctacccggtgcagatctcaggcgaggtgtggtttcggagggcttgctcgttccgatctctcatgtgcgcaagcgatcagaaccggggaagcagaagcagcacaagcggtgcaaggaggaagaaccagcaatcggagagaaagcgtagagatctgatcgggggtctctgtttcctaatagcgcaggagaggaatccgcccgttgccgcagtaacgacgcgatcaatgcgtattgaattgcctgcccgttacagaggcaatctcgcggggttggattccggtccattgcaaaaggatcgagagagagacagagagagatgcagacacaacgcaacgcctcggcctccccacgccctcgggccggccggctcggctcggcgcgcgcgcgcgcttgtggctttccgatccccacctcaaccggtcaacagggagcctccaataactccctatttaagttgagatactccacttttaattcccagtgtggtattattatctttaacatttattatgggcccttgagattttaatagaaaaatcgggcctagcccatttattctaacacaaagtaagtaacaacatccatgaagtgacctgcatgagaaaatactcctctctcttgccactcttttttatttctgccctcctctctctgtcactaagtcctctccccactcctctcccctctcccctcactctcggtgagtgagggccacggcggctatcccatcatgggtctggcagagggagcgagaggctgacggaggagtggccgagcgcagatccagcggcggccggctgccgtccccagccctgatccagtggcgacggccctcccccacgcggatccggtggcggccctccccgcgcggatccggtgcccctctcccttccgcgcggatccgtcggtggcggcgacgcaatgaggacgacgatgacggcgacggtgatgggaggacaagcacgccgacgccaaccggagggcgaggacaaggatggcgttgacaatgagaggattctagggttagcgtatcggggtagtggggtagttttcaattttcagaatttatatatattttttcatgattttttccttttctcatgtggtcagcttaagcgcccatatgggaaaatccgattttcgtagacctttgagcacaggtgggccgcccatccacatgcaaaagtcgattttagccgcataaaaaaaaaccaaatctgtagtagtggttactcatattgaccaaaggcaagcccagcataattcaagagtattaaaatgaatatctaatattttttataaaagaaatagatatatatcgtatgtgatgcgtatgtgtatgaaaaacaaataaaatggacgtcatattcaaaccaagaagtcatcatattcaacacataattaaatatatatgctatataaatatcatttttttaatgaaggtactgccaggtctttacccaacagtttgatttatgctatataaatatcattactactatatgataatatacatgccaactattaggtttttggctgtaacttttctttctacttctctacattttgaataacagtttgattttatgctatataaatatcattactactatatgataatatacatgccaactattaggtttttggctgtaacttttctttctacttctctacattttgaatatacaaccttaaaattctagattcacccctaatattaaccagttacaaccatttcacattttgttagagtgcgcagcccagtggtgggccacccaagtcacattgggcctgttcctccacaagcccaaccgaaaccacaactagacctacacaatccaaaagactagtctgatgggtgagaaccgccccccaccttttgagtcgtgctcccccatcataaattaccgatgtgggactaaacccaacaatctctcccgtcacatcaacccatgtgacccgatgaagactccatgtgacccatggaaattgttccgggttccaaacctagggcttgtgggtctgcatgtgacccaaggaaattgttcagggttccaaaccttgggctctaatactacttgttagaacccaacaatctcccccgtcacatcaacccatgtgagtatgtgacccatggaaattgtttcgggttccaaaccttgggctttgataccacttgttagagtgcgcagcccgacctaccaactgtgagccacccaggtcacattgggcctgctccaccacaagtccaaccggagccacaactttaggtcctgagcctacacaacccaaaagactagtctgacgggtgaggaccgctcccacattttaagtcgtgctcccccatcatcaattaccgatgtgagactaaacccaacacatttaatttctcatctctccttaatcctaaattaaacatcagaaattcagaaatgtttgcatttcatgacaaagagagtaagtatatattaagaacacaaacttaattcctacgaataactagtgaaagtttatctttgttcctatgaataacacaaacttatctttttatcatgaaaacacgttgttttagatatagatatagtcgcgctagcttcttaattcaactttgagtaccacaatactccctccatactcacaaaggaagtcgtttaggacaatgtttaagtcaaaccttgggaatataaatcatgaataactctcaagttgttgagtttgaaaatgtaaaaattatatgaatatatttgtcttgaaaaatactttcataaaagtatacatatatcacttttcaataaatatttttatagaaacaagaagttaaagttgtgttttggagaccgtgtcgctgtcctaaacgacttcctttacgagtatggagggagtatctgacagttggacacttggaatattaataaatataggattcgcggagctattaacacaactgcatcgatctctctgatattgcagttagcaaggaattggaccacacgttcaaatattaaagtgtgcattgcatatatattagccaatgatcacctagaactttggagaatgtatggctagttcgttggtgttcatattgtacttgcgtaatctcttcgctctgcatgtgcgtgtcgttgactagtgaggtgtgatatatcccagctagaagacacactaattattaacttaagcacaccattcccatgggtctaatttcttttgccaagttcaactacttgactagccggccgtgcatcaatatgcatgcacaccactacgtactgatcgtatgatccaactatagcgtgcaaggatcggggcaagagacgatgcaaacattaggtgaactattttaatccctcgaacagatgattccttgtttgttgaaaaaatcatactgatagttatgaacaaatctttaaatctttaataatattcatacaacaaaaatgtaacaatctatagaataggcataaactgaactcacgcattaagaaaataaaaagataaagacaacatataaataatactagtattttttttctcaatgtgttgtcaagtttgaacttgtttttcttgagcatgcaattaaacttgagagaaaaaagagaacggatattctctctagggattagaatatgttcctacaaacatagggcaattcgaacttaagccctacgtttgcctctctttgatccattaaagaaaaaaaatcaaaattctgaatatacaagagggctaattaagaaataccctcaagtggtaaagtattttttcccttgtgaggggatatccctaaattctcgaatgcatttaaataattatgaaacaatttgataacacagatcaatatgtgatatatcatttcctaaatatacaaaatcaaaattggtttttacaagttgaaacaaaagatcgaataatccaattaagaacatgccctaataatttggtttttttattaaattttatatggcgtatttaaacctaccttgggtttaaggattttttaacatataaatttttattttttttaaaatttaacttttggatggatttggaaaaacttaaggacttatttggggttaccaacgaaggggtccccgaccttccttggccctggactttaattaatttggggccaatgtgcttggatcaacctgtcaaaagcctgaccacactttaaaatactatctttgtgtgcctatatcaagtagccctttgaatcgcacgaatgaaaaacggaaaaatacagcattctgataggaacgtaggtgtaaatcagatgattgcaaaacgcggaaaaacacaggaatggtcgtttgattggaccccaaaaaaaacacatgaatcggatgagaaagataaactcaaggaaaatttttcaagagattgaagctcttgccagtggcggaccctctcttgtggcatgctgtggcactggccatagctatgccatgcaaggattgaagagtatttatgcatttggccattagcatgttgatttatgtgctgattaattggttatttgatttgataaaagtttgtttaattcaggatgtagggatttcgtagaactgccttatgtctgaaaagaagactaacacaacccgtaaaaaataagtatgctgctttagtaaatttccactagtttattgcttttttccttgagcagaattattgattggactgaccatccaaaggtctggccataaacagagcacatatgtaaaatggacgcacactcttgtgaaaattatttcactcgtgaaatttacattacaaatttaggactattgtcgttaacgttttatttagtgtgtcgtatattcaatgagtgcaatttgcagtatagttcgtgtaaaaaaaattataaacaaacgtagtcctatcatattgatccgccatagctaaaatttggtgttggttccgccactggctcttgctatgttttctctaaaatctccattggattgcctatgttatagatatcgtaaaacatatgataggatttaatcatttgttttgaaagccttcatagaaaatttttctatagaattgaaatccttcgaaaccgctatgttttttctacaaatcaaaagcgaagatacgttttcacaggggaggttatgttggcgtttttctcccttcaattgtagaaacttcaaacaaagttagggcgttaattaaccgtgccaatgccggtcagcgactgctcctactagcagttgcaccaacgtatatactgggtccaggtatatttgagctaagctggcggtataataataacaaacatagttagagaaagctatcgtataaacttacagatatctccacatgggagccgtgcagccagctaggtaattaatctgcagaaagcactaattaatcctagcatatcatctcgcatgatcatcgatgcatgcatagagatatctcaaggcacacgtactccactaatccactctataaatagcgaagcacgtaccacgaatccctcagctcgtaccagtcgtcgtcctaagcaagaagaagctaagctagctagctgtgatcggagaggtatacagtgatcagtttgattgtgaatttgtgatcgccatggctgcagcttcgtctactacgactcgtttttgccttctccttgcgctcgtcctgccgatgatttcctccgccgccgccggcgacgacgcgctgccgctgcccatgacaccgtcgtactaccgcaagtcgtgcccaacactcgaggccatcgtgcgcggcaccatgctcagtgccatcaaagccgagcgccggatgggcgcctccatcctccgcctcttcttccacgactgcttcgtccaggtagatgatcctagctaagcttcatttcttcctgctcattgggcggatgatctatggagatcttgaagcaatgcaagctcacattgcttgtgattgatcagggttgcgatgcatcgattcttctcgacgacgtgccgtcgaaggggttcgtcggcgagaagaccgcggggcccaacaccaactccatccgcggctacgaggtcatcgacaagatcaaggccaacgtcgaggccgcctgccccggcgtcgtctcctgcgccgacatcctcgccctcgccgcccgcgaaggcgtcaacctggtatgtacgtgtttggttaccgcgtttggttaccgatggtgatttcggggccggtttcgtaacaacatttctgcactgcacacgcaatgcaatgcagctcggcgggccgagctgggaggtgccgctggggcggcgcgactcgacgacggcgagcaagagcgaggcggacagcgacctgccggggccgtcgtccagcctcgccgacctcgtcgcggcgttcggcaagaagggcctggcgccgcgcgacatgacggcgctctccggcgcgcacaccatcggctacgcccagtgccagttcttccgcggccacatctacaacgacaccaacgtcgacccgctgttcgccgccgagcgccgccgccgctgccccgccgcgtccggctccggcgactccaacctggcgccgctcgacgacatgacggcgctcgccttcgacaacgcctactaccgcgacctggtcggccgccgcggcctgctccactccgaccaggagctcttcaacggcggctcgcaggacgagcgggtgaagaagtacagcaccgacccggacctcttcgccggcgacttcgtggcggcgatgataaagatggggaagatatgcccgctcaccggagcagccggccagatcaggaagaactgcagggtggtcaacagcagctgagctagcaagatgatgatcacctactatttcttgattacttttcacagttttttacggcgtacggttatttcaacttaactcatttctgtaataagttcgtttgttttaatctccgaacttcttgtcacggtatttgtaatttaatttgtttatttgtacctctgagcttgttgcagtatttgtcgtttaatttgttcgtttgtaactctgagcttgttgtgatattaattatcaagcaaaatcggaaccattttacatttcaagaaaaggaaagaaagcaggaggtatttttatcacctaggtgatgtgatttaaatagttaaataaaaatgtgaaacaaattgacaaaatatcacttgaagatatgtccaagtgtaatcaaatctattatctatctatctatcttctattatattatattatattatattatatactaaaagtccatgaaacttcctacaaacgctctcaagtcgccacgtggcgctctaataaaatagagaaaatcctagaaattctaagaaaaagcaaaacatctatcctttgattttcacttaaattagtgagtccaatattatacaccgttagataaaatcgatcttaaaacaaactaaataccatgagccccacctatcctcctcccgcgcatgggcaggtggagtatataagtacctacatggtagtacgtacgcttccttccttttttttttccttttttcttctttttaccatatatatatatatatatatatatatatatatatatatatatatatatatatatatataatggatatattttttaaataatcatgattttataaacaaagaatctaccatcacataacttaaaccggtgtactctttactttgcactattattttcaaataatgcactgttttaaaataaaatttacacaataatatcgtgtacctatcaaattaataatatctatattaactaatttatacgtgcacttaaactgatggccccattatataaatcatcggatctattttttattacattggcctattattctcaagtaatgcactatttcaaaataaggtttacaccattatattgtgtacccattaaattaacaatttaaaatctatattaactaatttacacttaccctataactggtggacctattattataatcatcggatcaattgtttgctaataaataaagcgtctgaaattctctttttgcctgctgcacaatgcacgcctgcacctttgcctttcgcacgtgtgacaaagcgtagtgtctgagacatctaagatgatcacaaccgctgtagcgctaccgctttgccacatatcaaatcatatatggagataattaattttgttaataacatgaaaagaaaattaaatgtgtgatgcagcgagagaataattaagcactatgggttgtgtttttctcaacactaattagctctgtttaagttgaaaccgagagttgattacataataattataattataatgtatttatgttatgtcgtatttggatttcgtactatttgttcgtacaggtgaaaggaatcattatgttataaatgtgagcgcaatattgatgaatatcaatagaactcttactacgacaagggtgataaagggagtttaaggccctctcttttttcccaattccatttttggatttttgtttgcacgctttccaagtttctaaatggtgtcttctttaaacaacattctaatttttttagaagtcaattcattcgtttataccctcaaatagctatcacataaattatataattcatcaatttcatcctaaaccttaagtactacattttttttcatgcaagtcatggtgatcagtaaattggtgatcaacggatcatcaaagttgtaagataaatatgtaagagttactctgaacaattgtaaataggtgtcaaaattaatttctattaattagacatctaaaggtgtcaaaattaattgctagccacaaaattaatttctctctacgtgtatataaacatggacgaagttggaacaaatattaccatatgtcccatacatatatattgcgcagttaatattctaattacatgtgttaagtcatttaaaattccttaaaatgctctcaagctgccacgtggtgctctaataaattagggcaaatattagaaattctaaggaaaaaaaatcaaagtatctattacttgattttcacttaaatcggtaggtccaatattataaaccgttagattaaattgatcttagaacaaactaaatactacgaggtcccacctcggcataggtacgcacctacgtgcgtgggtacgtacgcttcccctccctttttttcatttttctctttcttctttttttcccatgcatatgcttccctccctttattactatatcatgcgccttcatgagacgatttaatcaaaagaattttgagtatcttgcactcgcatttttcatttgcagccatactacacgtacgatatatatatagatggactgtatgataattaaccagcaatggtttcttatttagtcgagaaaaaaaaacatgattcaaaagtcgtaagtacttaatccatctcctactcaaaagttgtgaatggttttttaagataccttaagaaaaatagaacccttaaattattactccctccgtcacctaatataaaggattttgatattttgcttgtattgtttgaccattcgtcttattaaaaaaatttggaattattatttattttatttgtggcttactttattatccaaagtactttaagcacaacttttcgttttttataattgaacacttttttttgaataagacgagtggtcaaacagtgtaagcaaaatatcaaaatcccttatattaggggacggagggagtataaaataacattatccaaactttagtttgctaaagtttgccctgaatctatgagacaaaatttctaaataaacaataatcttacctttcaataatataatataagtgcccgcgcatacacgcgggccatcttcctagtttacttaattagctttgcatgtttgtaactttgtatatggacttctagcatcacattgacgtggcacttatgtagcagtttgagtaaaaaaataaatggaacaaaaataaaaactaaaaaaactaacaaaatatacgggacccatacgtcaaccaaaaaaaatagtggaacccacgtgttagtgggtcccactacctcacctcagcctcttctcctctctttctcttctaggcctccatcctccatccccgccttcatcctctagcgctccggcggtggtagcatcccacgacggcggcgtcgaagcgggtgaccgccggccacctgtggcttgcgggctccaagaacgccagcggcggcaagaggaagagagaggactgcagcgaggacggggggagaggagtggcgtttcagtgggcggtgggagaggaggggcatgcggtgggcggcaggagtggagcggccactctccttccctccagatctccgcctccttgctccggctccaccgccgccggcgacaggacccgccgcgccgccaacgcttctgcgtggaggaggaccgaccgcccccgccccttgtcccagcgcatccatcctcgccgtgcggaggaaatgcggaagaggtcacccggtttgacaactacgtcgcgcgcgacgggcccttgccgactcctcctgcagctcctaggccagctgcgtgaactgcacctcagcttccgccaagccacgagcacatgcccccgtcacggaggccgctgacaatgacgactcggccgcctcccctctcaccccactctcctcctgcacccattagatccgcccgatcaccaggagtgtggccgccttggaggcacaatgggcgacggagagaggggcggcgaccatcggggagaagggcgacgaccagcgggaaggagcgaggcgacagtcacaatgtcactgacctcaaccgccacggggagttctagggacctccgctcccgcctcaccgccgcggggaggctaagcatcgaacccacggcaaccacgcgcatttgggtcccctcccggctatgatggatctgagagccagtcaccgttggatcccctcctgtggcgtcttgtccagtcgccatcggatctcctcccgccgtcgttgagttccccttttcggaggccgacatcaccattccctccctctgcataactgcttcccccacgtctcctgcaggtggtggtcttcattacggtggaagaggagcggcgaccttgtttccctttgagcggcgccagtgaagccacccgccggccttctccctctccacgtgtgctcgccagcagacgagggagctcgaggagggaggaaggatgaccgggcaggagagggaagaaggaggcgtcgtcgccgtcgtccgtggagaaggaggcgttgacaggagaggagggtaatatgtgggtcccatgaattcttttatgttttatctgactgatatgtaggcctcacatgttttttaatttttaatttttatattttacttccagtgccacattgccgccacgtagaacaaggaccaagtcaaattagctacagaagcgtcatgtcagctaagaccatcatctaaactgtcgagggaccttgtttgccctggttttgttagttgggggactgattgtatctggttttttggtggaaggacgaaaatcagactaggcgacaatgagggacctcaagtgaacttattcctttggttctgaacaattgggcttgtagttatgggcctagtcccagcatgagccatgcatgggccttctatctccgaggactgtccaagaatacaactgtaaactagcttcatggctagaccgggtaaaaaaacagaagtttcacggtgtgggacacctccatcacatctctatatatgtatcttccacaaactctaatgccgcttattataaaacatgcaccaaaattgaaatcgtaaaccatacacgaaggagggtcatagaagattcaaaagtgacgatgacctcgaatcacgatatttgataatttagttcaaccgtagtctatatccttaagacactgattacagataatccctccctcatccaacataactagtatggtggcccgcgcagattatgcggctagcatattattatattttctctcatataatagtatatatgttttcttatggtattattcaaatatattaaaatgataacataattttaaattttgcaataactttataaaactactaatgtgtaatattcatattgtattttatatacatattagttattaattatttttaatatcaaatttaagttatttgtaaattacatatattcctatatggactctagactcgtcttttaatatttcttatttttttaattccgaactttctgtaaattgtatttttatatagactctatgctcttcttccaatattatttacttttattctgaatttttattatttctaattgtatttctatgtggactctaaactcatctttcaatatattctttaattattaatttcgaatttcagttacttctaaattgtattcctatattgactttaaactcttcttcccatgtttttcttaatttcgaattttagttatttgtaaattgtatttttatacggactctaaactctacttttaattttattatgtttattccaagttttagttagttttaaattcctatatggtttctatactctacttctaatattccttatttttttaattctgaatttctatttttattattaattgtatttctatatgactctatactctacttctaatattccttatttttaattccaaatttctattatttcctaattgtatttctatatggactctatactctacttctaatattccttatttttaattccgaattttagttatttcctaattgtatttatatatggagtctagtctcctcttctaatattccttattttttaatttcgaatttcaactatttataaattgtatttctatgtggagtctagtctcctcttctaatattccttattctttaattccgaatttcagctatttctaaattgtatttctatatggactctgctttttctttttctccgattaatgtgagaggctatttctaaattgtatttctatatggactctgttttttctttttctccgattaatgtgagaatttataggccatgagagcgaacgtggaggactggaggctcctttttctattcctttaataatataatagatagattacaagatatcaaaaatcctcgatcaacaacgccgctaagaagtcgttcgagagaacctaggagagagatgtaaataactttatcctaacacaaatacactaatacctagtaaaactctaaatcctactaatttataatcaactactttgtacaaatatttgatacatactctaatattatggctaagtttgatttagattattgagcaaattattgtcatggattaactactcaataatagtaaattgataaaataaatattgaaagaaacccactcaacaaatactactccacccaaaaacatattttcttttgtaaatttagacaagtacagtgagtagcttaaaaataatttaatagaacatttttaataaaatacattttttgacgtgtgaattagtaaataatttttttaataatccaatgaattagttaaaatgaacgtggccgtcagggcgtaagtcgtagtcatccatgataaaaactagtttgacctagcgtgcaacccttgttctcctaagctgtgtttggaggtgggtgttgggaacccatatcccatacacggaaaacggagcggtccattaacgggtgattgattaaatgttatcttttttttttgaaaatggatcaatatgatttttttaaacaacttttgtatagaaacttttttaaaaaacaaaccgtttagcaatttgaaaagcgtacacacggaaaacgagagaggagggttgggaacttgctcttgcaaacacacccctaatctcttgggaaatatgaaaggtgtgaaaccagagaatcttttgaaacaagaagctatcccccgtggatcttgttgtgaaaattaaggaatcaagatatcttggacactggcgggaaccaaacgtctaactgagatgatgccatagaaggccgctttatccgtaaatatctccttgtttttattttacctataaataacactcctatactcaatgaatggacacgttgtctttcgttaaaaaaaatctggtgtgcaactgggaattaggaattagcctgtcatttccagccaaatcggtagcatcgtttaatgacaaaaattgacctgaccgtcagaatcagtaactatgtgctaatttattaaatcacgtacagcttttcacagaccaaagccctcctgaacttttctaacgaggaaaagtaatagacctaattaactactagtggtgtaatttaattatactgtgctgtagttaagttttcctttccatcatgtcatgacgtgtgtgatttttactctggtttactggctactgctgtcatattatatcactatcgtattgtcataccttgatgcggtgtatcttccagaaaagaagaaattagatgatcacttcgacgacaagcttcgtcttgatcttttctttttggaggaaaaaagagagcaagttttgtcttgctgatccaatcaacatcggaatcacgaaagttatttctactccaatccatagtacaagataccgcagcaagtccggggaaaaaaaaacaacggtggcagagatgtagggatgaaagcaatgattcattacaaggttaacaccataaataaaaggcagtagcaaaaaaaaaaaaaaaccaccatcacacaccaacaacatctatacaaaactcagaaaaatactagcatcggaccgatcaccgctaaatgcgaccggctgccactagaccaacaaaaaaaagccacaaaccgaaccggccaaaaccaaaatctgacagcaagcactgcactcaactctaggtgagagagaagatggaaccgctctcccccacaaggcctgccaacatcaccaatttgcattaggtagggcgttgccgtaagaagacaaacatttagagagagcacacacaagctgcctaagagaggtttttgaggggggacctcctgacgacgtcttcaagtagaaaaacgacgatgatcaccaactcctcccgctaccgccgccgccgccacccttgccagccccagattcgggcgcacccacgccggatccgtgggctccaccactgcctctgtccaggcccatgccgtccccgccaccgccggtgctgtcgtgtcgtcgccatcattggcactaaggctgctgcacagggagacgacttcccttgatggagggccaaatcctgatagggagcattggatctggccagaggggcacgagatctagcggctccaagctgccatgccgcctatactccacgctctctgccccaccaccagcgcctcctccttcgcctagcctcctaggtcggacaacgttgtgtcgcccctagccgtgaaccgttgccttgctccgaggcgccggtcggtcctctccgctcgctgccgaaatggcaccaccgaccttcacctgagtccacccacgccggatctggagaggaggaagttgtgagccccgttgccgccgtcctggcgagccaccagcttttgccgacacttcgctcgagcagcagcgagggaaggggtgagaggatgttgggttgcggcggtggctagggttgccgtagccttagccgccctctctgggaggagacgcgggggcattggaaaaagtctgttagcccaaccatagttttcaattttctttggggtcgaaatacaagcccccaagatgattcgcaaatttcacagaattagataaaactgagtttgggagatctctgaattttgagcaaataaattcgaggaaaattcaaagaaattgtgaaccctatccatcggcgaaggtcctgcagtatccatgcatgcctggtctgtatatagaccctatctaatagttacttccccgtcataaaatacaacaatttttaaccttaaaattttatgttaaaaatataataatttcttcatctacattttcttttcaaacaaccacaacattattcccgcatttaaattttctactcatctcattttctcaaccaattacaaccttaccccatttaattgtaccaatttcttgacacgtacccgtgtccaaactttttatattttagaacaaatataatataaaattagaaattagtcttagtatagccccaagttgagtatagcttcaccgctaactgcttatcggaagctctttagctcttcaaaaattagaccgtagttaaattgtctgaaccgtaaatctcccctcttcggcttctgccccgactagagacatgcaaaccgatcggcgatcgaagcaattaccaccacatcttccaaacaccaatgcaactacgcaagttggccaagcagcgaggcaactagccaagtagcgcatggacacacgcagcataggatggtcgcatgtaaacactgctctttttctttaaaggtggggacgtggggtgtactctgaatgacggcagagaacaaaggacaagagatcacaagcaagtgtttttccaaagtgaatgaccactgtgctagtcaacatgtactccatatatactatccgtgttttaaaatataataacttaatactaacttacaatataacactatgaatctagacatatcattttcatgtaaagatgtgtttggttggaaagatgtccctagataggtgatagcaatccaacttttgaaggtgtttgattggtgaacaagggtagctataggacggttcgaagaggaaatattctaaaatacgttgaatgagtgcatccggccaaattaaccgaatgaggatattaattttgatcattagtaattaattggcgacaattattttttttaattagtaataacttttcaaaattaatgtcaaggagatataattagtatagtttatggtgaaactaataataattaacatatgttattattacttactagtttattattttcctcctatccgttctataaaaatttggatagccatatcaactcaccaaataaaaattggaccatatatcccaaaaaatatgaattgttatatcctacctaatcttaaccatgaacaaaacacaccataaatttatgatactgggttctatgtctatttattacaatatgataatattattttttttgcgatgtatatgataatagtatatattttgagcagaaagaaagtacttcctctgtttcatattataagactttctagcattgcccacattcatatatatgttaatgaatctagacatatatgtgtgtctatattcattaatatctatatgaatgtaagtaatactagaaagtcttataatctgaaacggaggtgggactagataatatcacgcataggaatgggggccaccggccggattcctgaggaggaagggcacaaggcgcaacgagacggacgcggcacaggagcgacgagcaggacatgcgcccttcgtcgtccttcctctctctgtctctcgttgacgacaggtcggaatatcggagcaggtacgtacgtaaggtggcgtttttgttttgcccgttaattagcgtggttgacgcggcacggacagtctccggctccggccaagcgcaaacgaacagtcagtatgtacgacgatacgatcgacgagctgtacatgtttccaaaccgccagcgatggcgacagggacgacgaaatttctgcagataatatgcagctagctgctgtgcctgtgtacgtcgtcgtccgggcagtacatgtgcgagtgcgagccatagtagctccagatatgcgtgctgatgtgtgtcaaaccagtggcgcctcgggacaggtggtgctcccagtctttccatgcgggcgaaaaggacttttgcccgaccgcatgcaaaaagaaaaaatcgcgaaaaaaataaaattcaaaaaaaaaggaaaccctagctggccggccgctcccgccggccagctgcccagttgcgccgccgcccgcccacgcctccagatctgggcggcctgaggcccgccgccgccgaccacgtcgccgcccacatcgtcatcgaccgctcccgccgccggtcgccctggttccgccgccggccacccccgctgccgcccgccacccccacccccgccgcctccagatccaggcagccccgccgcctccagatccgctgcggcccgccacccctgccacctccagattcaggcgggaggaggtccgccgccaccgaccatgtcgccgaccactcccgccgctagattcgggcgggaggatacgcccatcgcccgcgtcgccgcccgtatcgccgccatcgtggaaggcccgaggtcatcgaggctgcccactcgccggatccgctgcccactcgcagctcccgccgccgtcaaggaaggctcgaggtcgccgactcgccgacgccgcccactcgctgaggctgcctactcgccagatccgccgcccccgctgcgcgccggccgtcgccgtagccgcagccactccctagggcggcggatccggtcctcccggggcggtgccgccggatccgccgcccgccgacgccatcgccgcccggtggcactctcggagagggagagggagaggagaaagaaagagaggagaggagagagagagggggagggtaaaaaatagaggagagagagacatgagttaaaaattttgaagtggtgggagggaaaagagagtggagagagatttggggtcgtatttttgcatacatagattttcgcatgcggctccttaagtggaccgcatgcgaaaatagttattaaaaattaatttaaaaatatgagaacttcgaatcaaattttatgatattaaatcaactcatataaaaaggttgccaaaaacaaagttgtagaactcgttgagatctaccaattttcttttggtcatttcttcatccaaatttgattggactatataaaatttgaactttataatataagatattcaaataattttttcacatagtaaatgatttcaaatagaaaagttgtcaacaacaaagttgtataacttatcaagatctacgacttttgtattggtcatttttttatatgactttgtttgaacagtttgaatttgaatttcaaaatatgacaacttcaaacaacattttaaaatacaaaatgatttcaactgaaaaagtcatcaataacaaagtggtataactcatcaagatctatatcttttattttggtcatttttacatccaacaaagtgatttgtaacattgttcacaaaatgtacatatcttatatagttgaagattatctatcttatataatttggggcttactctacagtgttttccttaaaaacaataaaatataaaaccacgttgtcaataattgagatatgtctagtggttgtagcacatgaaacaataattttgtttcaatttcctagtggagttgtgtgttgcaaataagccattgtgcaaacatagggaagacaatttcttgtgttttattcttataagagaaaatactacaccatgtacagtatatcatgtggtttccagttccttgatttagacatctaggtttgtgcgtgtggttggttcctggtgaaattaagaagatatatatcgatcaccatctcatcagtttgtctccatagcgcccatcgcatttgccatgcaagtcagggcaacaaatctcgatccactgattaattgaacacggtcgtagtagactacttcgtcgaaattatgagaaagcaaagcagcttatacaatacacaagtcgtacttgctgcctgtgccgtcgctaataggcaagtgcactctgctttttgtatagtcagcttttcacatatacaaaggcaagctgtacgtgtatcgacatcttcaattcctgttacaagaaagtccaaagtatatattcgaggttaagcatatattgtgtgttaactaatcttgatacgccggtgagaatcggatcaagtctgcatgggcatgacgccgttttgaccatcttttttgcgcacgaaccaagaaggtcgtgttagcttattttaagatcgatcgataggattaactgcttcggcattttctatgagcttatgttttttcctttaaaaaaagtaacatgcccttacattaggttcatattattaggaaatgtgttggatgtcgataattggataaagaataaatcatataaatttttttacctaaccgtttttatcggggaattttcttttttatgtgagaatgcatgttgtgcgcgagggaggaggacagacaactccgcttggaagtatactacctctaggttgataatacttaatgtttttggataagtctgatgccaaacttttaaatctgattttaatcatggataacttttaaaatatagagataatatgtatagattaatcttaaaatatatatttatgatattttgtgcatatattataatagaaaaatagtgatccaaattattttggcgactgtccccttatccaaaacgataaagtagtatgtctacatcagcgtgatattataattaatagtatgttagggtgtgaatctttcgtttttatttatttaagttttagttgaattggttaatacataagtaacttactatctccgtcccgaaataattgtaattatagattatttagaatatattaagagctaagaagaaaacgtatcttatacacgtaagttttcacttctacaaaaccatgcacatcagttaatagatattactgaaaatttcagaaaaaaaattgaacataatgtaaagtcttgtcgtcaaattcatcgtacacatagagagggaaaagtaacttgcgttataacgtgtgcactcgaagcttgtatccacagcatatgctatattataaaacatttgtaaatttatgacgtcaaacaaagtttgactgtgaggtatagtttggtgataattaaaaatttgagaatcagtacccaagtagtacaaaaggacaactaccctgttctaactgccctccatttcaaccgattagacccaggaccgtaaagcaggaaaaccatgttgttgggtaatttgctggactgataaagaaagctgcaaatggcatcctccccaggtgtagctataatgtaacctctcaatcagcattcctgtctagctatccttttcctccccggaaaccgcaacatactactccagtctcacttttaagtgtagtcaaaagcttttttcaccatttgaccttccattttatttaagaaattataaaaaataaaaaataataataagtcaagtatttattatctaataataataaaaaaattctaatcataaaaatattttaaataagacagatggtcaatcgtcgaacaaaacgggagactacacttaaaatatgagacgggagagtactcaacaaaactaacgcgacaacagtagcttttgactgcgttttcaacaaaccactcaagcaaccagagaagaggatcaaaaaccacactgatactaatcatgatcgatttcttcctcgtgttggctacaatgatgctgcatgctgtacttccaacttgtctccatttctcgttgatgccaaaatggcaggctttgtgcaatcaaaacgaaaccctctcatgatcaaagtacaccacaacaacactctagctactggctactcctatcactacgcaaaagttgttgtaccaaccaataaagcgatcgatctcctactaccagtagtccagcagcaacgaagcacaagacaagaaattactcctccacccaacgaaagcattatttattttactgaccaaaagatcacctcacctctcccggctggctccgatcgaatcccctcctggattttgatacatcgattggattggatatgatgcagctatccacgatggagaaactgtgcgtgttctctcgcgtgcaccgtcatcgtcgtctccatcatggcgtctcgccggcgcctccagcgggaggaggaggcgccggcctgatgtccttgagcacccccactacctgctgcatcgaaggcctcttctccggcgagtgcgccgtgcagaggaaccccacctgcaggcactccaccatctcccgctccgccaccgtcatcgttgtctttgctgctccactggtgccgccctcctcctcttcctctcttagcctcgcgtcgacgatgttgaggctctttcggttccggatcacacctcgggcccagctcaccgtcgaatcatcccatctcacctgtcctgtcacaagctcgaacaccagcacgccaaagctgtacacgtcactctctggggtcagctctccattgttactatccacggggtgtatgtagtccgatatcctaggctctaggtcatcgtcgaggaggatgttggttgggaccagattgccgtgcacaattggacgtcccgatgatcctgcccatccctggtgcaagaacgcgagccctcgtgcgattcctagtatgatgtggtaccgggtaggccaatcatctatggatttcttgtcctgctccgtggtgtcccacatatcagcaccggtttcttccatgtccatactacttgccggtagctcgtggagccaccggtagaggttgcccttctctatgtactcgtataggaggagtttctcctttcctgctcaaatgatgcaaaatttgaatttcaaattcatgaaaccaaggagttcaattgttattctatccatactttatataatatattgcgatgtaaaaatgtgtgaatttcaaaggattttcgttgaaacatactgttcaaatccacataaattaaattgttttacgtgaaagcaaaggaatttaattgttattctattcgtagttatatactataatacaatgtaaaaaccgaatgattttttagcaaaagaatagaagaagtgcagttagatcagctatcagttttcagcatgaagccattttcaaatttgtttttgccactctatcatacactgaaagatatgcttttggaattttgtctagactacacattctagtcaaagaacaagacaaattttagtggaaaacatgagtattatttctcaagtcattatctaaaaacaaattagttatattttttttcaagcaaattggctgacctgcaatgcaatagccaaggagcggaagaatgtttgggtgcctgagccttgcaagttcccggagcccggcagccgccgccgcgacgtcgccgtcgtcgccgccgaccccggccaccgcgccatcgacgacgcgcacgacgacgtgcaggtcccccgggagcacggcgcggtacgcggcgccgctgcggccgccgacgtcggcgagctgcgactcgcgcccgaaccccgacgtcgccgcggcgaggtcggccagcgtcagctccatcagcggccgctcgaccagcaccaccggcgcggtggccgccaccttcaccgcgcccacggcgacctcgtcgtcctcccacgccgccgccgccttcttccctctcttcctccggcggctgaagccacacgccacgcaccctgccagtgccatgaacgccaccgcggcggacacggccaccacgccgcagaccacgacgacgacgatgagaacgacacgcttgtgcttcttcccgccactggacggcgtcatcgtcgccggcgccggagccggagccgacgccggcgggttgtcctcgatcactagtgacgtcgcattgccggctctgaggaaggcggagcggccgaacttggtgacccaggtggagttcacgacgccggagaagttgttatccgatatgtccaaggggctgcagga

SEQ ID NO: 24406 - DNA, 10226 bp, Oryza sativa
gcggcgagcccgtcgacgccgacgacggaggtgaacccgttgcgggacgcgttgagcgacgccatccgcgcgctcgccccgagccgcagcgcgccgccgagccggttgcgcgacacgtcgacggcccggagcagcggcgcgcgccagagcgcgccgccgccgaagccgtcgtcgccctcgagggagttcccggagaggtcgacggtgagcagcccggacaggttccccagcgccgcccacccgacgacgccggcgaggttccgcgacgagtacgcgagcctccgcacgggccggcacgacggccgccgcggcagggggaagttggcgacgttcttgaacgcggcggtgacgatgccggcgtcagggagcggcacggtgcagttggaggtgctgtttcgcgcggccgcaggcgccgtcgccgcggacgccgaggtggcggcgacggcgacggcgaggaggaggatggcgtggagcatgggcggcatgggcgtaggcggaggagggggggggggggagggatgtgtgtgtggtggagcagtgggcggagacgagggagacgacggcttaatcaattttaatcatggggacctgaccgcaacatggattactgtagcacacgcggttagtacactactatacttgggctggctacttgcttgcttagctgtggaggttagcgattaatctggcttaatcatgacgggttactaggctaattactatatgacatgggcctcttcagattccagcccacaaagtttgctggtggaggctccttcgaagagcacggtttttgcgacgattttgggccgaattcagcccatctaggtcagctatttgctctaggtgggccgcgaattatctggaccgtcgactgaattaagatccgtgaggaggcatccagaccatgggcttcatttagcccggattagtcctcctacgatcgaaccgcaaaccattttacatggagaatatttcttccaatacccactaagaaaaaaattcattttattctcgcgaactatttcattagatggcttacccccccccccaccccaaaagtatttgtcggcttattttacaccccccccccaactatttaaaatggtttagtttgctccctaatgatatttctctctttttttctcttttttttctctatatataagcagggtttacttcttcggtttagccgatttgatcggaggtcaccgatacctcgaaatttcagtccgaaattttgaacaaaatttagttaaatttgagcaaatattaccaaattcacaaaaaattaaaaaaaattgaaaatttcggacgaaataatatcatatcggagcggtccaaaatttccaaacttgtatattagtcatattttgcaatgaaatttggtactattgatagatgcattataacttatctttgaatatttttacactttttagcaccatttatataggttcgaagcgatgagactgatttaaacattgaggttttcaagcaaagtcatggaaaaaactgaaaatattttgaaagttttggggagtaaaatgatttttttctagtaagtttgtaccggctcaatggtgtgccattcatactatctctttctataatgccactgaattttcaacaattttaatatgccattgagatggatagttttccataatacccaaaacatccttatagatctataagattgagaattaatttattctattagaagtttcaaaaacttatggttttcttaacctccttacacaacattgaagtttttatgtttcatgatgtcattcatgttttctacaagatatcttttgtggcatatgagaaaggaatcgcttacaacaaattaaagatatataatagcacaaaactattttgtgtagcatattaaagatgatttacattaaaaaggaacaacagcaaaagtattaacatataacaaacaaataatgttttataaaataaatagtaacgcaaaaattgtgaaacttatacaaacttctatgacgtgctaagaggctagacaaaagttttcaaaactttttgaatcatgtagtggggtcaatcaattgtcaactcttatatatactagtaatatgcatgtgccaacgctacgacttaatggcatattatagaaatgaatgataaacttgaagcatattatagaaagaaacaaagtcgatggtaaatcattaaactaatgaaactaaatggcatggagtagatctgttttataagacatttacaggaatcattctcaagaaaattcccacgttttgaaggaggtatgactcctgtggagtggtaggttaaatctataccatgtgttgcagttcacaaaaagacaaattttgtagtaacacaaaattgggagaaatttggtcttgttgtatggtgagctaggagcgagggcaggaagtttcaaattttgaatttaaataagagaattactaacattctactcaaatttgacatactcccccaaccatcctctcgcggtctcactcccaactataaatcatttagtaagggacattgctatctctttttctcaaatcttaatctatactaaacaatctaacaagaaaactattttgagacggagggaaaaatactttttctgcagaaaataaagagatgattcgccattgtatatatagagttgctcataagacacaaccagattctttttctccgtagattgaattcttatagtctcacatgttctttttaagtgaataaggggccatataatttatgttattaagtatttttcagatttttttttttaactatgtgggccacacacataaaacatattaggtccttaacctttccctgagtttagttacacatttttttcacttgctagctctgacagtactagctaggggtcagcaggctcaatccacgagcttggaatttttctacccatgtcgacaaaagactacaagaagacacacaaaatccatccccaagagagaactgagaaggcatccaaactagtactacacacaaaagtaaaagattagcaacaagctgcaaattaagctaccccatcactactacctaatcctgacatcctgtggatgattcccctgatcaaagttgaccttgtcccctccctaggcccatccgtatggttttaaaaatattccagattaatcatcttgttgctcacaggctagccagaatcatgcatcacattggatggccaattaattaattattttctctccttcctttctaatgcgtctatagggagattactaaagaagaaattaaaactttgtagtgtcccgggtagaaatgtttcgctctcgtcacatgacacgacatgccgtcccaaattctcattcagctatggtcatcagagattccggaaaagtaattatttggacgctgggaaagggatggcatggggaaaaaatgaaactttttggtgtgcgttttctataggtctagctagggttcttgtctggtcttataagctactactagctaggtcatggattttctagagcagctcatttctgtcgccaaactatacgttccatatgggtttgtttgtcacaactccacctctcctggagctaaagctttgccaaacagtttcagtttcagctccacctaaaataggagtggaggtaggtggagccgggtttaagctgctctataactctactccaaaccaaactcctggagctaaatttaggagttagagctttaccaaaggtgatggtaaattggttatactgtttcgtatcgccctgtctgcaaataaaacactacctcaataaaaccctctctgtttatttcattgggcttgttttaccatcttgcattagaggtaccgagttaaaaaaaatatcattaagtttttttttttcatatgagtgtccaaatctaacagcatagtagtcacaaatggagagtctggcacgcgaattattattagttaaacttccgtataagtagaaatggaatggtggttttttatatatgttgattagtcccagtggatattgctggtcaacaacttgattgacacggacaaacgtaaatacctgctacacttaaatcgatttgatttggaatgagtcggagctcagtgagatccttatcaaaggaatcattccaagttgtatatcgcgactaaacggtatatgaagtgttttaaagtaattggacaatttcacctaacatctgctgatgaatcgtcctcacggtgattcattttagcgattcgaggaccaaagacatgctcatggtttcattattccgatctgaattgaaggttgttcagagatcgagatccatgattaatttataaattcatgtgcatataaatatatatagtatcaactgttgggatggagttgttgagcttgaactaaaatctagagagaaggctgatctaactccatagacaattaattctacggaaattaaaataaaacctaaacatatatgtatatgtatatgtatatataaggaaatgttaattaattgcattcatgcaatgatatgtaatgtaaatatatatagtctgtgctatgtgtacatattatattttgaaggtatatatagaaacctggtactacagtgctggagcacttgcggggcatgcagggcattgtatgccaacaactccagaatatgccgcatgcatgtatgtacttaattaattaagaaaaataatttaatcgaaataatggttagctatattagcaaacagttgctagcttggcctcttaatttcatcgtttgttcgttgtattatcagtcacaaccaaaatttatttttttttattttaagttttttattatagtttattttccagtacagcagtactgccatttaatccactaagaacataaatgtaaaaaaaatattgtcttttcattgcttattttaattttttagtgacttggccgtagatatatcaaacatcagattgatctctacatgtgtatagtgtaaattcatcataagttgtcgttcaggggaaatgtttttctttccatcttctactggttaatttggcatttagctagtggattttcctacgcaattttgcacgatgcaagattttaagtagaattggatttccatataattcttagtttctatttccatatataagtacaattgcaataatttgtatacattttttttaaaaaaaagacttctatcacatagatacaattgtcgtcatttgtatactaatacatttgaaaaaagtttcatacgtactatagatacggttgcattttgtatacatctatatatatatcaatcaatctagctacatcatatataatctagatccaccacaaccacctggtgcaatttttttctccggttaaaacggtaatttataaacctccgtagtgaacgtggttgttcttttttttttttaccttgctctgaatataatatacagtagatacaataagcaaggctgttctttttttttctttagcatttctcgtttagtttattttttaactaaaaacatcactgctagctatctagacttcttttctcacccctttaatcaatttaagtccatgcgcaacgtaaatatgcctttattaatttgcttgttgcttgcccaagtactgaccaacagtttctccgcgtagagctagaaaagacagcagaaacgactaactaatcatcagaaggtgatgagctgagataacactttacactacacatgcggccatgcatatgtgtgtaatgatgcaacaattaaatcgatcgagctcgtttgttgtgttgtcacacaaatcagcagcaaattaaacttttttttttcaaatttccacctatgtaggagaaagcagatagggcatatgcaaatcgatcccatgaattccgtgacgacgcaaccacattctgccggcccattcgtgtgatcgttcgtccccttttaatttcgatcggaaagcacacactacgcatatgaggaggaagcaagaggcccccttttttgcatgcgtccccctgaaccataaacaaccaaccaatttgaccaaaaggggtctggctgctgtttaggtttaattttgatgtttactagttgattacccatggttggaatgtatgatggataagttggatctacagaataacagatggttggttgttgagtgtgatttatatatatacatgcagaattatatccaggcctacatatatatcttttgcccggtcccaaccgtggttcttttataaatttcgggtactctgagcatgatttacagtggagtgattttaaagtcaggaggtaccgagaggtactatattttatcgtgtaaaatttggtatctctcagtacctgttatactagaagctaggtaatttgtactagaaattggtacctcttggtacactgtaaaatttaatttctctttacagtaagaaacgaggaggacctatagtttgcccgaccgcatcgggatgcactcatgtgtaatccttatccatggtttccctgtgtgctatgcttgtttcgtatttaaatctatggtattaattgttgactttatttgttcaagcttttaaagctctgcccttcaaattaatagctctcaatatttagtttgaagacaaagaaaccatatgtacatattttccttttaaaaaaatataagcacttttacaatattacaattttgtttgatgttattgttatattctaaaagaaaaacagaggtcaaagttacacaccaaaacctaataaagtatatggaggtaataaatgttttttttaatattgcgcacacatctaaatattgtttaaaggagacatttatgcaaactatatattgtggtgtaaccagacatccacctgagctaggacagtgactagaagagaacatctgcagtctgagagtatatacgtacgtaggatatatatatgttcatatccggaatgaaataaatacacatggacctgtcaaacatttgttcctttttagctagctaatagctgtttaaacaagcctgtcaaagggagcatgcagatgcacaggcacaggcaggcagaggtcaaccaccaaacgctttgtttttgtgtcacggagtgcagctcagatccacacgacaagggggtcagtgtcccaagcgagaaaactattagggcaaagaaatgcttttggaatccagccagattggcagattgggtcacatgaactaaccagaggctagctcagctgctcagctcagctcacactcactcgtgcatggatgcatgcaaaacctaataggaaagcaaaaaaaaccaagaaaaggatctcactgctgctatgtaaagtatgcttccaccatttagtccatggtcaccttcaccaaaagctcttgtctttagctactaagttaattaatttgtagcctttttggctgttgtaatctgctttaacctgatgtgtagtttccctctctctagctagcttagcttctctctctgtttgtgtgtgtgtatatatatgtgtgtgtgtcctttgcataggtgtgcataccaaacacaaggacagggtcaggattatattgaggatagagatataatttctagcttggaacagtgtttcaaaaccagtcaatgtaggaggagaatgcttgtccaattccctcttattttattaacacatcattagccagtagctagcttgcttatgcttcttccccatctctccaccagtactactacatatcattgcttccctcatttcatccccttcttccttcccctttcctagctattccacctgcacgcgcgtacgattccgatccagccatggcagtgtagatcgaaagagatcaagtagaagatttggtaagatgcttgagaggtagatagctacctagagaaggctgatcagcatcagcctgagagagatgaaggagaaggaagtgctagttgagattgttgaggatgatgagctgaagagatcgattggtagaaatcagctggacctcaacgaggaagttatggatgtcgagagcgaggagggagaagtcggcgatgatgaagatgacgaagatgaggaggatgacgacgacgacgatgatggtggtagcaccaccgatgttgccggaagcaggagctccagcaacaacagcagcaccaataacgtttcagagagcaaattgaagggcgacaaggatagcggtggcggcaggttggaggggatcaacggcggagagcagagggtgccatcggtgcggcagtacaaccggtcgaagctgcctcggctccggtggacaccggacctccacatggcctttgtccatgccgttgagaggctcggtggccaagagagtaagtagcctaaaaacttcatcttctttttcttttgaaacgagcaacaccagatagtgcgatgtttcatattaacatagcagaaactgctagaacttttatcacatggtatatatgtatgtgtgtagctgcctgcatctcttgcaattatggattatttgcttttcttctgagtcctaaactccaatttcttgttgtgcttttattgttttctcaccgatgatttgcatgtgttgatgtaggagcaactcctaagttggtgcttcagatgatgaatgttagggggctcagcattgctcatgtaaaaagccacttgcaggtaaatgatgctctaaagtgctctagaatttctacaagttaaagagctagattcttaattcgtagtcgatatctacctcgtatattcgcaattccattaattctcatggattaattagcatgcatggattccaagtttccaactaatttttgatccattaattttgtttcagatgtatagaagcaagaagttggatcacgagggtcgccagatcagaggagccatcgcctcaggtttaataactttcaatcatcatgcatgcacacaccaattctctccacatctctgcacatcaatttatttcattactctcatctttttctcaagaggttgtacattttttttcatgattaattttttgcttctcatgtggttttgcagtgttctctccaatggatttccatctgatgagaggcgatcgacgcttccacgacatgctcctccagcgagccgccgcgctctcctcctccaggcaggagcacggcggtttcttctcctcgagaagcggcggcggcggcggcggcctaccgccggaggccagccggctgtacggactcctccaacaccggcagtctccggcgatagcgacgatgcaaacattagacttcaagaacagcagtttcaggtaatcaaagtgccttagctaagttcgtatcttctctgccgagacgtacgaaaccctaatttctgcgagtgtgtgtggtctctgaatctgaaggaaccaagagtggtcgttcagcttcaaccaccagcggaaggagacgatgaatccgtcgtcgtcgtcgtcgaccaccgcggcgatcaggcggtggccttcagccgccggcgcggtcgccgtcgtcgccggcgagcgacaaagactagcggagagattcggctactacaccgggaacggtggcgcgtcgtcgacgtctctgccgctcatcacgagggccgccatggcggcgccgccgccgatgtttgcggcggccgtggcgccgccgggacgtgatcaccatcgtcttccgtttggatggcacgccggcggcggcggcggcggcggcggtaataagaacaggtcgtcgtcggatcccgtggtgatcgatgaagccctagattcccgccgcctcgaggttcgtgcatgccccccattcgtatttatccatgcatatcatcttatcattctccacgtcgacgaacgctgtactccgtttattccaaaatatagcagtctaaaaataaattagacatttcataaatttcatatactcaatactcaatgttcaatttattattattttggaacagagaatgacaagcatcgagtcatttctgaatctctatctgacacgcgcgcccatttgacaacgtaaactaactaactttttttttatcacgacattgcatgtgtggttcagcatcagcagaagcatgtagaacaaccaaggatgactccgacgacgacgaccacaccggccggcaagcggccaccggagtggtcaccaccggacctgcagctcaccttgtctccgacgaccgcccccgcggccgcagacggcggcggggccaagaggagcaagacgtcaacgacg

SEQ ID NO: 24407 - DNA, 19772 bp, Oryza sativa
cacacccacaccccaagtgccttccaaaaactgcacactgcaccatgcaaaatgacagcaataagattgttaattaattttaacctcttgtccatctctctacccagtagttttatctcagtacatagatatatatgtcatggtcatgcttgcttaatgcttggttattgtcttctagggagttagtctgcatgcatgcctctctctagatatgtatgcatgcatgatcaaatcacttagcttgttcttttgtgacagcatctttgggaaactaaaccatcacaagagatcataagtatcagtgtgcagaagttccagttaatctaatgtgccattaatttaatatgtattaaattgtttactttttcgatctgtttatctataagttgtgcgatttttcttagttgctagtcacctagactggcgcaatgtgtgtagcctaagcttacacaattagtagctcaaactttagtataaattcactacaccatttcttttacttttattttcctggataaattacatgcacttttgtgcctaatttagtactacttgtttttatcgttttgcagtcgtaagtatgcccaccaggcaccagtgtataattttcaggtttgacactttagaaattattccctccgtgttgaaacattttttagcgtttgtagacatacaatgttatgacatatatattcttttttataagtgtctgtagacatttctcacgataaaaagataagtggtagatgaatagctaatgatcaatcactcaattcaggaaaaatgatgtataaaggccatcaaaccttcaaaaattattccagttaacacttctgagaaagcctctacaaaatatttaaaccattgtcacttctgagaaaccattgtgcctccttcctctctagctgatacttttctgttttgagcagcttttgcttttccttcgaatttgggtagacatgtgggtgtgttagcgcttcttgctagagcaatggctttgtactatttaatgggctgattttaggtccaatattaatatattgaacatttatttcatattttaacatatatttcatattaatcaacaccatatcaaaaattcgtatgcaaaaattttacatgtcgaaatgtttgtatgtaaagtttatttatataaagtttttatacataaagtttatacgtgtaaagtttctgtaaaaaaaaattatgtgtataaagtttttaagtagattttttttaattatgtactagaaagtttctaagtggaattttttattcatctaggaatattaccgagtagattttataatttggtaaacagtgaacttttttatctattccgagaagaaattctgatgtaattacacaagatgctaatctataagtgctattcagatataactatgcggtaatggagcatcacatgcaagcgtaccaaaaataaaaagatccatagggggagcgcccgttggttggcctgctcaaagatgtgggtgtgctggacggttcaggacatggatgtcgatgatcttgcgggctgcgagaatgtgatcgatcgtgtactaggaggcctacaaatgtgttaaacatgagaaataagtctattttgcctctgttgctcctgatttaatcgcctcccttgatgaggacatcctagctacacacgtacatcaacatgacgtaaacaagggtgataatttacgtcgtacatcacatgatgaaaataaagatagcgtaaaccaagttgaaagattatttctcagcaagaatgatcatgcattccattgtccaattacgcgcattcgtactaggaaaatacaacaagagatgaactcactctttgctcaacttaacccaaatattagtgagaattttatactatctaaatgctctactttgtattgctaaggtttacaaccgaagacatgatcactacaccaagaaagatgagttacatcgaggacgacaagggttacgccgagtaggaatcaactcatatactaccagcagctatttacgccaacgagaagataatttacgctgcaacaagtcaacttccaaggcttgtgtagcctagccaatcaaagagatggggtgcatggcatacatggttggaaagaggaccaagtctagtttccaatgcaataaaccccaccttgatagcattttccaatgaggagttggactattttactgaaggctacgtgagagctgaagggttgtgcacgaacccgagaaaactctgagcattctcatttatgttagccttgaccaccagaacatgacttcttatgttcacgctaagctaggagggttgttcctagtgcaaatacccctccattatatccacaagagaacttttattcaattgaaaatctcatgtatgagagattgctaaagacttcataagtgccttacctcctttgtaattgtgagtttcttagaacttgtgagaaggctcctttggtgccccctaattcgtgcttttggctttcggatctcttgtgtagattaatcctagattatggttttgtgattgctcggtttgacgggtcatagtccaggaggctttagatcattctcaccatcaccacttggttgcatccaactttggcacgtgtaaaactagttatcattttgctgctcgcaacaagttatcctcgaggtcacggtttatgccggtgccacttgcttcaatcctactgtcgtgaagatcaagccacccctcacgagtgagttaatttgcatccactacaggagttctgggcttctgtgacgattacattatgatgataacagcctgtttcctgtcactgcctgcctgcagtgacgaaatggctgtcatcacaaaaggtgagtcactaaccagcttctgtgaccaccagaggacatcgtcattgatacaatgacgaaagttctcctgccattgatgaatgacgagacaaattcgtcataacaaattgaacccacgcgtatgatgacatgtgatgttgcagatgacaaggcaggtgatgtggcaaatgacgtgccaattcacattcggcccatatagcatgggcttttttattttcaattacaatcagcccaattggcccatatattttttgacccaactacaaatttgcttttacatttttttcattatagcccaatagtacaattctagcccatactatgggctagcccaattaaaaagcaatcacaaaatataaaccataaccatttgcataattatattataatcacattccagccataattaattttccagcccatacaaaagcaagttccagaatatagtttccaacatgttccatacaaaagcacagaacatgaatacaaaatgatccatccaccattgaactacacaagtcccagccgactaccaaagttactacaggtagtgccaagttccggcaccaaaaaattccacctagcagccactactaagtctcagcctgcatcttgccaatagccagcaaaaaaattccaccaagcccccactacacttttggactgcatcctgcagcagccaacaactagtgccaaaaaatcctatgttccagcaaccaacgaaaaaaaaaactccggccaccaaaagcgccaacttgcaagcaaccagcagctagcaccaagttctagcagcaacatacaccatacaatagcagccacatacaccaccaagttcaactacactaacaccagccatcaaattccaagctcatccacctcattcctgccatcaaaaggtgcatgttttcagttgctggtgaataaaaagtccattttgtttggacttggaggcaaacaaatgaataaacagtgtttaaagagtaataatccagcaagtaaattgagtaataagtatcttgatatgcctcttttccggcaagtccaaacaaatggatcttttctactcacaactaaatccaaacaaatggctcttttgcagctaataatccagaaaaaatagagtatctagatcaattaatcaaatgactcttttccagtcacactaaacaatatctaatttcacagtaacaacaactataaacaatccagcaagtaaattgaaataggcagagtaataggcaattttgatacacaccatgaacaaaaaattcagccaccaatgaaacagtacctgaggatacaagtgcacaagagacaagttaaagctttgtacctgagcatacaactagcttagggaggactgatctgaccctgtccaaatgctatcatttgtcgaaggaggctctgagtatctgctgccatcttcctcaggctctcaatctcctcagcttgtttttccactttcgcatcagattcttgtgcctgcgccttcaatctttcaagctcctcctgaaagtactgcagactctagcttctttgcatctagttcagcttgtatctctttcatcacattggttgtcttggcagcgggctgctgaattccgacgttgcgcaaaaatgtgtttgacttcggcaacactttggaaacagcttcaatagaagtcttagcttgctgcccatcttctactgatggtgaagtgagggcttcccaggtatgcatatcctcctagcaatcaaagtagtttcagttttgcattattatataaataaaggttcattgcataaggtatttaataaaagaaggaaagaagaggtaatagcttagtacttactatagctttcttcacaggttcactaaaacctttagttttgctacaatgcaactccttaaagagatcaattgcagtgggctcactgtctttgtatttttcttgcttctgcaatgttgagagatggcatgagtaatggttatgttaaagtacatagataacacaaaaacatgtcctccagaacaagcattccagttgacattgagtctttttgttaaacattgacagtggttgccatgtataaacttaattgatgtcaccccaaataagtataagcatgacaagagcaatcaaaccaaattgatacagatttatggataaaacatgagcatatttttacgtggtcaaagtgtgagataatatgctactctccctactaaagctttaaatcatatagcattatgcagagccactatcaatatgcagatatatatctccactggatctgaacacctccatcaggaaacacaaaaactacatccaactagatgacatcatcattttttttcttaccacgacataggcatgtgcaatgtaagaccgagatccggtacgctgttgaaactgaactttttcacgattcagttggttttggcacatttgtcctgcacatgacacaattacatagcattagtaatagaaccactatgcatctgtcatttccatgcaacatcattttcatttgttttcgcaagtcactattacattaaaaatgcaaatagagctgatccaaacagagctataaactggactatggaataattattttgccacctgactatcaaatttatgttgatgtatcttaggaagctatgtggtttaaaaaactcaggaagattacatgaattatcttatagtcaatctgaaaactactataataaatctagaattatcagatgtagctggcatgttccaattcctactgacagattcaaaagatctcaaatgtacctcatatccaatatgtgtatatccagccaaacatgactttgtgctcgaatccaagtaataagctcacacaaaatgaaatctgctaaacagtaccttgtgctctgggcttgaccacatatctaccaattttgtccattgctcatcggtcatacacttcaagggcgatgtagtcctcacttgattagcaggtaccccatcaaagtacttctttttgagcctatacctcatatggcgtgttccacaccttaggatgtcttccattgcagctattacaggatcgctgtggatatcaatggagaattttccctactcatcaaatagcataacattaagcttcaacaaaagtagaaagtagaaaggaactacaataattatatgtaatgttcgatatggctaatgtattatttcttaaaggtgcacctagttgcaccttgggcatctagttttatttaaatgtgcatctatttttacttatataatgctggcagcacatacagtagcattgattcaattagtggaacagagccttaccttcagtttgccctttaagttatcaagttgactactatcattcttgtagtctgtccaacttggatatattggtatatgctgcctgattatgatcccactctctgaggccagctttgcagtttgcataggagcctctggcctttttttcccttccttgacaatgattggtatcatggtccctaaacctttgcttatggaatcaatctctttgcccatgctcttcccccttgtctccacttgtatactgctagtgagggtgcctaacataaaacatttacaagtgtcaataaaaagatcctgcacttgatatgaatgaagcatagcacatataaggacaaaagaacaagaatccaagttacttgccttgttgagtagtgctcaatcccattggctctagttctgtacttaaagtgaggttgcctaacaaaatacattattaaacatatgttaataagaagatcccttcacttaatatgagtgcagcataccacacatattgacaataaaataacagtagggtagccacttgccttgtccagtattgttggtgtcaccctgattctggtttgcagacaaatcaggttcgagtccaacctctgtggcttcaatcaggctagtggtggacacttgtttcatagccctttgcctagtgcatctcattgtttcttctagattttcaagtgctagcactctcttagatgctcttcctgttccagttgtgacacaatcaccagtgatggccacatcttcccctagtaacaaagcctcacaaagcaaacaaagacatgtacaaataagttgcagaaacaaagtcatgaaaaacttccttaaatatccactgcgaataaatatgtcacagaatatcaatataaatgtaaaattcagaatgcaaactcaacatatctaagacctaatcttacgtctttgacaatagtttccaaaaaaattgcctaactatgccggagtccatataaggcaggggctaactaacaatatatttgtaccaactgtacacgtaagggatagagtactctcccgacagattaatcatatttttcatactctatgaccaaccattaagtttggattcagtgctatgaaccagctattggcacttaagcaatactgcaattgttcaacatgtttaaccaagtagatcaaagaattcatatgcaaaatataagtggcatctaaactacatcatacatgtattgaatctcactaaacacgcatagctcagtcaattagagatattgattagtagaagagtttagtactagagttggtacctttgactttttgccaacagctttcttctttgcaactgaactctggaatatttgtgctagtttacggatacccagctgattagcaaatcgattgttcctcatgatattccaagccctcgacgtgcttaagtccatgtcttcctcttctgcacatacattgcaattatatttagtgggtatgaaattagttagaaacctatagtccccctacaccaccagattgacaatttggaaaattttaaatcgagaaaccgaaaatcaccccacgcacagactcatctcccagcgcccacctcccaatccagggccgcccaatccaagcctcgaaaccctaaggaggatgagctgagaagtacctagcatctccatggcggccgcttcatctggaaggaccgaaggatggcgggaatgtgtgctgttgccaccaagcaccattgtcttgctcctaggagggaggcaaggggttgccgcaggatctggaaggacagaaggagggtggggaggcttgttcttgccgccgagcatcttcctcccaggcgccatcgtcttgctcctgggagggaagcaaaggggtggccggtttggaagccgagcaagatctgcaagaaggttgttcttgcccggcggctgtgcagatggagggagtgggaatgattctagggttagcttcagcttcacctatatatgtgtcacactcgagtgagtaaaagtcctaaattgacctcatttgggtatgccagttcaatagctggtatgggcataaatgacttttagcatcaaaaaaagtggcggggcaggcattttgatttcgcggtaacggaggcgcacacgggatgtgaaaatttggcctctttgattgcagcacataattttgttggataagattatagctaatcttataaaagtttataagatcttgtgttaacaaatctccaatataaaatcaactataattcttgagcttttttttacatatgttacatcctcaaaataaaaaaagttagggtttgagttttctttttttacattcgagtgccatttcttaaaacaggtgtaactttctcactgcagcattcattggcgtcggcggtagcagcgctaagaaattgtatttgcctactactccgaccttctatgttcatcggcgtcggtggcggcggcgctacgatcctgcaccaatcatgtggggatgttgtgcctcgagctagcacaagaaagacggctctggccctggtagccagacggggcacgatgcacgacggtcgatggggaaggtgatgtgtctggcggtggcagccctgcgcttcgaaggggatttggttggtggtgggcatcagacgtatcagcgacgtatcgggtttgttttgattatatggaaatcacgaaattaatacgtatgtatcgggtttgttttattcctccttctcgattcctctttctgtttcctcacgcacgtgcccaagcggacggagagccggtgggtcgaggcgacagtcggcgcggcgactgcggaaggtgacgggggcagaggaggtggggccagcggttggcgcggccacgacgggcggtgcggcaatggagaagggcagcgaggcagtggggcacgcgagaaagccccatccatagtgatcggccacctccgcgcatcccccacccgtccttgcatacgccgtctcctcgcatcccccactcgtcctctcatcttccgcctcctttcgcatccacatctggggtggcatggctccctcaaagaaatcgattcaagcgcgccgacagttgcgcgacgctactggcaagttcagcggtcgcgtctctctgggaggggtgcgtggtgcctcgacatcggcgaaggaaggggcgcgccaggagctcaaaaaatttaagtaattattaattcttttcctatcatttgatttattgttaaatatatttttatgtaggcatataattttacatatttcataaaagtttttgaataagacgaacggtcaaacatgtgctaaaaagtcaacggtgtcaaacatttcgaaacggagggagtatatgctaatttggaccttaatggtcagttatggtacctggtgttctggatgctgatgcattatatatctataatatatgtatgacttgtcagcaaatgtgtgatctcatgtacatttgttgaaaatcatattgctgctctcttttaatctgaatttcctctccacttaaaaattgctgtcagcagatatattcaaaggagtcccctcatacatatacttcagaaaagaacaaatgcacaaaaacacaaacatcaaatattcaaacaacatcatacacaacaatcaaatcctcagatcacaatttaaactgacagccatgttctaacagcaggttatggtgggacttagccatacacagatattttactcaaaatcactatattcaccatcatcatggattggcccttcattttcactgtcatattgtctcacagtttcgtcagcatcatcttcaaagccattttcttcaacttccaattccctttccctctggatctgatcaactagggaagcctgaacacaaataccatcttcataattgctaggctgctcgttgattgaagctctctcaagatctgcaacctgaaaactagtattttcttgctcatcatcttggtatgacaattcatgctctgcctgggccggcaggtcatcattttcttcttcgggcacattccacaagtgcctatgggaaaatttttgaacaactttccaaggctcaccatgcttgttatcttctaagtagaaaacctttgttgcttgtgtggcaaagatgaaaggatcatccttgtaccagcaactgccatggctgacacttttgaaatggccatcatctttaatcctagacttcttgctacaagtgtcaaaccaattacactgaaataaaactactgtcctttgactgttcgaatcagagttgtactgcaactgaattatttctttcaactgaccatacaagtctatatctcctccattatgtgagccctcaaccatgacaccactgttttgtgtttttctacttctctcacggtccaaggtgtgatagcgaacaccattaacaagacatcctgaaaataaatgaactctaagatgtggttcacttgccaatgcatataggtcttcattgacttcttctccatgcacaaattttctggttgcaagctgtaccaatatattcagagaaaaaaattcagagaataaggtcagaaccaaaactgattgcaaacagtcctgtatcctgcaaaatgaccaataaattcaactaggagctaaatgacttacgtgtttattaaaccatcctgcaaattccttagcaagagccctatcaacatcaacattgccagcactctccaactctgtcctgcatatcctgcaagtattgcgcactgtcatgtgaggtgtaaaaaattacagcatagggaaaaaattgattgctccaataaaagacatactctataaatggctcgacctccggagtattgttgaggatataccaaagcatcttgtcataatccttctcattgtacgtcatcctcgatgcaccaagaagagtgactccatgctggaaaatagataagccaccttctctcaaaactacacgctctctattcctgccctcacaattgtgtcgtgtgtcaacatcatcaaaatacctagagcaagcattcaagcactcgtttgcgacatatgcctctgcaatggacccctcgggtcttgccatgttcctcacaaaacgcttcaaagtaagcaacctacgctcaactgggtacatccatccatactgaaccggacccctaaggattgcgtcatcgattaaatgaatggaaaagtgtaccatgacatcaaaaaaaaggtggaaaaattttctcaagcttgcacaatattattgggatttcacttctcattttgttcaagacatctaccttcaatgtcttagcacatatttgctgaaaaaagttacctaattcagcaattgcttcataaatttccttatccaggattcctcggaggcttacaggcaatatcctctgcagaaggatatgataatcatgcgttttcaatgcctgtactttgcattcatcagcagaaatacaccttgataggctggaggcatatccatctgggaatttcacattctttataaaagcacaaaaagcaagcttctgggttttagtcatcgtatatgaagcgtgtgggagagtgtacgaattcccatcaggcttcaagtgtaaatttttcctcacacccatatcttccaaatcaagccttgcattaattgagtcctttgacttccctgtaatgtcgagaaatgtcccgagaagggcctcacatatatttttctcgatatgcattacatcaagattgtgacgtaacttcaaatttgaccaatatggcaaatcccacaaactcgcccttcgcttccagcattgaccttcttcttgtctctttctctttttgttatcaggatggttcccaggtttaacatgtgaaaccctcgccaattgctcattcagctcatccatagtaaattcctcaggctgctcacgttcttcggtctgtccatcgaaaaaaaattttgtcctccaaacatggtcccgtgggagaaaacgtcgatggccaatataacaaatcttgttccttaatcttctagagcaaggatttttgtcacaacgaacacaggcatagtaacctgtagtaactctgcctgaaagtgtgctcagtgctggatagtcatgaatgcaccatataactgtagcatgaagatcaaatgatttcttagtcagagcatcataggtagggacacctttccaaagatctaacaactcatcaatcaggggttgcaagaagagatccatatcctttcctgggcttgtcggaccaggaatgagtaggcccatcatgaagttggattgctccatacattcccatggaggaaaattataaggaataaggaatactggccacatgctgaacgaggcgctcatcttcccaaatggattaaacccatcagtagcgaggtcaagttggacattccttgcatcttttgcaaaccagtcatatttcctatcaaaatccttccatgcctcgccatcagctggatggctaagttcattgtgcactggttttctcttcaacttgtgccattgtgcctgctctgaaagctttttggatgcaaacatcctttgcaaccttggaaccacaggaaaatgcctcaaaaccttgtttggaatttgctttcttgtatcttcatccttccatcttgaagcaccacatactgggcaattatccattttagccaactcctttctaaccaaaacacagttattcggacaaacatgtattgaatcatatccaagtcccaatgcacgaataactttcttcgcttcagcataagatgcaggaatagaacattttgggaattgtacacttaacaacttcaaaaaagcatcgaacgcaacattgcttattctataaaattacttgatgtgtagcaacttcaccacaaaagaaaatctggtatagggaccattagggtgtagttgctgtttcatctcttctaatatggttgcaaacttggactttgttgctggttcatggtcttcggctgtgtacaactcatgtaccatctcatggattcgatcatcatctgggtcatctttaggctcattcatctcagtttcaacattgcagccaatatcaccagcttcaacactgcagccaattatatcatccaatgcttctccatgatgtatccaattagtgtacgtgctagtcatcccataaatatataagtgagtctcaacttctcctttatgttgatgtaaccgattcaaacacttacgacatggacataatatctcctgactatcatccaaattagcagaaacaaagttcatgaactcagtgacccttctagatgttccttgctaaatagcctagtattcacccaacttctgtccatctgcgacacactgaaataaggcaataatcaaggaatcaagaactaaccaatcatcataacaaactgctattccttctagctttctatcactgaccatgactcactacagaacatagcattgaattttgattacctctgaagtcgaagaaatcaaatcgaagtcagccttcggagagaactggagcagtcaggctcgccggcaggccggctctgtgctcctacagctcgggaggttgtcgcggttgctggccatcgcgccgagcacgcgacgcgctggatctggcctagtgggcagcggccgaaagcgtggccacggggtagcgccgaccgacgagtagtgagcggagggctagcagctggcggagaccacgggctagaagctagcggagggcggcgctccggcgcctcgaccagggagctggcctcggcgcgctctgctttgctgctgccggctatggtgtggtgtgcggccacgggcaagggcgacgccaatttgcaatctcttttttttctcttcatccacacacaatctacaaatataaaataacaatcctaggtcacaaaaaacaattgtctcgactggttatcgaagtggatgtaaaactcctctagaattaagtcatgggttcgaacccaaagcttgcttcttttttatgttttcccccctttttatcctatataattctggtgcagcacttgttcatgggttcaaaacagtcaaaggtaaggcccatgtaatgcaggttcaaaccaacttatagccattttagttttttttttaagttttttcattcaatcataaaattaaacgccatatttctgattttttaagatgacttcaatctaaaatcctaaaatgagagactagaattgatatagagaagaagagtccacctaggacaaacgatttgtggtctagtagcaatgtagtataacaagattttttttgtttttaaaaaaatataatagttctatattttatgacgatatactattgtcatcgtgctatcgtcacagagcccatacagtatattgtgacgatgattatgacatagacacggtttggtcataaatagttgtcatcctgtgaacaatcgtcataaacagcctctgtttataacatatatgtgttctgtcatcaggtaatcgtcacagaagcccagatttgttgtagtgatcatccctcaaccataaacagggtataatgcattcccatcttcgaaagttgctgcaattagacttctttggtggctgagaaagttgttttttgttggcatgaccagttaaatatggctgactttgctgagtcagcaggtgggacccatatatcagtgacttcctcctcatctcatattctttctcacctcttccctctctctttctctttcctctcttccttctttcacctctctcactgtccatccgtcctgtagccactggccaagaccacgtcgcgtcactaccgccgtcccctctcctctcaccacccgccccccccatatccgcctcttctttacctgagccgctatttgctttgtgctttcccctcagccccactccaacccaccccacagctccatccacttatctcctcatcactatggatccgatattttgctatggcgccgttggcatctcgccccctcttgctagttgtggtggttgttggatgtggctgtcagaggtgtctcggtaatggtaacagaggatgagagaggatgttcatcgtgcaggtggatatggatgcattcccaacccacgcactcttgtacgaggcgatagtgacggtgacgtcgggtgtgggggggttgggggtggaggaggggagtggcgtgagggcggcccactgatccacatgtatctactccaccgtttctcacggctttttcgcacgaatgttgctggttgcatgccaccaccatcagctggcggaggctcccgtggtggcgacagtggtgctagagtgagttcggcatctcgccaccacccgctcattgtggctccttaggctgttgtcctccccgtcgtcagcactcctcgtagactccaactttggtgccaatcttgtcatcattatcatcgacactagcatctccctcacctaccgtagctcccacgaccacaggcttgatttagtcacgcttactcgtccccaaaccacattggagagcctttgctcgctaacaaaacacactggagagccgtcgcctcctccgacccgaaggaagctgccttcacccaagccatggacctccatcgcaagcgcctgcgtgtgcctcctttctattgccagtttgccggccccgcaatgaccattcccccctgcccaccatcaccgtggcactcgtttagctacggagggctccgccttgttgcatttgtgtgaggaagaagaggagcgaagaacagaagaggagagaagaattccttcctccaatccctaacttagcaagttaaccacggtcaacttaccacgtcaacaaaaactgcttcctgaaccaaagatggacgtcacactcggttttatgtttgagggaggcaattcaatcaaagatcaagagatgaggaaggcagaatagacttatagcaacagatgaaagcacacacattcaggcccatttaggcattgtcttcctcctcacaacgaactcacacgcggcggcggcccacggtctcaaatccctccccccgacgtgcgggccccacctgtcaccctctcccatccgtgcccaccgattcgcccgttccaatccgtttgccctggtcgctctctcgcatctcgcgcgcctcgtgagcgaaacgaaatccctaattaaaaccgcttaatccaatttaatcccctcgtctcccctctcctcctcctccctcctcactctctcccctcctctcccctcctcctccccccacctgcactaattaatcacgccacgagacgagatcccccttctccttcctcctcccaccgcccgcctcctcctcctcctcctcctcctccgccgccgccgccgcgcgcaggttgctatcggaggggagacgcgggaggcccccccctctcgtctccgcgccacccaggtcagccgccgcctcgccctctcgttctcttcatctctctcttcgcgtcctgtcgaatgctggtctctgcttgcgctcgcagcgtgggggccccgatccgggggggcaccgccgcggttggggcgtggggaaggaggaggaatggtggcgatggcgcgtccgcggggggcgttggtcaacgtgggggggcgagggttcgacgtcgcgtcgcgtcgacggagggtttgcttggattagggcagggcgagggcgcggatggggtggccatgctttgcgagggcgtcaacgctagttggtcaacccctcgatcgggttaggggttttaggttgcggcgggcggcagtcgagtggctgacttctaggttaatttttttttcctccgagaacacccagctttgctggatttaatattataaggaggagactggctctagtttattgatggatttcattggtcatggcccgtctgttacatcattgcttagcgtatgtcaccagcctaattggtctatttgagacgaaactagttagttttgagttttgacctgttcataaaggctatggtggcattttaacatttgctatatggcctcttccaccgaatgttggggtgataggtactatgattaatatgattaatggctggaacttggatttagagttttggcgccaaggggcttgataccaattttcaaacattggattagtgtacatgttcgtcaaacattgaagtgtgatcagatcttcaccttttatgtctctttcttatccttttgtttgaaatggaagttagtgtggagtttgacagtgactggagtctggtgtttgatagtgattgccttgaaaatcttagattgaagggagactggaaactttgaaattcaggctagtggatcccgctgtggttattgttgacatggaactgctgtagatatgtcatatcatgttcttgtttaagtgataatttgaatcgttgaaatggtgttaatagtgtgcttagtatacttatcggcttgtttccacagctcaccctatcatcatatcatgctgcatatactatattgctttttggtgaaagactgttctcaatgatgtttgtcactctgtgtaagtatgtttgaagtttgagctcagaacaacttttttattgttccactcctttgtaacaaactatttaaacttatacagtgtaagtatcgtgccgttgttactttttagtaccaaagtgtaggaatccaagtttttattacaaaaataagaaacaaatctgttgttcatattgtacaagtcaaatacaagaaccagtaatccatacagtggtggacccaagaaaattatgttgtgtgtgcatgcaagtctcacgcagaacacaacttaaataaagtgcatcactgtcatcaaactatgcatggcaagttatcattatgcaattagtacgcaaaaatgcaaataaggatttcaaatattgttcttaaacaaaagattcagcatttccatatattttatgaagaaaaacaggaagttgcaaccactgaatgcgagctgatcctaggaaaatttcatttgttttccctacccggcacccccttggtctgcccctgtccatagcaagaagccaaaaccaagaagatgttttacattaacttgttttggcacaaatttcaataagggtgtttctaccatgcgaaaaagcatggatagcaattgcttatgtgtgaacaaggatatatgatgtatctgtacaatatagctgttgatgtgatatttctaggaaaggtaatggaaatggttataacctataagcacctaagcgtgcgtgcgctattcaaccatgataatgtggagattatatctttcagctgggctagtggttggattcttctctggtcaagaaatatatgtatacagtattacagtctgtgttgttagtgtagctgcatggttgatgagtcgattttggttgtcataactgtgcacttagccacttactatgcccagcgaaatactcaacataataattgaatcacttttttgtgaatgagtgtagggctatattcttttactggactcatgatccttttttttattaatggcacttcaatgcagctggcgtttagaacgtaacatgtcattggcttttgactaaattctacttgctgttgaatatatactatctactgcagtttggcatcaatatgcagaagtcttctctattccattattgtgttctagttctagaataggtgctattgtataaattatatttacattagatcttttgagcttctgcattcctaaattataagtgatctcatgcttgattcaattggttgttttgctccattatgcaggttgaccttgtagaatgaatccataaaatgattctttatttcaacatatattggagatggatgatctgccggatgatcaaggacaatccgacgcacacccttcagatccaaattggtggtcctcacatgcggagcacaagctcggatcaatttctctgactaaacaggaaaggaattcgggttcgccaggatcttctcattgtggggaaggtgaccattcattatgggctgcccagacattatggtgtactgggtgtttatcaagtccaatacccaatggtttttattcaattattcctgtaagtgtgaatttcatacgaggcattgaattgttaaataaaaatataagtgactcatctgtacattttaattttaatcctcgttttaaaatttgtaggataagaaactgaaggagcgttttgacaccatcccgtctccagatgatctttattcccttggaatagagggattcaaagctgagataattcttgtggatttagagaaggataaaaaactatctgctataaagcagctatgtgcagcattggtaaaaggattgaaatcgaaccctgctgcaatgataaaaaagattgcagggttggtaagttcttcctaagattctctatgcaattgaagacaattgtgacatcttcactggtaaccttcagaataccacaagctgcaatcacttgacaattgctttgcaaatggtttacaaaatcttcttgcttgaaactattccattttattgtgctgcaaccttttgagtactacttgattcttttaagtatgtagtggattatatgttttcttgaaaatagaaattacaataactctattgatagcattgattatattcttttagttacttttattatacatttaaaaatttc

SEQ ID NO: 24408 - DNA, 1111 bp, Oryza sativa
catataattacatcagtgtggcattttaatgtgtgtagggcattccgaatgaagaataccatgaatatgatgactcatccaaacatatgtctgttgtggttatgctgaaatctgtggagtttctagttgatcttatgcgttttcctggacaactagttccattctcatccaaggctataattacatcacatatatctgcagctggagagagtgactcagctgattatgattcttgtgattctcctcttgaacctaatagtcctctgtgttcccaacggtatgcttgtgtattccgttttaatgacatgtgtgtcttgtcatggttccttttggcgattttgccccttgacacatatctagtattattgtattggtataaaattcatacagttccagatgctatgtggtcctgaactatgtgtatcaaatttgaaccagagcctggggtcatccctaattgcagtgtctgcttaaacgcgatatccaaacatgtgaaaaatactatctccattcatgaagctatagcatgttgagtagagataatactggtcttttccatttctttaggtttatgatctacctccattttgttcttttttggtgtacagtagcatgtggagcatttactgcttgcaaatattgtaggtgttggacagcaactactgtatgttatgtggtgtttttcgtatatgaggagtgagatgagaagaagcaattaccaccaaattataatcgtattgtcgctaggattagatttcaaggattaattttccttttaaatttacacaaaagatttgcttgttaaagattttgttaggagtttgtctggcctgcttctttttatataggagtgaaggcacgattgaatagagcaagcagaagttagaatctaatctctccccctctctgtttcctatgttccaccacggcacctgggaagcgagggctctggcctcgctcttctcgctcttctgtcggtcgagcacagctaccactgaggcattcgggccctccccagatcctaacatcgtagctatgagagttccaatttatcaattgtacccatttaatactacctccgtcccaaaatataagaatttgggctgcagga

SEQ ID NO: 24409 - DNA, 3363 bp, Oryza sativa
ggacatggcatcctattaccagccatcgcatgaaattaataggatgcaacgtcctcatcctagatggaacaactatgtcatctcacgggtgaatccattcatcgatagtgtggttttgtgaaactaaactaccaaaataaatgtacttaagtgctaagtgtcaaaatatgtgttgttttatgcaacttgaaccataaaacttgtagttttgtgaaatttactcttatgtttattactaaaactgaatcattatttgtgtgttcctctgttgactacagtttttacaacatttgtgtgctttaattttaggaaatcaaaatttttaattttttctgatgggccatattgccattttacgtgttttttttctttcagccaagagcaagatgacaacaataggtccttcaaagtaccatctctaagaaatatcatgcttaaatcgacaaactctatggagggtaaattgcgatggtgagtcataagatataacatatgctgctcggtaatgttattttatcttgttttcatgttttatttacttattgtgaagtacttatctatttattaatttcatgcttttatcagctcatcacacagtgaaccaaatgtggccaattccttctgtggtcgcagccggaggaaggttgtggaggaacatcaaagaactgctagctcaaggttcctattttcacccttctatctatttgcacgatatctgttgcatatttggccaaaaaagggggcccacttgtgtttctatcaatttttattcagatttcttgtttgccatggccattgctccatttctccaccctctggcccttaataaggataatagttatgcaaatttggaccattaatgaacatatctatatctggctacatgaaaattgggaagcatctggtggaaacatcaattaaataaaattgtggaaaccgctttacaaactatgtatagtcctaaaaaattcccaaaaccttaccataatatcacaccctgtaccaccacatattctcgaattatgaagtttcacccgtcaagtaacaggtgaacacccacaccctatatagagccttaaccacccttatcccttcaagtcttctgtcccatcacgcttcctcctccacacaactcgatctcgcccttcttcaagctctggcgagatctggatctccttccccctgtatctctcatgccgacttgagctccccagtcaccaccaactgagatctgtcgctgccgcccccctcccccccaccatccatccatcccatcttcaactccggcaccaccgacaaattataccctccggcaagatctgtctcttcgccgccaccaccagtccgttcttcaagctcagcaaaggtaacctctgcgcccctccttttccgtcctgcccctgcttcccaccactggtcgcaggtgctctccagcttgtccaccgtaagatgccgcccccctcgtgcccgatgctaaccctgctcaccaccctctcctagatcatagcgggtggcatcacaagtgcccctgccattcctgtaaacctgaatccccttctctctcctcatccccaacctgtcccagaatcctaaccctgtcctcaccgagccagctcaagaggggaggcggcatgcttgacttttccctttttggcacttccagttattagcaagtgatcgctaatttgctaattagggaagcttcattgcataaacccttatgtttcccatcttctatttgcacattctgttgcataattggcaaaaaaggggttttattgtgtttcttttgtttgtattctgaattcttgttttccatagccattactccaccctctggcctaaaatgtgcagtcaacttatgtggatgaaaatttgggaaacaatcaattcaataaaatcgtggaaactactccactgattatgtatagaagtttttttttatttaaaaaaggaaacattaccataatatcatatgcaggggagatgctataatacgatcatgtaaaatttcaagatcaaattcaaacatgagaattttcatttgctttgaagattcatattgatatagtttaagttgcatttctctcctttttgtagtccagagcacccattgtctagaacacggggacgctctatgcttggtgatagacagcatggagatggtgtagctgtctcaaggtacctcagtaagtttctcttttgtttaaatttgtttgaagtcatgaatcaagaaacaagcatattctgatctgtttatcccctctgatttgaaatttgaatgcaatgcatgaagcatcaagtgcagtatctatgatggtccaaatatgtcgagtaatgtgaaatacattaatagagtattaaagaatcctttgttctgcatgtagtcgctcgatgaacaattctggattaattaatattgggatcaatacttttaagagcgattacaaggacccaagggacaaatcagcttatatatgcttaaattcaaattttcaaaaacttaatgtggatccagtataagccgtggaagattgcttggttattttaaaacggaatggttccaatttataagttctaactgattcaactgttgttagttgtaattgtcagattccctagtttttttgagttcccagttgaaatttgtgctggcctgcgattctattcagaagaagcaaaacagtcattaatttagacccatctgaatggagttctttagacacgagggaatgaaatgccattacttttgatacttctcttattcgtggtatacatggtatctttcacatgtaggatttgaaatttgaacttcaaatataagctggtttctccttgatgttgcacttaaaggtaataccaccattaaaagtgtccagtgctgtcatggaaaacttatggaagatataatcagtgttctattatcttagcctcatatctttggaatacatgaaggatttaacaaagtacagtcaatacagtttctaatccagtacaactgttatcttcttgagttcttgacatgattttgtatgtgttgcttgattataggtcagatggcgcatcaacatctaatatgcgtagaggacggcgaagaagtataagttttacccctgaaattggtgacgatattgtgaggttggtaaacccgacctttaaccctgagcaatgatacaatgtggttaattgaattgtttattcatagttttgcccaataatacaacttaacaacaatagtaaaatccttgcttgcatctaaatactcaatggaagaaaatttcattttcaaagaaataatagaactataaaaattggttatttggacaatccaggtataatttatccatatcatgcaacctggtt

SEQ ID NO: 24410 - DNA, 4674 bp, Oryza sativa
ttatacaggaatcacctcatgatttcaatgacaatgaactacatgtaagaggaccagatgagcaagagggctcaagaaggcaagttagtaaccagaaggctgtgtcattaccttcatcgccccatcgattgcgcagtgatggttctggcctcagaggaccagccgagtttctgacagcagatctgatgtccacttggaataaggttttgcgatcttcaccatttctgaacaagcctttattgcctttcgaggaatggcatattgagttctcagagattactgttggcactcgagttgggataggcaagtacatggttcgctatctatattctgctacattcaggaagtccctgcattatgaaatacaccacttcgttagtttttatcttttattgaactttttagaaaatcataatgaatgatcaattatcccaatataaataaggatgttttaagttgaccttttagagtcaagaaacagcctcttggtagaatgtcattttaaaactgctaactcatctgaatgttttccagggttctttggagaagttttccgtggtatctggaatggaacagacgtagctataaaattattcctggagcaagatttaacaacggagaatatggaagatttctgcaacgagatctccatacttaggtattacatatagctttttgcaataacttccgttatctacaatattatgtcctaatgttattccctcttttttttttcccagccgtcttcgacaccccaatggtattgcctccacatacagtcctcattactgtagtttcattttccttttttttttgttttgattccattttctttgatgatcagattgttcttattgtttgaaatttaatataactagagatgttacctaagaatggttgtttggctttgaatttcagttatattattccttggtgcatgcatgaagcctcctcacttatccttagtcactgaatatatggaaatgggttcgttgtactatttaattcatgcaagtggccagaaaggtaagctcagttggcgaaggaggctaaaaatgcttcgtgacatatgtaggtgagcagatgacacatgctttactgatatttgttggcagttataattttcttgagtgtctagctcctgatacgtttctgtgaattcttgttgtcatgtctaacactgatctgattttttttccctgaaggggtcttatgtgcatgcaccgtttgaagatagttcaccgtgatctaaagagtgcaaattgccttgttaacaagcactgggcagtcaaattatgtgactttgggctctctcgagtgatgtcaaattctgcaatgaatgataattcatctgcaggaactccggagtggatggcccctgagcttattcgtaatgaaccatttacagagaagtgtgatatcttcagccttggagttatcatgtgggagctttgcactctgagtaggccttgggaaggaataccgtcagttcaggtaaccaccattattcatctctttgtacttttttcatttgaagtatacatctaacgggatatgctgtgtgcttcctcaaggtggtttataatgtggcgaatgaaggggcacggttggaaataccagatggacctctcggaagcctgatagctggtatgatttgagttatttcttactaaataaatgcccatgcgtttgcaatgggtaaacatgaaccttcttatatgtgataatatttttcagaaaaataaatgtcagtattttgttttcgttgaacacaccattcatacttttgttacatggatcacttaacagtttttccataattctaatattaaaattagccataattgacctttccattagaaacgtgttgtagaaacccaataataagaaaataataattggtggaaggactaatgtgtaatattaacaatttcaaggatcacttagtaaaaatattgtagcctacaatcaatggttggttgcatctattggtgctcctgctgtcattttctagacttgtattagtttcttctgtatagtaaaccaacatttggaatgatttaggccctgcttgtttcagcttaggattactataatctggattattagttataatctgaaacaaacaggtagattattatgatagattgttataatctataagccagattagtataatctgataatctcctctaaatgtgcttttttttagattattgggtggctaaagactcactacccttattctactataatccattgaaacaaacaaatcatagcttattctattatagcttattataatccagcttatagtaatcttgctcaataatctggattacaataatgttaagttgaatcaaacagaattcagggccttagtttataaaattagaacttgcatggacattttccttttgggatggtgcttgttgtgaaatttctctaccataaagctatacgagttaacaatctgcataaatcttttcgcaaataccatttttttctatataaataaaaaagatcactgaacactgatattcctgatttcctacactctaatcaagtagcctgatgttgacaagggttagaccagcctgcagtaactgcttggttcttggtgggtggtaaaggaaaagttcaaaaatcccaatgtctgtttttgcattatataagaagtgtttgagtactgttcggagttaaaagttttggagattcatacagattggtagaaaatgcaaaattgcgagtctggtattaaagatgaaatttggaaagtataatcctggtgtgagccctttctgaaacctgttgcattttgttttatagattgctgggcggaaccggataagcgtccaggttgccaggagattctcacccgcttgcttgactgcgaatacaccttatgttgagataatctgcctctggtctgtatagcggttttagaggcagcgaattggttcggcttatacatcgtttctttttcccatttctcatcattttgacatcgttgatgatgtaaattggcaacctgtactataataagcaagcctcaaagcatctttaatgttacaccattggtcgtgtgaccattttccatggtactccctccgtttcatcattttccatggttccatggtaccattttacccgcagccatcatttaccaaatattggacctccgagttttgtccctttcccagttacgaagtgaatttaactgttctccatgaacatgttgcgaggttactgctttaaatggtgcttggaattggctgctctcttcaaggtatcctctacgatttttagtcatacatgtttattagttattactcctgcaagtcgtactggcattcctatacaatcaaataagatgttaaccctcctagtttttttttaattttttaaaaaagctccatggcatgtttagattatagccaatataaatcttgccaaaactttagtaggatttcttatgtatttactaagtcggtaacaaactaaacatacatttttttgggtaactttaaaaaaaatggtatgattaaaaatggcatcaaagtgaatagccgctagttccgatattcaactcaagggatttgttgcgtgtcggtcaactggaacttgtttagcagtcgggtagaaaactagaaacacctgcaaataatctgaatgggacgctccattgttcagcattttctaggattaaataattgatagtcttggctacgcatataaatccacaatatctacaccgcgtggttataccgacacctgaacaaaagaaagtcgcacggataccaacagaaatcaccattttatagctatcatatactgagtatgccgcaagttaatccatagattagggctagaaccacgaattagtcttcacacgacaatagcttcaaattcattatttagtgttgggatcaatcttcttccaaaagaaatggagcatctgacgtgtcttttggaaagaacgactcagctgacatccgaattccgaaagtaagtgatcacatttcaagtttttgaccaaatttcaccgaacgaaagtgacaccggctaagaccgactcaacgatcctcacgcacggcgttcttccacttgccggccacctcctcgagcgcgcggcgcgacgccccgtccggcgaccacgccctcgccgccgccgccgcctgcagctccctcgcccggcgacgcacggcgctccccttctcccctggatccatgagctccttcaccgctgccgcgacctccttccgcgacaccacgccgccgtcgccgccgtgtgccaccggacgtagcgccaccccggctacctccgtcaggatgaccgtgttcatcttctgctcggcgtacagcggccacgcgatcatcggcacgccggaggacacgctctccagcgtcgagttccacccgcagtgcgacacgaacgccgccgtcgccgggtgcgccagcacgcgcacctgcggcgcccacgacgccacggcgaggccccgcccgctcgtcctctccacgaagccctcggggaggaagttcatcgggttgctgtggcccggcgcccatggagtaaggcagcctgcccgtgctcggcatgcgcaccacccagaggaagttgtgggcgctcatctccagcccggcggcgagctcggccgtctggtccacggacag

SEQ ID NO: 24411 - DNA, 25954 bp, Oryza sativa
  unsure (1)..(25954): unsure at all n locations
gggaagctgttcaccaagaagccatcggcgccgccgtatcgccgcccctcctcgagcacgtaggcgtagttcggatcggcgcaatcctggaacccgtcaggaatttcgtcgtggcggagcggcgcgcaaccggggagcacgagcgggtccgggaggtcacggtactcaccgacggcggcgtcgtcatggagctccacgacgctgcgcacgacggagatgaagctgatgctggtcgggaagaacacgtacccgggcacgccgagctcggcgacgagcgccagggccggcgtgccgaagaagtcgcacacgatcgccgcggtggtggagccgatgccgacgacgagcgcgcggagctgcgggacgaagcggcgcatgacctcgtacatcaaacagccgccgacgtccgccgggggcgggagaacggcggtggccacggaggccggcagcgaggagagcacggcggcgtcggttcggagaggccggcgagcgtgacgagcgtgggcgcgacgccgtggtggtcggcgagccgccgcgccagctcggccatcgggatgaggtggccggcgccggggctcgccagcagcacgacgtgcggccggttatcctccgccgtggtgctcgccaacggctccatcggtcgtctgtaagacggtgtagtgtgcgactgtgtgttgtgtgtagacgacaatacgagtcgtatatatagcccacggccacgcagctcgagaaaacatatgcgtcattagcaattccccaattataattgtggcagttgacgatatcttttcttcaacaaagctaccggtagctattagtgaacagtgtgccccagaacctagtgaatcttaaaacgaagaaagattatgtgatagtgtagcagccggcggcgatggctcctacaagacaaatctcggttttgatccttctcggacctgtttttttagtaactatataacattcgacagttatttttaaggaaaaaaaactttcacatgtaactaattataacagttattactgttttgctatacttttttgtgctgttcagctgccgatgtaatagtcaggctaaaaaccctaccccttagctctagtttcagtgctgtcttttgaggttgctcttgttgtcttctctacaaaaccagctaatgtggtagccttatgtatctttctgtctgtacccggaccttatagctctgttcatttctagttatggaaatggggcgtcagcccttgataaaaaaaatagttaattacaacgtatctagtatgaaattgttatataactattacataactaataacttatatgtaacttgatcttttctttcaaaaccacatggcattgcaagtgcctagcgtagcggtcttgcaagcaacaagtcaagggttcaattctcgcttgggcacgtgcgatttttttttatatctcggtatcacgaatctcgaagaacatccgacggtggaaaatttgaaatttttaaagaaataaatcagtcgaaagtttttttagcaaaacccttttttttgttaaaagacatttaaggacatgtttgtagcatcttgtgattgtagtagtttcttcgtcatatagggaaagtgtttatcatcctatcgagggaatactcctagttttttatatgctatctaaattgttataattttcttttaaaaaataaataagatagattaatatgaaatactatcactacacaaatatgcaaattcaaattaaacttctacatgttgtaacaaaaataacacataattataaacatactttaattatttttatttttatttttatttttttctttttttggtaatttgtagaggttgaatttaggtttgcatgttaatagagtgatatattttagagtaaatttcacaaaactacaggtaatttgatcaatctactacaaagctacatatttaataaagtgtaacccaaaactacaaatttaaaatcatatttttcagaaatttataaatttaaggtattatatcataaaactacagatttaatatcatattttatcacaaaactataacttttataacctcaatagtgctatggacataaactttaaaatctgtatatagttatttcataacttcaatattaaatatgtagttttgtgatacaatgctataaatttgtagttttgtgataaatttcacactaaatctgtagttttgtgatacactttttaaaactatagttttgtgctagtctggtcaaagtatatgtagttttatgaaatttactctatattttatattaatctaagttgtgaatatatttgttaaaaaataatataactatttagatggcatgaaagaataagagaatgtctccttgagagatggaaatccatctttctatcatataatttaactatgtgtcattattactaggttataactaaataccctttgggcttaactatttgtcactaaaaagaggtgatatatgaggagaattgtaatgtcccgcttctctcaggctgggcccacttacatttggcagcttttcttagatatagattgcccttacagaccaacacaagtcttttctgtacactttgtccttactcgtgtgcatccgagaagaatttcccgagcttttcttggatatagactgccctcacataccaacacaagtcttttctgcacactttatcctcacttgtgtgtacctgggaagaatttcctgatcggtgatgagaagcttttcttggatatagactgaggagaattgtaacgtcccgcctcccctaggtcgggtccacttacatctggcaacttttcttagatatagactgccctcacaaacctcgagaagaatttcctggtcagtgaggccgggcccacttacatctggtagcttttattggacatagactgtgataccattatgtaacgtctcgcctctcccaggatttctcggtcagtgaggctatgcccacttacatctggcagtttttcttgcctctcccaggattttccgatcggtgaggccaggcccacttatatctgtcagtttttcaaggatttcccggtcggtgaggctaggcccacttacacctggcagtttttcttgggcatagtttgtgataccattatgtaacgtcctgcctctcctagaccgggcccactcacccatcctgaaatagtgaaattgctccaggctaagcatgtttaacctcagagttcgttggagatcggctttcagaaaagaagttacaacttgttggtatgagtattctattaatccaggccaggatgtcacatgtaaaatgtaaggttattttctttccattgcacgaatctttgactcgatcctacacttaaaaatttagaagttgtgggacaaaagaactggcgaattaatgtttcttctagcgaattcgaaaaaaagaaacacggcgatatacaatagagtttctagaattatagtggattcagtttgtttgcatcgcactactaggaaaagcattatcgcaagcggccgaaaagggtcttcgcaggcggggcgatcgtccgcctgtaagccaacgactgtgaagatctccgatcttcgcaggcggggcggccgtccgcttgcgaagataattttcgcaggcggacgttggctagtccggtccgcctgcgaaaataggaatcgtccgcttgcaaaaaaaaaaacttccgcctgcgaagataggtagaaaatattgaaatttaataataatttgcccgtaaattacttttaaattatttaatagaaattcttgcaggtagatttttatgtacatatatcggaagattatcaagcatttggtactgagaaatctacatatattgcataactcaaaagtgttgccaaaatatatatatatattacaatatttttttacattgtcacttcaaataacgtcatctagttacgttatggcatagcagtgttccactcccgaagatccttgaattcgtcacttgccgctagggcaccctctgggtcgaagaaatctcctttcacatgacagcactaatggtggatgaagtggcacagatcacgctggacatttgtgattcctgtatcgtcaaagcttgttcgacattctaatcttggcaactgcatgcattgaaattaatcaatatattagtatcataaatatgtggagctgtctagtacatagtatagagacttacatcctccgcgttagtcctgtaccgtccattaaccctaaggaattcgcacgcataatacccgcaaaggaccgttccttgcggttgcttgtgacacttcaggacatatcatagaaaaaagtagttaaaattttcaattagtgaaacaattggaatacattaagtgagtggagtattaccggccaataggtacgtactagtagcttctcccgtgttcgggtttgttctccacccttgaacttgtagtattggtatgcactgtatggatgtcgtaccatttcacagtaaggaggatatttatttataatacattcatatacaaatgcaagagtcataataacttactactataagattgttagaaattctttgtattgcttgtgactgtaatcgagagggtccaagactaccacggttccgtctttagggtggataagtaaacagatataatgatcgctacatattaacaacattatagttagttagtaccagctaaaataagacatatgtgtataagataaatgtactggacttacttaaaattataagcggccatgacgactctcttattttgaaagtgcaagaaggctcgtccaatgtactgtgcgacagtaatcaatttctccttgtgcaagcccttcttgtattctgctatctcttttggattcttgcccttcagctggtcagaccctggtgctagcctcacggtatgctgtgtttggcagatccgagttggatccaagaagccgatgggttcttttttcttcttagcatccatgtaatgcatcctacagaagaagtttgttagtaacaatcacatggatttgtattgtacatatttttcatctaattacttaaaactcatactcacatgcaccaaataccaacgtagttgacgtccatctttctgacgatatatggctggagatctgagaaatccctttaaaaaggccccccaatacgtannaccttctttgccgaaacaatctgccggtgatcgagctgttatattgcccaagccttttttgctggcctccatatagaagttatgtaaccttctcatctcccatggtgcttctttcagtgcccattccagcaagagtgctttcccatgttcgtacttttccgggcaatcatcggttgcgaagtatgttggcccggctagttcagcagccttctgggggtcgtcatctctgagcttggcacgttccttaccccctctaaagacggttaccatgaacttctccttgttctcatctttggacttggagtcatggctcctaagcactcgtggcacctcggggtctttcgcaggagaagggtcttcaaatatttctggctttgtaccatcccattccaatcttggtacttcttctttgtctgacccgactgatgccacaaattacacctctggttctgccactgtaatctccatgggcacatccggcactggaatctccatggctgcctccggcggtgcaatctccatggctgcctccggcaatgtaatctcaagtggcacttccagcactggattttccttttgcatctctggttcctccgccttatcagtcaccttcctcttaggaggcctcgaaggttttcccaaccccggtttaggcaccacaggtttttgcatggcgtcggtgcccaatccaaaggatatgtcattcttgtgccagagaattacaagatcgaccgcatccccaagtacggatacaccatctgcagtcgggaagtcaatgtcgtaggactcaaacccttcgtgaaccacttgcggctacaccttggcatagcatcgggtatgaactcttcattgtatgttctcccagggatagcaatggctgtagcggcctcaagagttttcccggagcgtccaatgggaacgtgcaatctgcagggtgtattctccttgaggtcatcgaaggggtaatctagctcagattctttggtttcggggcgaggcaaaatcatgtgcttgacgtagaaatccatcatttgcctttcaaactccgcacccccttcgtctctaagtttatcctattttatcggcaaaatcatgtgaactggataaattttctattttatcggcaacgctctacagctccggattttcaaacgatacttttccttcatccgtgatcttcggagttctagctcttacccagttccttgatctctgtgtccactcctccattggtaccggttgccccttcttcctcatttcctcctcctctttagtccactgctccaccattggtgcgtatcccgcggagcctaagcgatgacgaaatttgttcttcttggccaactctgcatacttttggctcctttgaatttcttttggagagttcttcaaggtcagaaagtcgtcccactgattgggggttatgttggcatacgtcgaaaatggtgtgcgtcccgtcttcacaaatttcttgttcaaggtggttttccaaccacgccaagacttagccattgtttacagtgcacaatttctcactgctgcctctgatccatccgggaactggaagattttcttcaactctttccataggacttccttatccccatttgatacatgatcccagtccttgaccgtgatggggatcttttcccttaatattatgccacactgtgaactgaatttcgcacgtgccgtcttagcgtcgagcggctctcctttaggcgaaacatgggtaacaacatggaacccttcatcctttctattcacgcttctctcgcccttccttttcttcgtgattgctgaccgttcgctattctttgtgccggttgtgttagctggtacgtcgtcgtctttggacggaacttttttcttcggctgccgttttgatcgccatggcgttgtttcctacgagaaggtatacatggaagtttcgaattagctcgggctaatagttatcacggtgaacattttacatattaagtctacttaccccttctttagggggaatgtagtccttgttgccttcttcaccgtcgccctttttccttctcttcgggcttgggcttggacaaggatcgcttggcgacgagtactcctcgtcttcgtcacctacgtcgctgtcggaactaccttccggtgcgaccgttggttccggagcaaccacaacagcaagggactgctcctgctcccctgaacccttctcttcagtccctttagtactatcggccatcgtttcaaacctctaatataaaaaaaaagagttatcgtccacattttaaacaactttgtaaacaatatgtcgtatgaacaaatttaaattctctgagatttccaaatttaactattatactaaattaattagtacaaactaatttaaattgcgaaatattattaattagtacttactattatgctaaattaattaatacaaacaaatttaaattgtgaaactaatgactacttactattatgctaaattaattagtacaaacaaatttgtacaaaatttgatatgttattatcaagtagtgcaataattgacagttatatttcatcgacatgttgattaaaaaaatggaaaaggcaaaaatatcctccacatttttttaaaaaaaatgttaacataccctccaacatgttatttaaaacatttgacaaattcacatatcctgcaaaattgaacataccctcccaatttcattcacatatcacccacattcccaaattcacattcacaatcaacgtataacccctcattcacatatcacccacccctcatgcccattcacacccacatgcacgcacatatataccccctcacacccacatgcacccacatgccgtgcgcgcggtagaggggctggcggcagtgtaggggccaccggtggccgcgcgcgcggtggaggggccggtggcggtggaggagctggtggcggtggaggagctggcggcggtggagcgggcgcgcggtggaggggtcggcggcggcggcggcagagtggtggaggtcgcgcgcggtggagcggcagcaaggggcggtggtctcggtgacagcgcctggacgacgacggtcggcggcggcggaggacgacgttcggagagtgaaggtcgcaggcgggcggcggcggaggacggcggaggcgtgcggcagcaaaaaatttcggcagcctgacggcgccaaaatttctagggttcccgcctggacttagaaattttggcgccgcgggcttgcccttatatagggcaacgatcttcgcaggcgggcggttcgcctgcgaagatcttttttcctatcttcgcaagcgggccgtccgcctgcaaaaattggtacagagttgaatatatttattccaaaatatacaaatcttaatattattacaaaatatacaaaccttagtattattacttttcaaatgtataaatcttaattgcacataaaaatattactaatttaaattttttaacaaattttttacactacaaatggtaaaaatggtaattgcacataaaaataattacagttttcaaatattactaattttaattttttaacaaattttttacactacaaatggtaattgcacataaaaattagtacaaactaattaatatgcaaaatgttgagtacaattgttcgtcaatttgcgatatgatcacacatcaccttacatgccaccattaaataactactaacttcttagatgcttacatgcctctcaacaatcattaccctttaacatttttgcccacaccgtccgtgcgcatgtaaggcttcacggtcttttgagtagatgtctcgacattcttaatcttctgtacaaactgactataaagtggcatactatcgtattggttgtaatcttcgacatcttcaatcccatccactcccaatatcttttgtttccctgatagcactatatctttcttcaaatttgaagggtctttcacataaaacacttgtgccacgcgattggcgagtacccaagggtcatccttgtgacccacactcgccaggtcaacaacagtaaaaccgaacttatcaacattgaccccgttcgggtattttacccactggcacttaaatatagggaattgcattgtgtgcccatagtcgatttcccatatttcttcaataaacccgaagtatgattgttttttcccggcttcatcaattgcctccacacggacaccgctgttttgcgtacaagtcttactatctcgggctcttgtgctaaacgagtatctattaatgtcatatccctgccaagaatttactgtagttgatggaccacaagccaaccgcttcatagttatttcatctcggtggtgcgacccttattgttagcttgtattagttcgatatgttgatcgatgtacggctcgacgatagcaagctgatgaagcacgctgaagtgagcttcttggaatgatttgtgatcatgggtgacgaatctcttctttcctatcgttcccctgccactcaatctgccctcgtgtcggggcacaggtactccaattgcatatccatctttgaggtaatcgatacatcactcgacaacctcttcagtactataaccctcaaccattgataacactggatgtgcacgatttcggacgtaacccttcagaaccgccatgtaacgctcgtatgaccacatttgatggaggtacaatgggccaagcgcaaccatctgcggcactatgtgaacaatgaggtgctccatcatatcaaaaaatgatggagggaaacacatctcaagttggcactgtgtctcatgtgcgaatgtacggagatttcctaactcttcgagactactaagggcaggttttataaaagaggtggatgttgcatctaatcttgaccacatcatcaactaataaatgtagagataacatgtacaatatatcacatctatactagttctaatacactagccccaatgtttgtttgcccaatctactcttcctctctctcattttgtcttgaattttgtatagtggttgcctcttgcatgagaggtgactgcttatctctctcatctcttctctcctccacctcactccacctcactattttagcttatgtggcacctaggagattgtacttggatgcccatagtacttgccctaatgaccttctgtgacactgcgttgaaaaagtagcacaaccttgtgatagcaacctttaaatgctccggttttattgcccttattgcaattgcaagaaacacggtgagcaagacatggcagtcgtgtaaattataaccagataccgacaaatctttcattgaaactagtcgactgatgtttgatgagaaacctatgggcactctgacatcacggagtgagttgcaaaatgacttcttctcctcaggtgtcagtgtgaaacaggctggtggaagatatactttgccattcttttctccttcttgagggtgtaactcttccctgattcccatctcgactaggttcatccttgattgcagaccatctttagtcttcttcggcatgtccaacaatgttccaactatgttgtcaaacacattcttctctagatgcatgacgtctatggcatgctgaacctccagatctttccagtacgggaggtacttaaaaaatatggaatgcttattgaatgggggagggagtttatcatctggcttcgaactgtcatcttgcttcttactatcccctcccttcgttttcttctcaggtttcttgcgctttgtcccctttgatggtttcttagtcatttttccaaactcgcaaacaattttctctgtcattgcacacaccttttctcccgatgtaggttttggtgcaggatcagtctcttcagtaccatcgaactctgccttcatcttgcggtacttgtgatttgtgcgtaggaaccgccggtgccgcatgtacacaagcttgttgtaacccgggagatacctatagtacgttccattcaagcagatcacacatcctgttttacctttaatttgacctgaaactgaaaacattgttggataatcgttaatggtcatgaagatgatggccttcactgtgaagtattcccttaagtactcgtcccacactttcaatccctctttccataaatcagccatatcttccaacaatggtttaagaaacacgtcaatatcaataccagactgacggggtccctgtatgaggatacaaagtagtacgtattttcgcttttgacaaagccaggtaggaagattatacatggtgagaagcaccggccaagtactatgtgagctgctcatgtctccaaaaggattaactccatcagtactcagggcaaatctaatgtttcgtgggtctttagcaaactctctatactgagcatcaaagtttatccattgacgagcatctgccgggtgtcgaatcatcccatccttcttgcgtccttcttcatgccagcgcattagttccgcatctcgcgggtttgagtatatccgtttaatgcggtctttgacaggaaggtaccacatcacaagctgcgggatttttctctgtcgtccctcagttgcttcatagggttctaggccagtattgctattcgacttgtaccggcttgcaccgcatgttggacattcatctaaagaagcgtactctttcctgtacagtatgcagtgatttacgcacgcatgaatcttttccacaccaagtgaaagggggcatatgagtttctttgcttgatatgtgctggatggtagtgagttaggcctcgggagcattttctgtagaagttctaacagactgttgaaactggtatcagaccatccatgtctcgcctttaacctcataagttcaagaactgaccggtgtgttgtgaactcactatcacagcccttcgactcatcgtacaaaacttcctttgctgccttctgtaaagcttcaaagttatttaaccctctagccgaccccatcagtacctcgggttctgcatgacgtaacatttcctctaggtcgattttgtcctcaacagaaccatcgtcatgcaccatgtcttcaacttgtgtcggaactacattttcaggcccgtccacttgttcttcaccatgacgtgtccatatttcgtacttgtccataaatccacgagttactaagtgctccttcactttaaaagcatcgtcaaagtcccaggctatttcattcttacagtcagcacatggacaaattatcttcctcatattgttcttctcagggtgtgccttagcaataccaataaatttagccacttcgtttctatatgtagacaaaaacctcggccaatgatacatccattcccgactttccatatctctaaaaaaatacacgtaaaatatttgcacaattaataccaaatttgtagggtttattgaaaaaacttatcgctattcaaaactaattaactaaagttaagtgtaaattaataaaaaatcatagtttatttcaattttttttacatagacatgccaaattagtacattaggaaaatctacaaaatcatttcatcggcatattacaaaatactataactattttttgattgcaccgaataaatagacatttaaaattttattctctctctgtatatgacaagatctagatctagatctagaactaggtggtggatgtgatagcaaaaataaaaaaaatttgagaatttatgttaccacattaaaccactacaacaagaggcatcaagtattacacatacatctaacatcaacatatcaaaagaaataaaattaaaaacatggagctcttcctttacaattttgcatgcataaatccatcacaaattaaggtctaaaaagcttaaaaaattgcatacctagtgttgaaatgagtagatataagtaccgtagaaaaatcccccgaagatttgaagttcaaaacctccccctatatttaagtcactttaggagtgagaaacttcggggagaatgaacagggctcggggaggaagaagactatataggggcatcttttcaagcgggccatataagcgtcgcctgcaaagattgatcttcgcaagcggaccgccccctccaccccgggtactttttttgccagcggggttttggctccgaattacttgcccgcctgcgaaaatcgatcccctacgacgccgaaaatgagttttctagtagtgtcattcacatactatgctctgttatcatacacaaaagataaataggaatgtcaacacacgttacaaattgggtaatttactacagtatatactttacatataaaacggtactagtagtcggaaaggctaaggggcgatcgatcgcccctagcgatcacccctagagcggtccccctcccttcatgtggtttcctttttcggcgccatattacttttctattttagtaaatttatgcacctaaagtttgtacacctcaagtttatatatctaaagtttaaagtttagagaaccaaagtttataagtcaaaagtttatatattcgattcaaatttaaatttgaattcaaatatttattttagatatagtatttctattcatctaaagtttataggcccaaagtttataagtcaaaagtttatatacccgatttcaaatttgaatttgaattatatccgattcaaatttgaatttaaattcaaatatcttttattatagtatttctatgcatataaagtttatagacccaaacttgtcaaaagtttacacacctgatgaatttgaattcaaatattagtttatagacccaaagtttataagtcaaaagtttacatacccgttttaaatttgaatttgaattcaaatattttttatacatagtatttctatacataattttttttcaactttgtttttttttgttttttaaaaatgtatggtgtagtaggaagagaagaggggaggaggaagagagagagtagcttataggggcagaggggggggggggtgcaacgcgcccatcgttatcgttttgtataaatttttcacgtggccagcgacaaccatatatatccaacagtttcttcctgatccacctaggcggcgcgcatgactgcaaaacctcgtacgacggcggcgaggacaaccagctgtgggcgcgctccattgttcagcattttctatgattaaataaatgatagtgttggctacgcatataaatccacaatatctacacggcgtggttataccgatacctggacaaaagaaagtcgcacggataccaacagaaatcaacattttacacttatcatatactcactccgtttcaaaatatttgacaccgttgatttgtttgaccattcgtcttattcaaaaaatttaaataattatttattcttttcatatcatttgattcattggtaaatatagttttacatatttcacaatttttttaataaaacgaacggtcaaacatatgctaaaaagttattgatgttaaacattttgaattagagggagtactgagtatgccgcaagttggtccatagattaggattagaaccacgaattataagtcttcacacaacaatagcttcaaattctttatttagtgttgggatcaatcttcttccaaaataaatgaagcatctgacatgtcttttagaaagaaaggctcagctgacatccgaattccgaaagtgagtgatcacctttcaagtttttgaccaaatttcaccgaacgaaagtgacaccggctaagactgactcaacgatcctcatgcacggcgttcttccacttgccggccacctcctcgagcgcgcggcgcgacgccccgtccggcgaccacgccctcgccgccgccgccgcctgcagctccctcgcccggcgacgcgcggcgctccccttctcccctggatccatgagctccttcaccgccgccgccacctcctcccgcgacaccacgccgccgggcgccaccggacttagcggtagcgccaccccggctacctccgtcaggatggccgcgttcatcttctgctcggcgtgcagcggccacgcgatcatcggcacgccggaggacacgctctccagcgccgagttccacccgcagtgcgacacgaacgccgccgtcgccgggtgcgccagcacgcgcacctgcggcgcccacgacgccacggcgaggccccgcccgttcgtcctctccacgaagccctcggggaggaagtccatcgggttgccgtagctggcgcccatggaggaaaggagcccgccctttcttggcatgcgcaccacccagaggaacctgtggccgctcatctccagcccggcggcgagctcgcgcgtctgctccacggacagcgcgccgccggagccgaaggagacgtacaccaccgaccccgccggctggcggtccagccactccaagcacgccgactcgtcggcgtcctcgtcggaccttggccggacgaacggcccgacgaggtacaccggcgggaacgcgccgttctccccgtctcgcctgaacgcttccgcggcgcccggctccatctccgggaaactgttcaccaagaagccgtcggcgccgccgtatcgccgcccctcctcgagcacgtaggcgtagaccggatcggcagaatcccggaacccgtcggggatgtcgccgtggcggagcggcgcgcatccggggagcacgagcgggtccgggaggtcacggtactcgccggcggcggcgccgtcgtggagctccacgacgctgcgcacgacggagatgaagctgatgctggtcgggaagaacacgtacccgggcacgccgagctcagcggcgagcgccagggccggcgtgccgaagaagtcgcacacgatcgcggcggcgggggagccgacgacgagcgggcggaggtgcgggacggagcggcggacgagctcgaacatcacggagccgaagccgatgtccgccgggaggtcgtcgagggcgacgggcgggagcacggcggtggccacggaggccggcagcgaggagagcacggcggcgtcggtggccgggtcggagaggctggcgatcgtgacgacggtgaccgcgaagccgtggtcggacacgagccgcctcgccaactcggccagcgggatgaggtggccggcgccggggctggccatcaggacgacgtgcggcggcggcggcggcagtgacgtgtcagttgcaccggtggccgcctccgccatggttgagtgcagagtatggagtacgcttctacttatttttggtgtcgtgccgcgtcgcgtcgctttgcagtttgagaatggaaagcagatgccatgtgcaatgaaaattaaggcccagcttggaacttaggaagataaagaaactaattagtaaaaaaaaaaaagaagcatcaggcaaaatttgccacggacatctaaaagctaagctatgtaattagctagaagacactcaaaaaacgcgacactactaataggcaccacaaaatttgtgtaattagctatagtaaatctgagacaatattttatcattttcagtgaaaaagaggagatagaaatttcaaaaggacataaatgccctcggcctaagtaacatgtacccgaaatctccatccaacttaactctaggctaccgatggtgacggcggcggcggcggcaggcgaccgacttcttcttcgacaacggctggtggcggtggcgggcaagcggcttctgcttcaacggtggctggtgacggcggcggcggcttcggctggttgtggcgttgggaagcgacagcggtggtgatggctcggccggtcatggtgcaccaggagctcgccgcgctgcaggagcagcagcaccatgatttcatgccgtcgccacaccaacagcaacagcaacagcagctagtgtagcagcagcaacagtagctagtgcagaacgatgcccaacaacaacagctagcagcagcaacgccgtggccgacgatgccctacgaccaccaccacccgctgctgcagccgctctgcaacgccgccgccgccacggcgcagagctcggccacgtccgcgccaccgacgcgccgccgctgcgcacctgtccgccacggtgctgctgcagaaggcagtgcagatgggctgctcacgaggcagggaccggaggaggaagggaggtcgctctcagcctctcactcgccgagaaccgccagctcctcatcctgctcaacatctccctcgccgtcctcgtcggctgcagcgtcgtgttgctctcgagctcggtgccaccgcttgccgttgcgccttaggtatggtagccgccgcgccttgtcgtcgccggcggtgagaccctggaggagcgccgccgctttttccgccgcgtgcgtgaggaagaaggataggagagagatgtaggcccatgccgcgtgagaccaggtggttaaaacctattaaaaaggacactgtctataacgagaccattctctctatggtcataactagatacctcaatctcatatctagttgctactagtatactcaaaagtgaatgtatttttttttcttcttatggaattttctcttagattactcatccgatttacgatccgattacaccattgtgttcataacaattaaatctttataacaaaatctcacatgactatatttttatgaaaaaatagaaattacttttataatatatctaaattacttttagattttattaaattacttcttagtcataaaagtaattcaataaagcttgaaagtaatttagctatattatagaagtaacttgaaacaaaagtgaagtaacttgttacgacattaaaagaaatctatacattcatgttgtgagttgtttattttataatcatttttagtcaattatgtaatttatgctgattaaatttaatttctatatagactcatgtttttacctccataacggatttacttttaatgtcgtgataaagttactttcttctttttttaagttacttctataatatatgtaaattacttttaggctttattgaatttacttttatgggtctaagaagtaatttattgaaatctaaaagtaatttaaatatattttaaaagtaatttctattttttcatcaaaatataatcatgtgagatcttattataaagattcaattcttacgaacacaacggtgtaatcggatcgtagatcggatgattagtttaagagaaaattatttttgaagtcgacgtagcgtagagcatcacatggcttctaatttggattcctggatgatgccacgtccgtgaatcaccaagccatgtacggacacatcagcacttatgggatcggacaactgatgagcgtgtcgcgcgataaggcaaaacagagagcgcgcgcgaattagattttgcctattaaaaattagattaaacatacactgtccatgatacgtgggtcccaccggtgtttaaagaaagagaaggggcaatccatgcatttagataaatatctcatcccttttgtcccggaaatataataaaataatacgacttgtatcctacggccaattacacgtttttttgtagggtcaatcagccgtgtcatgttttcgcagtgtctctcagccaattaaacgttttttgcgtgtcatttggcaaatctggcctttagtttattttctgagcattagcatactaggtctggtatctctaatacgtactaatatcaaaatggtatctaaggtatcatgcttaccatggtatctaggtaccgaaaaacttggtatctacgagtatcaaatttggtacctaaaaatatcctgctgacattaatacctaaaagtgtttcgttggctaaacggtatatcgttccttagttacccttaaaaaccgtactagtatgaatacaaaagacatgaaatataaatagttagcaaaatctcttgctctcgaagcttgtctttagcctaatggttagttgtatggtgtgtttatatatgggactattcaatttcaactgtcaagtcaaatcatcgatcaaatttggtatatatatgtgtgtccgtgttttggcaatgcacttgatgtttgatgcctataataatattaatgtgtaaaggatacttctttcatattttaatgtatgacgctgttgactttttaaccagcgtttgaccattcattttattcaaattttttgtgcaaatatgaaaatatttatatcatgcttaaagaacatttgatgatgaatcaagtcacaataaaataaatgataattacataaattttttaaataatacgaatgatcaaacgttggataaaaaatcaacggcgtcatacattaaaatatggaggtagtactattttgccggatgatcgaagaacggtcatccaaatggtattaatattgaaagagaaaaggagttacagaagatttttcatggacggtcggttgtaaaggatattcacacgcgtatgtatgcttaggtgtatgggttcggcgaaaaaaataaatatcttatctctaattggtggttacaatcgaagacttcaacacgtatcagaaaattcagaaatggcaaacgtcacacatcatgtgtgttaagcggaatctactcttggttttaattaatttaggaccatgaggtggacgaaagaatgctattggcagatccacccaacaattcaacgaccatatataactaccctaccctagtggttctctaactgattttttttatgcaagctaacgaattccatattttgctgatattaagtcacaaccaagatttaacaactcgtttttcttttcgaaacgaattttttttctcaattttagtgacacagcaggacacatattcctgcaaggtttgaaatttcggttcgaaatttccgaaattcgctcccaccgaaatgctcatatctcgtccgaaactttcggttttttgcaaatttttgtgaatttggtcaaattttattcaaatccattaaaaatcagtcaaaatttcaaaaaatttcgttagaaaaaaaatcctaattttctgaaatttcagttctttcaccccccgtcggcagaaaccgtagtttcgaaatttgaaacactgcattcctgcgtatctaccagtatggacatattttctcaagaatatctcttttttttactcctaatattaggctagaaaaaaaatgctccattgcatcaacgggagtctgttgggccttaatccatgtaacagttagtattttttgaatctctgtaacacttagtattaataggactaattgtagcacaaagtgaagaaacaaaaagaactttatatttagcatatgctcatgaaaccaagacccaaaagtagctccggaaatctcatatgcatccactacaaaattttcaaatattacactctaaaatcaatgagcatgaaaatttcaataagcaaaatcgtttcaataatgctaagaccagctgatccaataatgcaggcctccccgttaatctgcaagtccatggactaagaccaggtggcccataaaagcacacaaacaccgtaggaaaaagtacaccgaaggtccctcaacttgttatcgggataaaaaatgtccttgcaaccagatatacggggtcccttaactatacaaaaccggtcactcgagatccttcggtggttttgaccccggttttagcctacgtggtgcgtgggccccacatgtcagcatgccacgtcaactcccctttcccctcttctctcccttcctcccccctctctctctcgcacttttctctcgcaggccggccgacgggtaggtagcagatgatcgggtggtgagcggggctgagcggcggccggcggaggcggcgtgctagcatgcggaggccggcgaagcggagcggcggtggcggcaagcgggcgagcgtgcggcgaccgacagatggggaacgcgccgggatgtcgtcgacagtggcaaccggcggggagaagaggcgccgggacgggtggtggccgatggggagaacgaccgacgagcgggcggggagacgaggcggcgtgcgtgccgacccgggctgccaaatcttgctatcaaatatttgaagcaacagtacctgtggcatatgagatcgacaatcaaccattcaatccacctataaatggccatatggcccaaggcccacggcctggcccaaagctcgcaaatttggcccggcccaagcacggcatgacccgactggggtcgtgcccatgccggcccggcccgacaaccgggccatgcctgggttgcacccttggcatggtgggccagcccagcactgctcgatcaaataaaaaaaatatagggatgcaaaatagacttaaataatcgtataaggcaaggcccaagacaagaggtacacaaaatagacttatgttccagccatttaaacatagccgacagagttgagggaccaaaaatagactttttctgtgaggaagcacgatgggccacgtaacttcggcacggcccgagtagtattgggccatgcctgggccttgtatgccacccatgggctggcacggcacggcccggtgtatcggtcgggccgtgccggctcgacaagcctcggcccaggcacggccaggcttgggccgtgccgtgccgggcggcccagatggccatctataaattcaccgcaccgaacactattgtttccaccgacaaaactcgcatggcctggagatcactgatgcactgaaccgtggcttccctagtgtgaatttccatgtaacttgggacaggatgattgttgttagcttgcttgacgctggagttggctgacggtgcctggtttcggtctggccatagctgttacgctatcgaaatctcatactccatgcagtggctggtgtggcacgtgtgagtgacttcaggagaggacatggacggaggcgttcttggtggcggcacagacggggcaagcgtcggcggtagcctcgcaggcgccacacaggcacaggtggcggcacgggagcagcagcacggacgcctccgcgacacggcaggccttccacgatgtcgccccggacatcgcgtcggcgtcggcggcagcggcggcggcggcgccgcctggggtctcgaagcatcacgactgcgcgtcctcggcgttgccctcccccgcggcggcggcgacggcacaaggggactggaggagctagttgagcgtggcgcggaggccggcggcgacacccatccacgcatgctcctccgcgctcatccggcggagcttctcctccagctccgcgttgtagcagcactcgcgatccagcttggcctccgccgcacgcaccctacccgtcgtggcgcaccggcgcgccatggccgccgccagcgcccggacgtgtcgctgttgcgctttctccagccctgcgcgcatctgctcgacctgcacgacatccaccaaacaccaacgccgatcaaacaccattcaccaaacacaaacagaggaggccggcagcgtgagcgggtgcgtggcctcgtcgtaggtgaagaagagcgaggcgttggctgtcgggatggggaggtcgccctgctggcctcctctttccctgctcctgcgtcgccgccgccgccgccgcgtcgcctatcgccagcccagagagaggaaaagtgagacagagagaaagaggacgaaaggaaagagagatggtgatgacgtggcatgctgacatgtggggcccacatgagtcccacactgactcagtcgtcacgtaggccaaaatcggggagagccccaagtgcggagagttattttaatcacgtggatgtccacccgttcaatacatataatttaaatagttattaaaaacagtacctttgtgttgaaatggggattcagaaaatgtttctaccatattcttccatctgtcatccttcgttagtcacatatgtgcgatgaacgcagagagaagaggagcccagtccgagtgtctgaccgagcctgtaacgggacattttccaaattcccaacgtgagaacgatggggatagaagaacttttgattgaaatcaacagaagaatctacgggattgcaacgtgtcaggaacctgacgttgctgggtgagctacaggaagctgacaacgcgagggaggaagaacagacttatgctggaagaggagcaagagttcgtaagtgtaacacgcgtgtgtgtgggccggattggaccaaatgagtaccaaccgagcccacgagtaagtctggagtaagagagggagagagagagagagagttgaattgtaataagaacagagcaccctgactttctttcgtatcgatgaagtaagaactggaggcgaaggcggcggcgataccaatcctgctggattcggtgaaactatctcgtttcttgcttgttcttactagttcttgagcagttgagttagggttctaacaatctggtatcagagccttgccgttctctcatttcctggattttgctgcaaaattttttcccggaagaggtgggaattgttgcttcggtgactaattccgcaaaagcttcggctccctcaactgggttagcgagatctagaacgagacgtcaaccacgggcacttacgagaaacctcgctatgtcaccaagcaagccgcgaagatcatggatcaggatgggaaactggatcttcttctcaagaagatggaggaggcggagaagaagcgcgaggaaagtgagaagaagagggagcattccgaggagaagagcagggctgagctcatggcgctcaaggcagtggtagaatctcgtttcccagctgtcgagaagagggtggatgatctacaaggttcggtgaaggatttgcaaggcaaggtggagcagctgcagttggatgtacaacaatttcctcaagagcaacctgctattgcttctatgctgaatcaaacaggtgctctaaaaacctctattcccttccctgatgtgactgatttggatcgatccccttctgatgtagcaaattctgttggtgtgatgggtttggggggtagtgttccaccgatgtcttatcctcagtttgatggtgttaatcctcaaatgtggaagtggaattgtgaagaatactttgacatctatggagtacatgctaagaattgggtcaggatagctggtttgtactttgtgggtaacgcagccttttggcttcactctatgcggtctaaactgtcgggagttagttggccagtttttgctgaacaagtttgtgtcaaattttctaaggatgactaggaaattcttatcaggcagtggattcatcttgtgcaagatactactgtgtctgaatatgtagaaaaatttgacagcattatgcaccaactgttggcttacaacaattcactgcctctcaattattttgtgaccaagtttgtggaggggctgaaacaggaaatcaggtctgcagttctgacgcagaaaccacaagatctggattcagcttgctcactggctttcttgcaggaagaaattttggaaggttccaagtctgtcagtcacaaaaagtctgatcagcctattcttgtcaggaactctttgaagtccttctctcctcaaggctattctaattctgttgttaagggcacttcatcagccccatccgatgacaggagagggtctgacagtaccagggctagagatgacaggctagccgctctgagatcttatagaaggtccaaggggctgtgttttacttgtggggagcgctggagtaaggaacacaaatgtgctacctctgttcaacttcatgtaattcaggaactattggaaaccttgagtcctaattctgttgattcagatgagcaggaaatggaagaaggtaacctgatggctatatccctgcaagctatcagtggtactgagtctgctacttctttcaagataaaagggtgtattcaaggaactgaagtgctaatgctgatcgattcaggcagttctcattctttcttggacacccaagtagctcacaagttccaaggtgttcagtcattatagaaggtgatgtcagttaaggtagcaaatggaggtatcatgttatgttctcaattgattcctcattgtgcttggtgggttcaaggagtaggtttccattcagactttaagctgttgagtcttggagtttatgatgttattttgggtatggactggctagtaaccttgggaacaatgaatattgattgggctactaaatggatggagtattagttggggaacaaaacaatcagaattcaaggaattcaggctcagactgaacactgtgctcccatttcagtggaaaaatttcaggaaatgctaaatctcggttcagtcatgcaggtctttcaactgcaacatctacctccagataaacttgttgaagttcccctgcaattcaggcctcttttatctgaatttcaggatatttttgctgaacctactggtttacctcctaagagagcgtgtgaccacagaattcctttgttgcctaactccaaacctgtgtacatcaggccgtataggcacaatccagcacagaaggacgaaattgagagacaggtgaaagagatgttggcctctggggtgatcagacctagcagcagtgcatattcttctcctgcacttttagtgaaaaagaaagatggtacatggagggtttgtattgactatagacaacctaatgccataactgtcaaaggtaaatttcccatgccagtcattgatgaacttttggatgagttatctagggctcaggtcttttccaaattagacttaagggcagggtttcaccaaattaggttgcaggaaggtgaaagcataaaactgccttccaaacccatactggccattgtaagtacatggtaatgtcatttgggttgactggtgctccacctacattccaagg

SEQ ID NO: 24412 - DNA, 11156 bp, Oryza sativa
  unsure (1)..(11156): unsure at all n locations
tttaaatgagcaaaggttacacaccccttggcagcataaagcatatactaagttgcggggtttacagtttaaaatctgttataggaagggatctagcaatgctgctgcagatgcactttcaaggaaatacaacctggaccctgttgacctcatggcagtttctagttgtgtccctgtttggctccaagaagtggctgctgggtacttgctagatgagcaaactaagcaacttttagcagaactgtccctatctgtcaattccaaacctcctttctctcttcataatagtattatcaaatacaaaggtaggatctggattggttacaatactgaattgcaacatagaattatctcaactctacatgacagcccaatggggggtcattctggtttccctgtcacatacaggaggattaaatccctttttgcctggcccaaaatgaagcaaactgttcaaagggcactcaagggctgtggagtttgtttgcaagtgaaacctaacagaagcaaatatcctggtcttttgcaacctttgccagttcctgatggagcttggcaggttattactatggattttattgaaggtntacctaagtcattcagatttaattgcattatggtagtggttgataaattttcagaagtattcccactttgttcccctggcgcacacattcactgcccttgaagttgctgatcttttatgcacaacatttacaaactccatggccttcctcattacattatctctgatagggacaaaatcttcacaagtcatttgtggcaacagctgtttgctaggtctggaactcagttgcacctaagcacagtctatcaccctcaaaccgatgggcaaactgagcgtgtgaatcagtgtttggaaatctttttgcgttgttttgtgcactctatgcctcataaatggagcagctggctttatttggctgaattttggtttaacacttcatattattcaacacttctgaaatctccttttgaagtcttgtatggctatcctccgggacattttggtatccgtgatgattcttgttctgttcctgatctggataattggttacaagaaagaaaacttatggttcagctcttgaaacagcatcccaacagagctcagcagcaaatgaaatgttatgctgataagaacagaagcgttcgtgcttttgaagtgggtgatttcgtctacctcaaattacaaccttatgtgcaatcatctgtttcacggagggcaaatcataagctatcttttcgctattttggaccctatcaagtgttggccaaggttggcaaggtagcttatcatcttcaacttcctagtgacagttctatacatcctgtctttcacgtttctcaactgaaatctgctgctgggttctccaaagtggtgcagcctcaacttcctgaaatgggtcaacttaaggtccctgaagttattctgaacactcgtcaggttcaacggggtaagtcattaatacctcaagttttagtttgttggtctggagatgttgcagggcaggagacttgggaagatcttgttgatttgcgtcagcgctttccagcagcgttggcttggggacaagcccaatctcaaggagaggggattgtcaggaacctgacgttgctgggtgagctacaggaagctgacaactcgagggaggaagaacagacttatgctggaagaggagcaagagtccgtaagtgtaacacgcgtgtgtgggccggattggaccaaatgagtaccggccgagcccacgagtaagtctggagtaagagagagagttgaattgtaataagaacatagcacgttgactttctttcgtatcgatgaagtaagaactggaggcgaaggcggcggcggcaccaattcttctggattcggtgaaactatctcgtttcttgcctgttcttactagttcttgagtagttgagttagggttctaacacaacgcaaagaaactagcacattaaatcccacattgatgggaccaaaactgatgttgttgggtggaggcgacgctatagctcatggtcttggatgcaggtcttctacagtactgcatatattgctcactgacatgtggatcccacagccacttgggcccacatatcagtgagcagtactgtacatgcagtactgcaggggatctcaattgcatggttttgggtagagtgtgagtgacaaagttgctcgacttcaataggaggcggtggcatcctcatcacggctactcttgtaggtggaggcgtcggaagacggagcagcggtggacaatggtgcctccagtgcaggggtggaaccagacaggactaacagaaaggactgaacaaagtatataaaactatagctccttcttctaataaatatatgatagaaaattttagtgaaaacttaatggggcttccatggttataacgctgatagcaaaggctcgcgtccccgtcgtccccatggcagatccgccactgcctccatgttaattagaccgcagcagagactcctgcattgttgagatggagcaacagggtggagggaagggcaaggacatggttggccttgatgatggagcttgatctattatccgccgcttggatcatgtaacttcaaatgaggtactactgatatatatatatatatatatatatatatatatatatatatatatatatatatatatatatataagcaatctcaggttgtcttgataaaaatgttctgccgggctgaataattggttatatttgagcttacccaaaaaaaattatcctttatacaaatgaaataaagtagctcagcttcatttagacgacgggattagtacgataccgtagggtagttcgactacgctttgcttttatttttttcccctcgtgaccttttgtgtgtgtgaagcggtataggagaggaagaggagcaataggggacatcggtgctccagtggatggaaggcctcgatggcagtagcagaggatgtttgcaggcatggatcacatgagtagggtggcagccggcaaagggagtaagggagacgcctcgaatggcgacggaaagagctcagctccagcagcaaatagtatagtggtggtagcctgtggcaatggctataagagaggggagatggggaaattggattcagtgggttgtggcggtgatgcgatgagaggagggaagaggggtactagcagaggagatcagccgatgagaaggattggttggacatggcagagagaggagagctcgaagagcttgatgcacagtggggagaggggatgtgatgatgacgaaccgcagcgacaatggtgccacagggaaggagcgagacgtttgctcggtcggctaggccaagcgctaacatgtggggcccacgtgggtcccacttgccacatcagtgaaaaatgatcattacactgtcgacagaccaaagttaacacggtattatgaattagtgtatgggctatacctagtatttcagtgcatggacgaatttcagactcagatgacaaattaagggacctaaagtgaacttattcctacaaaattataacttccaaatgaatacttaaaagcttattattattattatggcgtggatgcacatggatacttatcattatacacgtgacgacatatatataacatatgcacacatccataaatatactcccaacacacacgaataggcggagaacaacaatacgtctctaatcttactaaaatacgtgtgtactccctataaattttaatgtataacgccattgaccttttgaccaatgtttgaccattcgtcttattcaaattttttgtgtaaatataaaaatatttatgttatgcttaaagaacatttgatgataaatcaagtcacaataaaataaatgataattacataaattttttaaataagacgaaatgtcaaacgtttatcaaaaagttaacgacgtcaaacattaaaatatggaggggataatatttaacaccatgtgataaatagttgagacaaaatatactttatacgattattactcaagtaaatcagtgcagagaccgccagactggtaaaaagtggtgacagtaatagattaatagtacttctagaagaaaccgcgatacttaaatatgagatctgagcaattagggtgtgtttggttgcccatattcccctagcctggctcatttctcgcatccaggctgagtttgacctggctaagagtatacatatgcagttgtttggttggttgcattggtctagccaggctagcatgagattttgtttggttacttgtataagagatacggtttgaaagggattttgtttggttggttgcatggatgtgagtgttctttacctcttcatttagttgggtgaggttacctctacaatatatataacaaataataagagtattttgatttatccaattgaatattcacttacatatgcgaatgatactgcaaaatcactctattatctacataaaataagtcggccaacttttcacaccgaatcagtggtacgaaaaataagaaaaaggttatctattatattattaaaggaatagaaaaatgagcctccacgttcgctctcatggcctagaaattctcacattaatcggagaaaaagaaaaagcagagtccatgtagaaatacaatttagaaaatagctgaaatttggaattaaaaaaaataagaaatattagaagaggagactagagtccatatagaaatacaatttagaaatagttgaaattcggaattaaaaaataaggaatattagaagaggagactagagtccatatagaaatacaatttagaaatagttaaaattcggaattaaaaaataaggaatattagaagagaagactagagtccatatagaaaaacaattaggaaataactgaaattcggaattaaaaaaataagaaatattagaagtagagtatagagatacaatttacaaaaaattcggaattaaaaaaaagaattattaaaagacgagtctagagtaggaatatatataatttacaaataactaaaactcgatattaaaaataattaataactaacacgtatataaaataccatatgaatattacacatttgtagtttcgtaaagttattgtaaaatttaaaattatgatgttattttaatatatttgaataatataataagaaaacatatatgctattatatgagagaaaatataatgatgctagcgcgcaatctgtgcatgccactatgctaggttttctttaagctagatgaaccggtggaactaattaatctattagtagtaattctgcatacattgacttctctgttgctggagtacttgctagtgagaaacgaaagaaaaagaaaacagaaaacccggggagaaaaaagaaacgaaagagagaaaggaaggggatcggcgttgcagccgtcgcttcgtcgtcatcaactcccgtccgcccgcagccgcatgcatgcccacctgcccgccgctcgccgttcctccacccatcttcctgcgctcctctccatccgccgcttgccgctcctctgctccagatctgaccggcacagaagaaggtgggatacgacggtggccgacgattgaagatgggatacgatgggaagaggagggatgcggcagcaaggtggatccgccgtcctcgtcgccgcgacctccgctgagctcgtcaccgtcaagctttttgccgcctcaccactagttggatctggcagtgctcacaccatcagcggggacgtgtgggcaaggcggtggccggatattgaaggtgggagacggtgggaagaggagggggatgcagcagcaagttggattcgtcgggcgccactccctctagcagagctcgtcttcgccatgtcgattgctgggggaaaatgaggaggagcaaggggcggagtggtgaccccatcgcttgcccttgcacacgcgggtgcggggcgctgcatgcgcggatgcagcgcgttgcatcgtgcgggcctggccgagcagcgaagctcaacttgagcgtttctgctcagcctggctgtgggggattttttgcatccgctcgaccaggctgggagcgagctgcaggcaaccaaacagcgacctactgcatccacgcgtgcgagccaggtttcatgcatgcaaccaaacacacccttaatctctccctccatgcatcacagtcacacacaccgcgagctccgagctccgtgctccatggatccgtcacctcggccgtcgccgcacgtcgtcctcgtagccagcccatgcgccggccacgtcatgcccatggccgagctggcgcggcgcctcgtcgcgttccacggctgcgccgccacgctcgtcacgttctccggcctcgccgcgtccctggacgcgcactccgccgcggtgctcgcgtccctcccggcgtcctccgtcgccgccgtcaccctcccggaggtcacgctcgacgacgtccccgccgacgccaacttcggtaccctgatcttcgagctcgtccgccgctcgctgccgaacctccggcagtttctgcgctccatcggcggcggcgtcgcggcgctagtgtcggacttcttctgcggcgtggtgctcgacctcgccgtggagctcggcgtccccggctacgtcttcgtcccctctaatactgcgtcgttggcattcatgcgccgcttcgtcgaggtccacgacggcgcggcccccggcgagtaccgtgacctcccggaccccctccgtctcgctggggacgtgacgatccgcgtcgccgacatgccggacggatacctcgacaggtccaaccccgtgttttggcagctcctcgaagaggtgcggcgataccggcgagcagatggattcttggtgaacagcttcgccgagatggagtcaaccatcgtggaagaattcaagacggcggcggagcaaggcgcgttcccgccggtgtacccggtggggccgttcgtccggccatgctccgacgaggccggcgagttggcgtgcttggagtggctggatcgccagccggcagggtcggtagtgttcgtctccttcgggagcgccggcatgctgtccgttgagcagacgcgcgagctcgccgccgggctggagatgagcggccacggattcctctgggtcgtgcgcatgccgagccacgacggcgagtcctacgacttcgcaacggaccaccgcaacgacgacgaggaagaccgcgacggcggcggccatgacgatgacccgctggcgtggcttcccgacgggttcttggagaggacgagcggccggggcctcgccgtcgcgtcgtgggcgccgcaggtgcgcgtgctgtcgcacccggcgacggcggcgttcgtgtcgcactgcgggtggaactcggcgctggagagcgtgtccgccggcgtgccgatggtgccgtggccgctgtacgcggagcagaaggtgaacgcggtcatcctgacggaggtggccggggttgcgctacgcccggcggcggcgcgcggcggcgtcgacggggtggtgacacgagaggaggtcgcggcggcggtggaggagctcatggatccaggcgagaaggggagcgctgcgcgtcgccgggcgagggagatgcaggcggcggcggcgagggcgcggtcaccaggcggggcgtcgcaccgcgagctcgacgaggtggccggcaagtggaagcagacaaaccgtgctccatacgaataatgctgtttagtttggcaaatttcgttgttcgtaaacgaattcggctcaaatttggttggtgatcactactgacttttggtgatcactgcattgctatctcgaaaggaaacctcaaatgcttcatttctctcttcttttttttttttgaatggaaatgcttcatttcttttggaatctgatcccatcgtcctgaacacagattaaagaattgtaagcatatttcatgtaagctgattctcctgcccctatacctagtttatgtacgtacccaaacttgcacaacatacaaaactgtttgctggtgttatgcgtgcaactttctttcatcgcctagggtgtaaaaactttaaagtatacggacacacatttaaggtattaaacatatactaataacagaataaattacagattctgactataaattatgagatgaatttattaagcctaattaatctgtcattagcaaatatttactgtaagcatcatattgtcaaatcatggtgtaattaattaggctcaaaagattcatctcgcaatttacatgcaaactgtgtaattggttttttccccacatttaatgctctatacatgtgttcaaacaattgatgtgacgttttcggccaaaattttttgggatctaaacaaggccctaggccatgttttttttctcctagtagtacgtgcacatggatttatagattttgtacagtctagttcatattctatttttcttaggtttagattcaggccgtgtttagatccagcggtaaaaagttttgacgtgccacattagatatacggagacacaattaaagtattaaacgtagactaataacaaaataaattacagattccgtctataaaccacaagacgaatttattaaacctaattaatctgtcactagcaaatgtttactatcactactacacaaaacattttcatggacgccggacctgtttgtttccaggcaggccataattggcactgcacgagataatcaggggaccggcgccagaccgtcgcccgcacggaaaaacgcattatcccgtgcgggccactttactcaaccgcacacgaaaatgtcgtgctggcctctttactcaccccgcacgcgaaaacaatcctcatgccaacttgctacacgactgccactttaactctcccactcattctctcctcccactccactccttctctcctcccggcctctcatcctctcctcacagcagcgacagcggcggcgtgcggtccctccctccctctcccttcggctcccttcccctctcctccctccgcttgcagatccggcgaagggaaggcatggggacggcggatccggcggcaggcgcaggtggaggcggcaggtgacgacggcgcctcgcggtccctccctccctctcccttcggctcccctccctccccttgcaaatccggctgaggggaggcatgggggcggcagatctggcggcgggtgacaacagtggcgcgcggcccctccctccctctcccttcggctcccctccctccccttgcagatccggtggaggggaggcatgggggcggcggatccggcggtcggcgtaggtggaggtgacagcggcggcggcaggcgacgacggcggtgcagaaagagagggagacgccgatgagggagggggtggggaggccggcgagctttctcgaccttctcggtggatagagtaggccggcggagctcacccgccgctgcttcactcctcctgcagccacctccgctgttgctgccccctccaccgctcaccgccagctccgctctactggctttctccgccctatgccgctgcgccctatgccgctagtagcctcccaagtttactaaagaagagaagagaagaaaggataagagaagaaagaaaagagaaaagaagatttgctgaccccacatttttccttctcacttatatgtgggctccataacttttttttctgactaggatgccacatcagcgtagccagatatccatactgctataggacccaaattgcatggttttgtatagtttagggggtgaagatttctagtattggggattagggatgtcatgcgaacttgatgtaaagttgagggacggctggtgaacttattccaaagaaggcctaggagggagggaagagaagaggacttcgatggcgggccaaaagtgaaagagagagctttgggcaggattcgccccaaaaagatggagatgattaattttagttttatcattttaattaaccctgaaattggttgttgttgatttaaaattataggttgctctgaaaatttcagtaaaaattgagggaccaatttagagcatggagaatttaagaaaaatacaccaagccactttgaatttttggatgtattttagtatttgaaatttatttgagacttttattaatttctattattccttttagaaagtgacttttaatttgggatggatctatcaggtgtgacataacgataagagagctccaaattaatttcaagacccaaattaatctcgcgttagatgttttctttcaccttcgagtagacaaagagctctctctgtgtgttccatcttcctttggttttggttctccctgagcagacttgtgtccgttcttctgtttttgcgctgattcagttgttcctcgatcctgaatacttgcacgcatgagtatttgggataagcatgcctccggaacgccatccaccaccagagtacctgcactggtagacatgcggttaagtttgtatcatttgtttcaacatataataagtaaagctaaacatatgtacttctagcttgttgatgtgtaacataagcatggttatatacaagctagtgatgttctcatcagtttggatatttataaaaaacagcaataatgcacacgctcacatatacacatacacttacgtaataatataaatacacacacatacactcattaatacgaatgcacatgcgtatatactctaacccatacggtccaatatatgccttattacacatcactctctagtctctacttgcatggaagcacgctttatctaccaaccagcttgttcagtatgccaccatatatagattatggcacacatatcctccataaatcatcattttagtatatatttgctttctattcttgtatgtcataatgtcattcatcaaacttgtagcttgacaatgtacgtatatatagagggagagatatgagatatgatgaatcgaatttgaagatgctcggcatacccggagcatgtctaggcaagctgttgtccggcctggacatttctataattactaaaacttgaaaaaaaaatccaggaagatattaggcatttgtcattttgccccctatgttcaatttttgtgggttgttagtttataaaaatatgcatagtttatcaagatgggactgtaatctc

SEQ ID NO: 24413 - DNA, 621 bp, Oryza sativa
acccccatcggcgccacggcgactcccgcggcgctgcacgtcgccgcacatgagcaccgaccccaagaaacacaaggggttcgacgcgtgtcgcgcgcgcatactgtggacgaagatcttgaggagtcggcgaaatgtaagccgtctgggaggtctccttgattggggagtcgggcccgaggaaggcggcggccgccagtggtggcggtggcttcttcgtacgcgctccgctctgctttgcttctgctgctccgctcgcaggtggggaacccttgcccaccaccgccgcccgctccaactcccacccaccgtcgccgcccagaccgccgattgcgccatgagagataaaagagagaagggagagatggaggaggaaggagaagagagaggggatgatatgtgggctccacatgtcagtgggccataatattttttaatgtgtgcatcacagataggtcccacagatgaatttttaattctactgccacgtaagcgccacgtgggatgaagactaggtcagcatcgccacgtcagcgccacatcagcaaaaccgctctccaaaaccactaagggagtcaacttgcactggtttcaatagttcgaggagtcgtcctatccggt

SEQ ID NO: 24414 - DNA, 740 bp, Oryza sativa
cgccttaacatagcagttggcgccagttatattctcctactcctccagcctcccagatcatcccaccagtggcgaagagagaataaggagagaaacatctagagtgaataagaaagatggggttcgtccgtgccctgttcctgctggcgatggtgtgcgtggcggcgcacgcgaaggactaccccaaggaggagggcgcgaaggcggaggggccggccgccgcctcggggggcggcggcggtagcacccacgacgtggtgaagctgggcggcaagggcgacggcaagacggacagcaccaaggcggtcaacgaggcgtggacggcggcgtgcgctggcaccggcaagcagacgatcgtcgtccccaagggcgacttcttgacgggtcccctcaacttcaccgggccatgcaagggcgacatcgtcatccagctcgacggaaacctgctcggctccaccgacctcgccttattcaagtcgaactggatcgagatcatgcgcctcgaaagcctcgaaatcagcggcaagggcaagctcgacggccagggcgccgccgtctggagcaagaactcctgcgccaagaaatacgactgcaagatcctccccaacgtatgcatgcatgctttcctgtgatcgatccatcgagacatacacattaattatttatttgatcgaccatttggtatgatccatggatataaatatatgtgcagactttggtgctggacttcgtgaacaacg

SEQ ID NO: 24415 - DNA, 733 bp, Oryza sativa
catccccctgtggagattatgggtaccccatacccacacggcatggttatccgactagttataggggataacttatatatatggaatatgtaacagatcatgacttgggtattacgtttccttatatattacggaacagcctaaagtcctagtttgataatattgtaaagtagatttaggaaaccgataccgtattggttaaggtttctatcttgtaatcctgccccccaccctatataaggtgggcaggaggccctctagggggcatgagacaacctgatcgtcagatctatactacacccggcggattcaaatccccaaacaggagtagggtattacctctcattgagagggcctgaacctgtctaaatcctttgtccctgcatccatccactttaggtctcgtgcgctacccccttttattattgccgaattcatgttttgacagttggcgcgccaggtaggggttgcgtcgagtttcctatcaacgagcgcgatggaatcaatttcatgagtcgccgacttcgctttcgctttgggagttttcacttcctttccgtcgaccacttcttcaagctcctcttctctgacttgatccaaatcagtcagggggaaactcaatctgatttttatcattatttatcatactgatttttaatctcagattaatttcttgctattttttgttgttgttcgcatataactacgcggcactattgaggcgattgatgct

SEQ ID NO: 24416 - DNA, 709 bp, Oryza sativa
ctgcaccccgtccgtggatatggccatgcccgacgtgaccttcacaaggagtatagttcattaattactaatcaacatatatatgtaacaaatttcgcatttcgcataccttgatagacaagttcctgaatggagtatgcatatcgcagggtgttcgctgcgtgatatcaccaacggggaagtgggttgcttcgtgagctgccactgcctcaatgccctctgatccaacttggcccgttgatgcgcagctgctgcggttgcccgaggggctcaccatgacgggcgcttgtgtttccattccgcgctgctcggccaggcgttggtccacctgtcttgtcacctcctcttgcatccttgcctcgtaggtggacaccctgtactcaagatcgacgatcttagcttctgtatccctcttgctcctcatccaactcctatacgtgtggatgtcctctttgaatccatatttccaaggaatgacgccttttcctcgcattcgtcctagatgctcaggattctgtagtgcgagggtgagctcgtccttctctgtcgggccggaaagtcccctgcgtagaggcttcaattgcatccgcaagtcggcgtgctgcatctcgaatctcatcgccgaatatgagggagccatcacctggattgagcgatccaccgtgtgcatagaaccagttcctcgatcgctcaggccaattagccgtgg

SEQ ID NO: 24417 - DNA, 597 bp, Oryza sativa
ttgtctttcacaacccacccacaatgattcacaaactttcgtcctatacccgtcggggctactggttcgccgtctggggcaatctcagtaacgatgtgccttccctcaagcttcatcgcgggacctcttttcccacgtggcctcttctgtccggccgacggttgactatcaatcccctcctcggtcccctcctagttagcctcctggttaccctcatcgttgccctcctcgttcaggtattggttgggatcctcgttcccctcatcatccacccagtactgactgctgccatctgcgatcgtgtctaacaggatttgttcgtcatcgcggtctgccatctatgcgtgcaaagaaaaaaagacagtgaggtcatggacatcaacatgtacagctcagacgtctaaaccctacaagtatacatgtataattcgctaagtcgttgttctcgttaagtcgttaagtcgctaagtcgtcgttctcgctaagtcactaactcgctaagacgctaagtcgttgtccgtcaaagtcgctaagtcgtcgttcgtgaaagtcgctaagtcgctaagtcgtcgttcgtgaaagtcgctaagtcgtcat

SEQ ID NO: 24418 - DNA, 831 bp, Oryza sativa
actctcgtcgacaactcttggaacattgaacatcttcgtcgtttctatgcttaagcttatcattgtggttcccttatcttgactggcaacatcaaattttcttcttgccgttgtcaatccggggctatcatcataataatggagtgtgattttttatcaatttaatttgcttacttggtctatcattgccttgtttgattttttctacttagtctgcgaggactgaaagtttttaatagcttctttgggttttaggctcaacaaagcttgataaaagcttttaagaaatcaaagacttggctagaactatcaagcacagcataaatacaccagtattgtacaaattgagcctccatttgctacatttacactcagtcagaatcaatcctttcatcatcagagttattattgctcggctgaaggtcgttgttgcggaattgctctacaacatcacttgcaatcttgtcagccgcactttgagcattactgataagatcaagagcagcttcttcacttgtcccgtctgcaaagccatcaatggtatcaatttcgattctcgggtacaaggatttggtcattgccaatgccatgctagctcccatacttccagctttcttgatgttcttgaagtacacatccggtgcaactcttagcttgtcaaagatctcggttgcatcaagtgcactcggaccactgttattaagaaacatagcttggacaagtggtgtagcgacattggcgacttcgtctcttgctccttcaagcttcttgatcttaccaaccaggacatcaaactgagcttgagatttgattttacggtctacaaaacac

SEQ ID NO: 24419 - DNA, 703 bp, Oryza sativa
gtagctgacgacgatggcatttgagaagattttatacattctctccttcatgattttgaaatccagagagtctggttcttcgcgattaggatcatgcttgccgtcaaactcaaaagctgtatgggatctttctttaattggcgccagtcggcatttgatgaaatgccgagtgatctgctctccttgcaagccttgttctttgagttttaacatgcgatccaacaattccaaggcttgggcagcttcatctccgattggaagagagttccaagtgtcttggtacaccggaggaagacaagaatactcgggaagagcaggctcaggattctgaacataaaaccagttcgcatgccaccctttgtttgaggtcttgaagggcatagagaagtacttctgactcagagttcccctcaactgaaatcctgcccctccgactacacatggcttattcttgttcggttggggcttgagaaagaagatccggcgaaacagagcgaagtggggcctaattcccaaaaaggcttcacagacatggatgaaattggcaatgtggactatggaattcgggtttaggtgatgcaagctgattccatagaagcttaatatcccgcggaaaaatttcgaggtcggaagagcgaagccgccatagaagaaatgagagaagaccacaatctcgtgtgtatcgggggtcgacaaaatctca

SEQ ID NO: 24420 - DNA, 1125 bp, Oryza sativa
ttatgtcatgtatgctccatctagtttgagataatgtgattgaaagagtcttgaagattgtatatgtcacctagagggatgaataggtatttccaaaaatttcttaaacttacaaacagcttagaactaactggatagtccggtaccactgcagacaatctgactatagagcagtcggatagtccgactgcatcagaacaatccaatcagagcatcgccagagaaaaactataagtgacctggaaaatagaaatagaaatgaaaaaataatggtggtggtggcaggatgtagcgtgggttgatcgtttagaagcacgaaagctccttgaggcagccggtggcagtgcccttggcattcttgcagacggccatggtcttgttgtttgtgccagagtactcgaccttgatgtcattcaaagtgacgccggtgcacggcagcttgtctgagcagaagaggctaacggcctcgggcgtggaggaggtgccggtgatgttcttgaagtgatgtccttgatggtgaccttggagttgccgttggcagtgcagatcttgttggggcagtacttcatgtcgatgatgatggggttagcaacgtcctccatcttgatgttctcgtaggtaaacttggaggtggtgagcaccgaggcggcgtcctcataggacttgatccggacgccattggtagacttcttgagcacgcagtttttgacggtaacatcggtcacatccttctcgtccttgtacctgcccaggctaccgacgctgatgccgtggccaggaccgcaggtgacgccggagatgttgacgccctcggtgccggggccgatggagatgcaatcatcgccggtgccgatgaccgtgtcaatgatgctgatcttggaggagtcgcccatgtggatgccgtccgtgttcgggctgtcccccggcgcggtgatggtcacgtccttgatggtgatgttcttactcttgaacacgttcatgtggaagaacttggggttcaccagagagatgccgctgatgagaccgttgttcacgaagtccagcaccaaagtctgcacatatatttatatccatggatcataccaaatggtcgatcaaataaataattaatgtgtatgtctcgat

SEQ ID NO: 24421 - DNA, 727 bp, Oryza sativa
  unsure (1)..(727): unsure at all n locations
aagaacaaagcacgtcgaggaagaaggacgacgacgacaccccggcaggttttcaagatcaccgcaaggagctcaaccatatcttcggcggccccctggcttatgagtctaaacggaagcagaagttaactgaacgggagatcaatgctgttcagcccgacacgccccaatatcttcgatggtcagagatcgcaatcaagtttgaccgctcggatcatcctgaccgagtggtccacccggggcggtaccccctggtactagacccagtggtccgtaatgtcaagcttcgcagaaccctcatcgacggtggcagtgcactcaatatcctcttcgccaagaccctggatgatatgcagatccctcgctccgagttaaaaccaagcaatgcgccttttcacggagtgattccaggattatccgcaactccactcggccagatcaccctcccagtcacttttggcactcgggaaaactttcgcacagagaacatcagctntgaagtcgctgatttcgagacagcataccatgccatactcggacgcccggcgttagccaagttcatggccgtcccgcactacacttatatgatgatgaagatgcctggtccccgaggagtcctatccctacggagtgacatcaagcaagccgtcacatgcgacaaggagagttgcgacatggcccaaactcgcgagatggcgtctgcccgagaggatatccgactggctgc

SEQ ID NO: 24422 - DNA, 671 bp, Oryza sativa
tccgaataatacttagcaccttgcgttactcggtccatccaacgagcccccgggtgctaggaatcggcccaaaggcaaccatccattggcaaaccaaacggaaagcataggaagatagaactccataactcgataggtacttttgtactcagattatgtcgcaagcaatcaagataaatattataaaaaatatgatataacatctgtagcccccgactcactactcaatggaagaccaattggtgtagtgaggcagaggaaaaggaaaaatatcatataaagaataaaataaatgatgacttagctttgtaatattccccttggtgatggcagaagtggccaatgtgggaacaaagtcgtccatcaataacaatgaagacaccagtcggcggcgacgaaggcggtcgacggtgaaagcgaagatgcccactaatggcggcataataggtcagccgtgtaagcggaaacaccagtcgacggcagcgaaggtgagccaacggtgaggatgtagacatccaacaacggcggcataataggccagccgtgtaggcggaggcaccactcggcggcgacggaggcaagccggcggtgaagtcgtagacgcccaacagcggcggcataataggccagccgtgtagccggaggcaccactcggcggcgacggaggcagg

SEQ ID NO: 24423 - DNA, 635 bp, Oryza sativa
atgggttgccaccaaagtctttaagcaccatgtttgtcttgatgagatcctcagtagttctacctaactttctgaacgtagtataaggcatcaaatttaccgcagccccaccatcgaccatcatcttagacatcggcttcccattgacatagccatttatatacaatggtttaagatgccgattttctatcccctcaggcttttcaaagactgctcgttccggtgatagaaccaacttagccgattcctcttccagttcgtcaacatcggcctagtcaatcccgaattcggctggcaaagtaaagaccatgttaattggcgccgttaaaatacttttcccttttgccaacctctttgcttcgtcggctgcaatatcatcggctccaagaacttgattcttaacacgccactccttccttggctttgctttcctcagccgatgaccaatttcttgctcgacctcctgaaagcgctccctgctcctcaacctttgaacccttcttttctgattctttgtaaaaataccagaaggacaccactgagtcttcgcgttctcgtcttcctccaagtaatcattttgatttaccgggcccaacctttgatgaacgggaattctcgcctgcttcagccgattg

SEQ ID NO: 24424 - DNA, 3281 bp, Oryza sativa
aagtactcaggcttgtagcgcggcatctaagacaagtgaaaggagggaattaagtcatttatcccgttaatagcacaagtttttgggttaatttgaataaagttagaaaatcaaagtaaaaggtaaataaataaagtaaaccaagcttgcaagataagttgaaacagttggaaacaggatcacaaattttgcacttttgaacaacaggtttcaaaaaaaaaaaaagagggttataaaatcaacatgctaaatttatttcattgcagcaagattaaataaaacaatgttgtaaaacgctttgctggtaaatgggccattagtacagtaatagatgtacggtactgataacacaggaataataaataaattttaaatgagaacaattaaaggaattataaactgcatgtgccattagtttggtttaattaaaagagaaagggaggagaacagttctacttttccaatatttttagagggcttgtatgggtaaccatttggcataacctagggtcaaggaggctctgataccaacttgtcacgcccggaatttctatccaaaattccaaacgcttacatgtgtgaaccctcgtccaggaatcagccgaggcacacaataacaaattgataatagagtacaattattactctaattaataagcgaataaaatgtcattacagatgtagatagttcctctcaatcaataaagatctaagcagcggaaaaataagataaacggcgcagacgactccactccacaggcagcttgaccagggctacacctaatcctccacaccatcagcatcactgtagaactcctcctctgatgaatgattgcaaggtgagtatatgacatactcagcaagccacgcagcaaatatgcaagtgcacgggataacaaaggatggcataatatagtctcatttgcataaatagcatttaataaacatttcagaatttcataaaacagtaaagtatttcattaaacagtattaatccaacgctatacaacaaaccctgttgcataggcccaaccattgtgaacaaccaatcccggctgcacagttctatctccaaaccaggaatatatcattccaaaccaggagctaaacaaattattaacatcatcatttattatggtgtgaaatatgagactaatcacgaaagacattgttagacccgcccattaccgcgggcacagctattcgaatagtttaaactctggccagaggtgtaccactgtacccacaagacacaacctcaacatcatgtcaaccatgcgtcgcgatacttaacaagtacccgaatagagattgtgacaataccctctatataacacaattcaaagcagtgcaccattcccggatcataatcacccccttgcaaacaaggcatggactccccagcgacccccgtgggcttatcttcgccacttcacagtctggtgctctacaatgaaccatactatacagaaagtaaagccgttgcccacgctggcttgtggttggcacggtaaatgtttcacaaccgaaaatcgtgaaccggtccttaattgtcatgagcacgaccatcaataccatgtgctcacatcccaccattatcaggttttagttggcaaattaattaattaaccaatcatgattaaccatcatgagctatcattaagccatcattcaataatagtgaatcataagttatcccatttatatgagctagtgtctctaagcatggctaagcatcctattcactttagctaaaaccatataatgttctagctaatcaaattattaacaaagtgacaaagaatagggaaccaatagcaaaagggctataacaaggcaataggttctttccacccaatgacatttaaaaataaatgcagtagttgaatagaaacaatagctttaaacgggatcaacatgctcaaaggattgttttgggatctgtgtgacttgccttgctggccttggaactcttcaaaatcttctcctgcaaacacagactctccgggaacgtcggaatctaaacagaaaagagcaaaatcaccaaaacagcacataaacaagcatgaacagtacatgtggatatttttaacatgtagatctcaattttagaaaaatttagagacttgaaccaactaaatccgaactaagatgacttagttatgaattttcaaagattaaatcggattaaatcctttatatagattttaattgaattatgacgcaataaagaattatttttgaaaaggaaaagaggattattgcatcagcgggctcggctcacggaacgaacggccgagatctatcctatccacaacggacggccgggatctatcggcccacgaccggtccacgggacacagcgacgatgacgtcggcgatgacgtcaccaccggcggcgactcgggctcacatgctcgccggcgaacgacggcgcggcggctcaaacggaggacaccaacgggttgtgggcattgcggtgaactcaccggtgacctaaacgacggcggacgatgaccggacggcgacggcgtcgaggaagaagcggcggcgaccttcggcttgacgacaacagcggtgttccggtggtcttcggcaaaacggaggatgggacgaggatggcgatgacttggcgaacccgacggtggccttcccgagtgacgacgacgaccggagcggcggcggatcacggctagacaagcggcggcaacggcggcgcacgggctcacgaggctagggcgctacaggcggcggcgagctaaggcgagggtggcgacggatagaggaggtcccgggggtctttttatagtggctaggggcagcgatggaggcccaaggcaaccggcgacggaaaggaaaggttagggttcgagagagagagaggaatccgattcgagatcgaatccaccgctttccaaacgattttagccgacgattccaaaagagaaaagatagaggggatcccggggatcatttcccctctattgatttcaccggagaaggaaaggcgcggccgaatttggaaggagacggcggcgcggctcggctagggttcggccaggcgacggcgcaaggaagacgacggccttgacaggtgggccccacctgtcagcgggcggacgcgcacgcgcgagcggcggctcggctgcgggccgacttgggccggggaggagagagagagggttttgggccgactttcggcccaaatccaaaagagaatttttaaaacctttttcaatttaaattattcatgaaatgcaattccatttattaaaaatact

SEQ ID NO: 24425 - DNA, 1479 bp, Oryza sativa
gcgccttagcaaccgatacaccgtctccaatggtcgacgcgaacttgtggtgcgcgtcaacccggccacgagggcactcctcctgcaagcaattgaagaacaagcaagaacaagtagaacaagcactgaaattgctatataaagatgaaagtttcactatcaaatacaatatggtggggttccgattacaggcagacgagcggtttagccaacacgcgcgctgtgagccggtagcaagtagctatctctatcatcaaaacccgaatgttcttggcggcgactagaggtataagaagaggggaagaacgaccatagggtcgtgctccaaccctaggacgtgcccctaatgggcccaacttggatacacagcccattgggccaaaagaggtgacgcaacaccatggacagaaaacagtcgggagtaaaatgacaattgcggccgctccagaatagatatggacatgtggctggatccatttgaaagtagacttgataagctttccatgaaatacttgcacgcccaaatcggagttcgcttgaagtcgtggcggccgtcagaagttggcgctgccctgcagtccgaatccaccccgcgcgaatcctcttccctttggatcctctccatcgttcctgagtaaaacacaagtgcacgcgtctccggggtataaagacgaggcatatgaactcaagaaagaactcacctgataatttagttgacgtgcacgagcgcgggtaatagaaccatcatgttgtacatggggggacgtggatgtatcgatggtgttgatgtcctcatcatcctccccttcttgcatttgagtcgtcctcgactcatgctcatcttcttctcccaaatacggcttcaaatctgcaacgttaaatgtgggactaaccccgaaatctgcaggcaaatcaagcttatacgcattctcattaatctttgctaacactttaaatggtccatcagctctaggcatcaatttagactttcttaaatcaggaaatcgttcttttcgcaaatgcaaccaaaccaaatctctaggttcaaaattcaattcccttctacctttgtcaccagcaaacttatacttagcattcatgcgctctatgttttctttagttgtctcatgcagttttaacatcaactcagcacattgcttagcatcaaaattcagtttttcagaagatggtaaaggcatcaaatcaattggagcacgaggcaacaaaccatacacaatctgaaatgggcacatttttgtagtagaatgcaaggaacgattataagcaaattcaatatgaggcaagcattcttcccacatcttgatatttttcttcaaaacagccctaagcatagtagacaaggttctattcaccacttcagtttgtccatcagtttggggatgacaagtagtagaaaacaaaagtttagtccccaatttagcccacaaagttctccaaaaatggctaagaaattttgtg

SEQ ID NO: 24426 - DNA, 764 bp, Oryza sativa
cgacttcgtaggctgtggtggatgtgttggcggtaatattcgatgccctaggtcttgcccagggggtcccttttataccgctggtcagttgatctccaagtaggactcagagatatcggacccctcacaatatggtaaagactcagtctcgtccgagtaggactccttccacccgtggattctgtttctatcacgtgatagatttccttaacgcatataggatctatccgtatacgcgcgggtataccgtatcggtactcatcgtatatccaggatagatggtataccttatccgtaactctgacacagaccacagctaatccatggattatgaactggtttgcctccacacggaggggaatgcagaagctgcaggggcaaaacaggtgagctaaaacagcctaacaccaccatgcatcaatacatgcagcctactagcagacttgaaaatcccagaattttattagaaattactaaccaaaggttacagctactaaccagggattacaacattactaaaaattatagtgttactaataactacagattacaggctcaacacttcacatcttcagcaaagctacctaaacatgccattcaacaccatgaaaaataacagaacatcaacagttatttgtgtctccatctttagatcaccttctaagagaatcaaaattccttccaattctcagtcacactttcttgagaaggtaagcaaaataattaattatgatgatgcaaatggtggtttctgaaattcagag

SEQ ID NO: 24427 - DNA, 984 bp, Oryza sativa
catggctgacaacgaaacggaagaacagcgccgagcctaagaagcggaccaagatcgcgcacgacaagaagctgaacgtcgccgactggaggaagtgcgacagcgacagaagcgagaacgaatacagcgtgagcaacaagatcgcgaacgggttgcaaaggaggctgaagatcgacggcaacgcgctttggaatccgggtgacgagcgagagagttcattgggcaacaagacgtcgatggaacagcggtctttcgcaccccccagcagaacgcggttgcagcaatcactcttctcgacaccctcctcaaagaagacgcactcaaccaagctgatcatgtcgtcaacatcttgaaccagacgaagaccatgatcgctgcctcggttccagccaactccgcaagcacccgtaccccgactggtagccgagtccctcacctccgatctcatgatcatcatcagtcaaacctcagcatcaccggcacaggatctagtcgcaggagcaggggtcacgacgaacgatctattcactcgcctcccgaacgtcacagggagcgccgagtcgaacggcctcgctctccacctcaccagcgccccgtcgatcttcgcgacacaatcaactagcgccgtgcagcacgaggtcaccgccattcaccaaatcgctacgatgacgacgtggatggagtagctgccttcactaatgacctgcgtcgagtggattggccagtcggctttaagccgactggaatcgagaagtatgacggcaccactaatccagagtcttggctcaccgtctacggactcgcgatccacgcagcaggaggagacagcaaggccatggcaaactatctacttgtggccctagcggactccgcccgatcctgtctccacggactaccccgtggcacgatcggatcatgggtggaacttcgtgatcacttcatcgccaacttccagggcaccttcgaacgccccggaacacagtt

SEQ ID NO: 24428 - DNA, 645 bp, Oryza sativa
cgtcaggttttcgggactgatattctaagggaaaccagaaagagaaggtaaagatcattcaagaaagattgcgtgtggcttagtctcgtcaaaagagttatgccgacaatcgccgcagagatttgagttttgaagaaggagatcatgtgtaccttcgtgtcacgcctcttcgaggggttcatcgttttcataccaaaggaaaattggcaccgcgtttcgtgggaccttataagattgtcagtcgaagaggtgaggctgcttatcagttggagttacctcaatcgttggcaggagtccataatgtgttccatgtgtcacagttgaaaaagtgtttaagggtacccactgaggaagctaatcttgaacagatagaaatccaagaggatctgtcatatgttgagaaaccaatccgtattttggagacagatgagagaagaaccaggaatcgagttatccttttgtgtaaggtccaatggagtaatcactcggaagaagaagctacttggcaacgagaagatgaattaaagtcagcttatccgcatctgttcgccaattcttccgaatctcgagggcaagattctgtttaaggggggtaggtttgtcacaccctaaaaatcctaaatatataaattgttgtttaattgg

SEQ ID NO: 24429 - DNA, 1035 bp, Oryza sativa
atagacccatctgggaaagactctgacccgactaacatggacacgagttcttccaaagaaaccgggccaactgttggggatcacccgagtgacaatcagccggcaaccgataatgtagaatccagtgatcaacctccaactggaacccagtcggtcgaagctgaagccggagttaatcaggagcccccgactggaaaccagtcggacgcaaggtcaagccaagagactccagaagtcgaaacccaagcagatagccctcatggacaaaacgccagcaataaccagagatctggatctcctttaaaggcatccgaatccactcgtcctcgtccagaaatcattacgggtaaacacttttgtttgaaaccatgttgacccaaataaactctgatcaattgtctaacctttgttagcgaatacattaggaccaatgattagtgatgaagaagaaatcccccgtatacaagcagccgaagattcgtgccctcccattctggtcaagtggtgggatgataacttgcagcctcaaggaattgtaataaaccggcaaaaagaagacgaagaggtctgccaactgaaaaaggcactcaaccaagcgactcgcattgtaaatgtaagttctctggtacctgatctcaaccatcttgtttgccatttaattcatgcgctaattaaactgtcttgcagaggattcatctcaggaaggaagccaaaacggcaaccttagagaagttagtccctcatctcggaaccctcgaagccaccaggaatcaactgcacgaagcgaaagagcttgccaggaagaatgaacatgacctgagggatcggatcgctgagctccaggaatcaaattttgaactgagtggcacatcaaaaggtacgcacaaaccctgcttaactgactcatactgttatctttgcaatcttccgtaatcaatgtagtgcaagctgccaagatatctcagttggagaagcagattcaaattctggaaaatgacaaggcagagctggcaagacaaagagacctggctttaa

SEQ ID NO: 24430 - DNA, 5212 bp, Oryza sativa
cctatatacatttctatatatatatatatatattatatgtatatatatatatatatatgtatatatatatatgtatatatatatatatatatacatatatgtatatatatatatatatacatatacatatatgtatatatatacatatacatatatgtatatacatacatacatatatgtatatatatacatatacatatatgtatatacatactacatatatgtatatatatacatacatatatatatatacatatatatatacatacacatatatatatatgtatgtatgtatatatgtatgtatgtatatacaaatatgtgtgcacttaagtaattagaggccatatgcatatatatattaacaaaatatgagtttgcaagtaagtaaatatacatatatattaccaaaccaagtacacaaaagtaaatgcatgtgtgcatatatgaatacatagatatatatattacaattcgttcggacgttgtaatatttgtttctgctactacgacttggtgacatcggaagaagaaggaccggctttatgaatagttgatccatcgtaatagaattctcctgtgggatggagaatatgcttgttgatgaatcccattatctgttcttgaacagcccttatgaaatcatcgtgggtggtgttatctatcaggtaaatcatatgttatttggaaaaaaaatgggattatatatatgaaaccagtaagcaataattgacggaagaataaatttacgtacttcaaggtcctggccagtcctgatttggtgtgctaagcagtgcatgtaatggcatacgtagtagccgcacaagttagtccccttttcctgctttgcacactgaaagagaaacaacgagagatttagtatgcatatctgatttagaacaaagaagtgattcaatacaaaattggagctagcatgtaccaaccggaaaattgaacctccgggtgagtttttcattccagatcccgcggaccaatgtacggaaccgaatccatgctctatttagagttgttaggaaggattaatttattatccgagatctagtagttatacaatgattcataatgacagtgcaatatatgacaatacctatctatcacttcaaaaatctttgcgaaagttttctccggtttatccactgaatcgtagacatgaactttggatttctcaaggtcgaaaagaagaaggacccaatggaatctgcaatttgcattacatgatacatagtatgattgtaggaactttgtaggaacaaaattgaaggaacaaaattgaagttaattatgattgtaggaactcacgatgtgttgtagggaagaagtatgaacctcttataatgctgctgcaccaggaaatggacgatattgtcctcggtttgtttctcgtattgttgtatcatcagcgtgttcactttgcgtgggtccatgaattcagtattgaatttgttgtgttgacggcacaactgaatctccattctacaacggggaaaaggaatgtgtgtgagcaacgttcaaaggaggaacaaaattgaactataaacagtacttacaaagtccacgcgctgagaatagagacgtcgagggccttcaggtggtataagtcgaagacttctttgtagcggatccaaataacatcttctccttggtaataatctgagtttcgcaccctagctccgaacatctatctacccatcactgatttgtccatgtaccattgatggaaccggtacatctgtgtaggtagctctctgatcttatcaggcatgactagcggttcaccgagtttaaacgtgtacatgactggagccgtttcgataggtgcatcctctagcaactgctccatactcagtcccgtatctttcaagaagttgcatatctctagttgtgccggttctacgactaacgcttcaacctcttgtcgtggctgttgccccagctgagggacttcctttccgcacttcactgctaaaggcttggctttaagagccttcctcaatgttcgatcatagtcagaaacttcgaccggtttgcccggttcggccatcttaataaagtgatcctgaacctccggggctatagggatcttcttttccggactacgtggcttcaactgctccctaacttccgctctaacggcttcatcgagctcctccggagtcaagtcgtacgcccttttcttgagagcggggagccatggctcgtcagatctggctttcttcttcgaccttgatggtgcgggttcatatgggcgggaccttgacagtgtagacttggcagcaagtgcacgtggaggagtagttgcccgcgagcccgacggtgcagacttggcagctggtgcacgcggaggaggtggtggtgcaggggaaggagccagaggagactgacgaggcggtgatggcggaggagactgtgcttgcggcggggaaggaggagcgggcggccgttcttgcccgggaaacacgatgtacttcttacgccagagtatgatggcgtgggctatgtctccaagtttcttctccccgtctcctccggggatgtcaagctcgagatcctcgtaggttcgttccactagctctatctcgaccttcgcatatccatgtggaatgggcctgcaatggtatgtactcgaagggtccgtggatatggccatgcccgacgtgaccttcacaagaagtatagttcattaattactaatcaacatatatatgtaacaaatttcgcatttcgcataccttgatagacaagttcctgaatggagtatgcatatcgcagggtgttcgctgcgtgatatcaccaacggggaagtgggttgcttcgtgagctgccactgcctcaatgccctctgatccaacttggcccgttgatgcgcagctgctgcggttgcccgaggggctcaccatgacgggcgcttgtgtttccattccgcgctgctcggccaggcgttggtccacctgtcttgtcacctcctcttgcatccttgcctcgtaggtggacaccctgtactcaagatcgacgatcttagcttctgtatccctcttgctcctcatccaactcctatacgtgtggatgtcctctttgaatccatatttccaaggaatgacgccttttcctcgcattcgtcctagatgctcaggattctgtagtgcgagggtgagctcgtccttctctgtcgggccggaaagtcccctgcgtagaggcttcaattgcatccgcaagtcggcgtgctgcatctcgaatctcatcgccgaatatgagggagccatcacctggattgagcgatccaccgtgtgcatagaaccagttcctcgatcgctcaggccaattagccgtggccggctcgataccccttgctatcaagtcagcttccaacttgtcccacttggggattgcctttgcatatccgcctgacccaagccggtgatggtatttcttcttagctgcattggctttgttcttttctatctgtgcttgcccttgcgctccagtcttgtatgccacaaacgcatcccagtgatccctaaacttgttatgcacgttgaaattaggtatcaagcccttgaggatgtatctcttgtacagatctgatttgtagctctggaatagttctgccattttcttcagggtccattctttgcatctgggacgatctgcctcagggatcgtgaatgtctccagcatggtggtccacaacatgtccttctctgtgtcagggagaaagctatcttcatccccgcgtgacctagttcgacgccagtatactatgctgatggggacgttgtctctcacgacccaaccacaatgattcacaaactttcgtcctatacccgtcggggctactggttcgccgtctggggcaatctcagtaacgatgtgccttccctcaagcttcatcgcgggacctcttttcccacgtggcctcttctgtccggccgacggttgactatcaatcccctcctcggtcccctcctagttagcctcctggttaccctcatcgttgccctcctcgttcaggtattggttgggatcctcgttcccctcatcatccacccagtactgactgctgccatctgcgatcgtgtctaacaggatttgttcgtcatcgcggtctgccatctatgcgtgcaaagaaaaaaagacagtgaggtcatggacatcaacatgtacagctcagacgtctaaaccctacaagtatacatgtataattcgctaagtcgttgttctcgttaagtcgttaagtcgctaagtcgtcgttctcgctaagtcactaactcgctaagacgctaagtcgttgtccgtcaaagtcgctaagtcgtcgttcgtgaaagtcgctaagtcgctaagtcgtcgttcgtgaaagtcgctaagtcgtcattcgtgaaagtcgctaagtcgctaagtcattgtctgtcaaagtcgctaagtcgtcattcgtgaaagtcgtttagtcactaatacgtcgttctcgctaagtcgctaagtcgctaagacgtcgttctcgctaagtcgctaagtcgtcgttcgtgaaagtcgttaagtcgctaagttgctaagacgtcgttctcgctaagtcgctaagtcactaagtcatcgttcgctaaaacgttctcgttcaaacgttccaccgtggagtcggcggtggagtcggcgcacggcggcggcggcggtggcggcggcggtggagtcggcgcgtggcggcggcggtggtggagtcggcggcagcggtggcggcggtggcggcggcggaggtggagtcggtgcgcggcggcggcggcggcggtggaggtggagtcggcgcgcggcggcggcggccggcggtggagtcggcgacgaagatgacggcgaggtcgatccggtcggccggcgcgtgtcaagatcgatcgagagagagagaatgcgagatcggaggcgcaagatttgcgcccctcaccttgagggaggcaacgctgccggttgcgttcgcgagggcagatgagcgcggcgagcacgacgacgatgacggcggaggcggcgacgacgtctggggcggtaatggcgcgggaggaagaagatcgatcgtggagaagtctaagtgtggtgcagggaagccgatgcagtggatatttatacccggtaatcttttgtcccggttcgtggcttcaaccgggactaaagatatctttagtcccggttggtagttacaaccgggagtaaagaa

SEQ ID NO: 24431 - DNA, 10752 bp, Oryza sativa
ccacaaaccgggacaaaagatgttttcccgctattccaaaatttgtattggtcccggatactgttaatagccaggactaaagatgtgtacacaaaaccgatttatggccttcttaaattgtcttacaagtcgaaataaataccaataaatccaatataattagcacatggccgatttatatggtttcaaagtccaaataaattccaaaatcgtacgtaatttacgtatggccgaattaaatgttttcaaaattttaataaatagaaataaacatgatatgcctaagtaaatggtctcaaagtataaataaatagaaataatcatttataattaacataaggccaatttaattatattcaaagtgtaaataaatagaaattatcatttataattaagatatggcctacttaattgttttcaaagtggaaataaataccaataatcagttataaataacatattgcctaattaattgtattcaaagtgtaaatcaatggaagtgaccatttataaatatcatatggttgaaaaatagtaatacattacaaattaagcagttgagaataatatattgatccaaattgttcgaccttcaatacaatacaaataatttacatcttccatcaaacaacctaggtcactgtcttcctcacgtactttctcctcactattgttccttcgctatgatcgttgcgtgagtacggcgtgtcctcctatgatagtatgatgctcgggtcaaccatcactgcaaacggaggttgcccctcaaacagatcgtaattttcgtcagtcttatcctcgactccaacgattttcctcttgcctgggagaacaacatggcgtcttggctcatcgggccctttccccttctttggtttgctatccatgtccttcacgtaaaaaacttgtattacatcattggctagaacgaatggttcatctgagtatcctaccttatttaagtcaaccgttgtcatcccgctgtcatcaatcgttacgcctccaccagtcagcctaacccattggcaccgaaacagagggaccttcaggggtccatactctagttcccaaatgttgtcgatgacaccgtaatatgtgctagttggaccatcgtgtcctatggcatcgatacgaacaccactgttctggttcgtgttctttttgtcttaggctcttgtgtaaaaagtgtatccattgatttcataaccttggaatgtagttaccgagccggagggtcccctagccaagaaggctagttgtcggtcagttgtctcgttacccaggaggtgttcttgcagccaagcggggaaagtatcaatatgatggcgtgtaatccaggcttcggacttgccactgttttctgagcgaacaatcgcaaggtgctcatcgatgtaaggagcaaccaacgaagattattgcaaaaccgtgaaatgtgttttacggaataaatcgttgtctacagtcataattgctctccttccaagtgtgccctttccccgtagtctcccctcatggattgattcgggtaccccgattggctcgaggtcttcaataaaatctacgcagaactcaatgacctcctctgttccataccccttcgcgatgcttgcttccggacgagaacggttacgaacgtacttctttagaacgcccatgtacctctcgaaaggaaacatgttgtgtaggtacataggaccgagaataccgatctcttttacaaggtggcacagaagatgcgtcattatattgaagaatgagggtggaaagatcaactcaaagctgacaaggcattgcaccacgtcatgctgaagggcggctaaactttctagatcgatgactttctgtgaaattgcgttcatgaaagcacaaagcttcgttattgttgcccgcacattatcaggaaggataccacgaattataacaggaagcagctgtgtcataagcacgtgacagtcatgagactttagttttgtgaacttcttatccttcgtgcttattattctctttacattcgaggagtatccggacggtaccttgatgctctctaggcattgaaacatactctccttctcttccttgcttagggtgtagctcgccggacttaagtaatggattcctttatcgttcggttccggatgaaggccctcgcgttgttccatatgcttgagatcattgcgtgcttcgagtgtatctttggacttcccatatacacctaagaagcccagcaggtttatgcaaaggttcttagtaaggtgcatcacgtcgattgcgtggcgaatgtccaagacctcccaatagggtacctcccaaaaaatagagtttttcttccacatcgctgcgtgaccatcttcgctctctataggttggctaccaggcccctttccagatactactttcagatccttcaccatttcgaacactgctttcccgttgcgatgtttaggcttagtacgatggtctgccttttgttcgaagtgcttgccttttttccgtacagggtggtttgcagcaaggaatcgacgatggcccatgtacacaaccttcctgcaatgcttcagataagtactttcagtttcatccaaacagtgagtgcaggcgttgtaccccttgtttgattgtccggataggttactaagcgcaggccaatcgttaattgtaacgaatagcaacgctcgtaggttaaattgctcctgcttgtcctcatcccacacggggacaccctctttcctccacagcactttcagatcttcaaccaatagtcttaggtacacatcaatgtcgttaccaggttgcttcgggccttgaataataatcggcatcatgatgtacttccacttcatgcatagccaagggggaagattgtagatgcacatggtgactggccaggtgctatggccactgctcatctctccaaatggattcattccatccgtgcttaaaccgaacctcacgtttcgtgcatcttcgccgaagtctttaaatgttctgttgatatttcgccactgcgacccgtcagcggggtgtctcagcatcccatcctatttacgttcttctgcgtgccaccgcatcattctagcatgtgatttgttcctgaaaaaccgcttcagccttggtattatagggaaataccacatcactttagcaggaattctcttcttcaaaggctgtccgtcaacttcacctagatcatctcgtcttatcttgtatcgtagtgctttgcaaatagggcatgcttctaggttttcgtactcactgcgatacaggatatagtcgttcggacgcgcgtgaatcttctgtacttccagacctagagggcagactatcttcttagcttcgtacgtactttcgggcaattcgttcccctccggaagaatgttctttacgagtttcaataactcgccgaatgccttgtcactcacaccatttttagccttccattgcaagaattctaggatggtactcaactttttgtagcccttctcgcaacctgggtacaacgttgttctgtggtccgctaacatgcgctccagtttctgcacctccttttcactttcgcagtcctcctgtaagtcccgcaatatttgaccaagttcatcagcaccggcattcccttcaacatccagctccgcctcgcccattgtgttttcttcaaatccgccatactgagcccagtctggaatgttctcatcttctacttcatcttcttccattgcaaccccaacctctccgtgcgaggtccaacaattgtagctacgcatgaacccccactgaaacaggtgggcatgaatagttcgtgtggtggaatactccttctggtttttgcacttgtcacatggacagcttataaaaccgttacgcttgttatcattagccccacccaaaaaataatgcacgccgtcaataaactctttcgaccaccaatccgcgtacatccattgccgatccatctatatgaaatacatataaatcgtaattatacaaaatccaagatttacaaggtaattacataataacacaataattgaatataattattcatacaattaatcattattattaaattcattgtacatatttttcatgttttaattacattataaacaaatatttaatatgtttttcttattttaatattaaattagcttagttttataatttcatacaaaattatatgtaattattcaaacaagtatttataatcttctttattccctacaaacactttctctctcatcatcttccatcacattttctagagggaaaaatatgtaaaaaaaaatagctccaaatgtagatgctaagcaaaacaaagagtaggatgaagttgctaaccttttgaagacctcaaatttgtatattaccaccaaaaaaatttacttaaaattttgacagcacctccctccctcaaagcttaattttgaagcaatggctcgggctggaggaggaagaaggggtatataaagctgtgcaactttagtcccggttggtaacaccaatcgggcataaagatctcaaatcactttagtcccggttggtaacacgaaccgagactaaagatcccaagccccccgacagaggtctgacatgccctgtcaggaggtgaaccgggactaaagatgatctttagtcctggttggtgttaccaaccgggactaaaaatcccttcgtcccgttgaagtaataaaccgggactaataagccactttagtcccggttcgttttggaaccgggactattgtggaaattggccgaccctccaaatacctcttctccagtagtgaatccaccatcggaaccactggtatacattgctaatagttgctattatgtcatgtatgctccatctagtttgagataatgtgattgaaagagtcttgaggattgtatatgtcacctagagggatgaataggtatttccaaaaatttcttaaacttacaaacagcttagaactaactggatagtccggtaccactgcagacaatctgactatagagcagtcggatagtccgactgcatcagaacaatccaatcagagcatcgccagagaaaaactataagtgacctggaaaatagaaatagaaatgaaaaaataatggtggtggtggcaggatgtagcgtgggttgatcgtttagaagcacgaaagctccttgaggcagccggtggcagtgcccttggcattcttgcagacggccatggtcttgttgtttgtgccagagtactcgaccttgatgtcattcaaggtgacgccggtgcacggcagcttgtcggagcagaggaggctaacggcctcgggcgtggaggaggtgccggtgatgttcttgaaggtgatgtccttgatggtgaccttggagttgcagttggcagtgcagatcttgttggggcagtacttcatgtcgatgatgatggggttagcaacgtcctccatcttgatgttctcgtaggtaaacttggaggcggtgagcaccgaggcggcgtcctcataggacttgatccggacgccattggtggacttcttgagcacgcagttcttgacggtgacgtcggtcacgtccttctcgtccttgtatctgcccaggctgccgacgctgatgccgtagccggggccgcaggtgacgccggagatgttgatgccctcggtgccggggccgatggagatgcagtcatcgccggtgccgatgaccgtgtcgatgatgctgatcttggaggagtcgcatatgtggatgtcgtccgtgttcgggctgtcctccggcgcggtgatggtcaagtccttgatggttatgttcttgcacttgaacatgttcatgtggaagaacttggggttcaccagagagatgccgctgacgagcccgttgttcacgaagtcgagcaccaaactctgcatatatatttatgtccatggatcataccaaatgagatcgatgcatgtctctatcatcaatacatgttgtgtagatgcatgcatacgttggggaggatcttgcagatgtatttcttggcacaggtgttcttgctccagacggcggcgccctggccgtcgatcttgcccttgccgctgaattcgaggttatcgacgcgcatgatctccatccagttcaccttgaacaaggcgaggtcggtggagccgagcaggttgccgtcgagctggatgacgatgtcacccttacatggcccggtgaagttgaagggacccgtcacgaagtcgcccttggggaagacgatcgtctgcttgccggtgccagcgcacgccgccgtccacgcctcgttgaccgccttggtgctgtccgtcttgccgtcgcccttgccgcccagcttcaccacgtcgtgggtgctaccgccgccgccccccgaggcggcggccggcccctccgccttcgcgccctcctccttggggtagtccttcgcgtgcgccgccacgcacaccatcgccagcaggaacagggcacggacgaaccccatctttcttattcactctagatgtttctctccttattctctcttcgccactggtgggatgatctgggaggctggaggagtaggagaatataactggcgccaactgctatgttaaggcgcgccaattttagcgttttgcttttgctcgtgccatcactaacctttggatagtggcccatgcgacgtaggtgcatgtgtgagtgttgtccctgcatgtcctgtgtatcctctttgccgttgacgaccacttgaacctttcttccccaattgccggccacacatacatattttaatttcgtttgttttggtcgctaactcgatcgatctcaggcaccgcatccgccgccgcagagacctccgaggacgccgtcacggtccctatgtattcaacgtggttcatcagctaatcacgtcgatgacaagttagatgatttattgaactgcagtactaagctaatttgttggtctaaattatagtacatgtttcatttgtatgtattttgtgggaaatttacgcgttgtatttgtccccaaatttgtgtcgttcatttcttcctaatttatttgtgtactatttatcttgtattggcgtttatgagtttgtgtctgcttcatgtttgaaagagttttttttaagttttctatcgaaacaagatttcggcaataataaaagggggtggctatcaagctaggaaagtggatgggtttggagacaaggaattttatacaggttcaggccttcttattcaagaagtaataccctactcctgtccggggatgattccgccgagtatgttattgattgtatgattgggaaaaaagaatcgtcccgagaggaacccggacccctccttatataggggaagggatccataatacaaagtacaatccatatcctaacggaatatgggattacagataaaatacaatcgtaaccgactaggatcccgtgtagtttcttgacatacaagtttagaatctaacccgagtcctcataaagatattctatctatatttggtaccgtatatccggctggaatataaccgccatgtagatatggggtaaccataatctccatagtagcccccgagaccttcgcagttgaccaaaatagtcttctcaaaacaaaaaacaataatccgagtgcttcaattcaacttgctccggcttgccgagtgctaaaagactgtgaagggcgaaaataaaacatggtgcatcgagtagatgcacctaattaggtgtagcccccgactatgtgattagttgaaaaactaaacatatagtcaagaaccgagtggttttatagcgaagcacgcatggtacttagtaaaatacccagccgactgcttctcaacttgaatacatcaaggacaaaaaatacaataagggccgagtgatgaacactcaaaaggtccaagaatagacatatttgataggaatccgagtaagaaactcttaaaatgattcaccaaacatgataaaaaaatcatggtaattaatgagtctaatagcctaggctgtgacccttaccataactaaaagaagcatataacatgctaaaagaatgactatgaataaaccagtcatctcaaatcaacccaaacagcttttgcagcctaataaagcttacaaaaacggtataacacctttctgtcaggcaccttttgtttgcatcgtgttaattttaaagaattagcaaaccgcattaaaaaggatttaatcagcattgggccacaacattgtgagcacaaattgccaaagcaaaaagtgcctaagtccctaaggatcacaacaggccatgctggaaataaaattgggctgaagtactgtacaggcccaggcccattagcactcccgataccctaacaaaacaccgaagtctaagcgacgcttcgtcttccccgccgagactctcgccatttccccattcctcgctacagtacaagactgcaccgacggagctagggttcatcaatccgctccaatccaccctcaaaaacttcacgaaatttctccccgcgtccaccgctccgattccccattcctctccagccatatctcaaactaaatcaaatcatccagttcacatttatggcgggagaaagagaaagcttcgagagtcagtgggcgccctccgatgtgacggaagacaatttgaaggagatggtggcgcacggcgttcttccagcgaaggagattatcgggtggcgaccggcattcggcgaagcattcccgactcccgatacgcatgaaatcgtggtatttgctcacttcttctatggcggattttctcttccaacctcgagatttttccggggcattctgaacttctacgggattagcttgcatcacttgaatccaaactctatagtacatattgccaattttattcacgcctgcgaagcttttctaggcattaggcctcatttcgccttgttccgccgcatcttcttcctcaagccccagccaaacaaaagcaaaccgtgcattgttgggggagctggtttccaactcagaggaaccttgagccaaaaatatttctccatgcccttcaaaacctcaaacaaaggctggcatgcaaactggttctatgttcagaatcctgagcccgcactccccgagtactgctgtcttcctccagtttaccaggacacatggaactcattgcctatgggagatgaagccgctcaggcagtggaattgatggaacgcatgctaaaactgaaggaacaaggtttgcaaggagaacagatcaccaggcactttatcaagtgtcggttagctccaatcaaagaaagatcccgcacagccttcgaattcgacggcaagcatgacccaaaccgtgaagatctagattctcttgacttcaaggtcatgaaggaaaggatgtataagatcttctcaaacgccatcggtgtcagctactcacacttgctgctagtcgtaccgttcaatgcgttcaaccctcctccaccggtaagcactcaaacatttcaaccttcctcaaaagtatgcttttactctctgttaagctaattgaaagttcgaaatatcatgcccaggaattcgctttgatgaaatcggatcctccaattgctcaacgccgatcacctcgccagcagactggtcaagcgagtggaggaccaaaaattcgatctgacgctcgaccaagtgctcccgatccagtcagccagtcagatactcgcaagaggaagctggttctaagtgacgatgaagccgatgatactaccaggaggcctgaagaccgagagacgaccaagaaactaccaaaacaggctactccaaggaagaaaacatccagtcgccctgtgccaaagatcaggaagtcttctaggtgcaactcatataacgatctctcttatattgatgcgcacccattgcggcaataatactgataatcaaatttgcaggaaactatctgatatagacccatctgggaaagactctgacccgactaacatggacacgagttcttccaaagaaaccgggccaactgttggggatcacccgagtgacaatcagccggcaaccgataatgtagaatccagtgatcaacctccaactggaacccagtcggtcgaagctgaagccggagttaatcaggagcccccgactggaaaccagtcggacgcaaggtcaagccaagagactccagaagtcgaaacccaagcagatagccctcatggacaaaacgccagcaataaccagagatctggatctcctttaaaggcatccgaatccactcgtcctcgtccagaaatcattacgggtaaacacttttgtttgaaaccatgttgacccaaataaactctgatcaattgtctaacctttgttagcgaatacattaggaccaatgattagtgatgaagaagaaatcccccgtatacaagcagccgaagattcgtgccctcccattctggtcaagtggtgggatgataacttgcagcctcaaggaattgtaataaaccggcaaaaagaagacgaagaggtctgccaactgaaaaaggcactcaaccaagcgactcgcattgtaaatgtaagttctctggtacctgatctcaaccatcttgtttgccatttaattcatgcgctaattaaactgtcttgcagaggattcatctcaggaaggaagccaaaacggcaaccttagagaagttagtccctcatctcggaaccctcgaagccaccaggaatcaactgcacgaagcgaaagagcttgccaggaagaatgaacatgacctgagggatcggatcgctgagctccagaaatcaaat

SEQ ID NO: 24432 - DNA, 5873 bp, Oryza sativa
caaagagacctggctttaaaggaagttgaaggtatcaacaatcaatacctcaaaagccattatcctccatatgctgacttattaatgtgaatctgttggtgcagaccgcaagatcaaatctcaagctcaattcgacgtcctagtcggcaagatcaaaaaacttgaaggagcccgggatgaggtcgctaacgctgctgccccaattgttcaagcgatgttcttcaataacaacggcccgagtgcacttgatgcttctgaaattttcgatgaccaggcatcttcatcatcatgtaggtgtagtgtgggatggccatgaacttggctagagccggtcgtccgagtatagcatgatatgctgtctcgaaatcagcgacttcgaaacaaacatttcctgtgcgaaaattctcccgagtgccgaaggtgactggaagagtgatctggccgagtggtgtagctgacaatcctgggataacaccatggaagggtgcattactcggctttaattccgtgcgaggaatctgcatatcgtccagggtcttagcgaaaaggatgttgagtgcgctgccaccatcgatgagagtccgtcggagcttgacattgcgaaccactgggtctagtaccagggggtaccgccccgggtggaccactcggtcgggatgatccgagcggtcgaacttaattgctgtctctgaccaccgatattggggcgtgttaggctgaaccgcattgatctcccgttctgttagcttctgttttctcttggactcataagtcaggggtccgccgaagatgtaattaagttctttgcgatgatcttgaaaaccagtcggggcatcgtcttcatcatctctcttctttgatgtgccttgatctccgtctgaaggtttacgtgcgttcttgacatattgttctgtgaactatttgtagacgaagcaatctttggccacgtggttggagttgggatgatgcggacattgggagttcattatcttgtcgaaggtgttgacgtggggacattgtcgggaagatggagaggtggtcgccacaagttcttcgggcttacacttgtgatccttgtggttgttacttccactcccccctgcagtcggcgtgtccttctttggcttccaagtggtgcccgactgtttggacgcggtgatatcatcttcggctttggcatactcgttggctttttcgaacatctgcttaaccgtcctgggaggtttacgtccgaacttgccgactaggtcctcgtggcgaatgcctttggtgaaggcggcgatgatgacgtcgtcggtgatgtcggagatcttgttgcgttgttcggagaagcgccggatgtaatctcgaaaggattctccagacttctgaacgacgttgtagagaccaaactgtgttccggggcgttcgaaggtgccctggaagttggcgatgaagtgatcacgaagttccacccatgatccgatcgtgccacggggtagtccgtggagacaggatcgggcggagtccgctagggccacaagtagatagtttgccatggccttgctgtctcctcctgctgcgtggatcgcgagtccgtagacggtgagccaagactctggattagtggtgccgtcatacttctcgattccagtcggcttaaagccgactggccaatccactcgacgcaggtcattagtgaaggcagctactccatccacgtcgtcatcgtagcgatttggtgaatggcggtgacctcgtgctgcacggcgctagttgattgtgtcgcgaagatcgacggggcgctggtgaggtggagagcgaggccgttcgactcggcgctccctgtgacgttcgggaggcgagtgaatagatcgttcgtcgtgacccctgctcctgcgactagatcctgtgccggtgatgctgaggtttgactgatgatgatcatgagatcggaggtgagggactcggctaccagtcggggtacgggtgcttgcggagttggctggaaccgaggcagcgatcatggtcttcgtctggttcaagatgttgacgacatgatcagcttggttgagtgcgtcttctttgaggagggtgtcgagaagagtgattgctgcaaccgcgttctgctggggggtgcgaaagaccgctgttccatcgacgtcttgttgcccaatgaactctctcgctcgtcacccggattccaaagcgcgttgccgtcgatcttcagcctcctttgcaacccgttcgcgatcttgttgctcacgctgtattcgttctcgcttctgtcgctgtcgcacttcctccagtcggcgacgttcagcttcttgtcgtgcgcgatcttggtccgcttcttaggctcggcgctgttcttccgtttcgttgtcagccatgaatacgccgaagaagaggggcgtgtagttatcctcatagctgtcgtcgaagttgtcgaagtcaccgtagtcgtagtggtagccgaagtcgtcgtagtcgaggatctcggttggtcgagaactgacgccgggggagctgaggtagccatccaactcttccatcgagactgtcccaagaggttggagtataacgccaacctccctggatctagactggatcggggccgatgccggagctcgcctagatctccgagtgggagatgttttggatgtgaagacggcggccaagtcatcaggaagtttcatcaagattgagggataggactcgtcgtcttgatctggtcgcggaagagtagattggatctcgtccgagtggtttgaagccgactcgggagagatgatcttggagtaggactcggccgagttcggaataccgaatggcacgggaacctagtctctccccgactggtttgaatccgagtcaaggagagagatcttgccgaagtcattggtgatgaagttgaggctgccgaaccggaatgcttgcccgggagggaaggcgaagtcgtcgttgtcagaaatgaaacccatcgcacttagtcggcaagaacttgacgtcgcccctacctggcgcgccaactgttgaaacaagatttcggcaataataaaagggggtggctatcaagctaggaaagtggatgggtttggagacaaggaattttatacaggttcaggccttcttattcaagaagtaatatcctactcctgtccggggatgattccgccgagtatgtaattgattgtatgattgggaaaaaagaatcgtcccgagaggaacacggacccctccttatatagggaaagggatctgtaatacaaagtacaatccatatcctaacagaatatgggattacagataaaatacaatcgtaactgactaggatcccgggtagtttcttgacatacaagtttagaatctaacccgagtcctcgtaaagatattctatctatatttggtaccgtatatccggctggaatataaccgccatgtagatatggggtaatcataatctccacattttctttgagttgcactcattttgagtgatttagtgtaataattgattgtaactagcttaagcaaagatcaagatggttttctatttcattatctaaaaaatttaaataaaaatatgataaaaaaattgccgtccgaatatgaggatcgacacatgtttgttgccttgcagcattgctgagacgaaagcatctttgatactccatatgtctagtatacaaatgcttccaagtacccaatctaacttttggtttggatcgttttggttggtatgggatatgatgggctgagattccatcttggattggagtggattggactctcaacaaatgtgggttggattggagtggatgcagactgactaaaaatgttgattcatggactaaatccatgggttgaccacatggattggccccaaaactgaagaaatgagtactcgagtagttgctagggcagacagggccgttgctccactccgccgccatcatcgtcgggcggtgctgctggttgctggtcgccctcgccggcctcgttggctttctacaggtgactccatcggcttcctccgccagtcctctccaccaccgccggtgttgctgccccaatcgtcctctcccagcaccgctccgccacctctaacctcctctactccctactgtcggcaccaaaaatggttcaccaccggccttctagatcgtcatcgagttttctttccaggtgtgtcctaagctgattggatccttcacctcatggttcagtttactcttctaccaatctactctctgttttcatcgaacacttaattttcttatttaacatgatctttcttggttctgatcactaaccctgggtgatctcgtgtgtttggaagcagttattactttgcgagtttggttttctttacctttatagctctgtttctggcatgtttgatgctatctgctaactagagttcttgttttgctttgctttctgaatattgctgaacttctctgaatttcagaaaccaccatttgcatcatcataattaattattttgcttaccttctcaagaaagtgtgactgagaattggaaggaattttgattctcttagaaggtgatctaaagatggagacacaaataactgttgatgttctgttatttttcatggtgttgaatggcatgtttaggtagctttgctgaagatgtgaagtgttgagcctgtaatctgtagttattagtaacactataatttttagtaatgttgtaatccctggttagtagctgtaacctttggttagtaatttctaataaaattctgggattttcaagtctgctagtaggctgcatgtattgatgcatggtggtgttaggctgttttagctcacctgttttgcccctgcagcttctgcattcccctccgtgtggaggcaaaccagttcataatccatggattagctgtggtctgtgtcagagttacggataaggtataccatctatcctggatatacgatgagtaccgatacggtatacccgcgcgtatacggatagatcctatatgcgttaaggaaatctatcacgtgatagaaacagaatccacgggtggaaggagtcctactcggacgagactgagtctttaccatattgtgaggggtccgatatctctgagtcctacttggagatcaactgaccagcggtataaaagggaccccctgggcaagacctagggcatcgaatattaccgccaacacatccaccacagcctacgaagtcggagcctacaggagccaggtcgccgggtgatctagtcgaactaactcaactatggtctcgtcggtatcatcgagttccgttattccctttgtaatatgtggtttccatcatataatcccataccaactaaattagcgctattacctaccaaggggcctgaaccagtataatccttgtcttttgtttgcttgatatcgtactacgtagatcctcgtaccaacataccccaataccctctatatccggtttacaggtatgccccgtcaacagtcgacagtctgagaaatgggtttaacccatggattgggttgaacttggtttgaggaacgttgcaagttgggttgggtggggttagctaagagagtttttttgattggattggatcgacagagttgttacaagcgcttttggactgggttagattcggggtggattctgacccattagcaggcttaaattataccctcttatctgtttactaccgttaaagatcaacggtttgtatttatttaaaatccatcaccggtccctaaatttgtaccgctgtgtcatcctgatccctaaactcgtaaatcgaccgttcagatccacaaacttattcgactgtgtcatcccggttctaaacttgcagatcactcgtttaggtcatccaacttgttcagttgtgtca

SEQ ID NO: 24433 - DNA, 28572 bp, Oryza sativa
atgatattcaaatccaaatttagggaccggggtgacacatctgaacaagttggaggacctaaatgagtgataagcaagtttagggaccgggataacacagtcgaacaagtttgaggacctgaacggtcgatttacgagtttagagaccggaatgacacagcggtacaagtttagagaccggtaatgaactttactctttattttactactagtaaacaacaccataggactcataatacagttgcagtgtggggatgtgactcccatgttcctccctctgtaccctgttcctgttccgaatccaccatattatgtaaccatgtaaatatttattttttcatcaattaattatcaaaatattcacatttgtataatataatattatcagtgttttttagctttataattatttgatgatttttctagcgagtagttgggaaaaattatctaagtagtttcagtagaattttatttagaatgcatatttttgagagcgagcacgaataaaattatgtaaatatatgtaggcacgttagaacgtgccctaataataatgagcagcagtagttcttattactagtaggtttagtcccaagtcaaaagtacgataaaaacttgactggcttataaggaatgtagccccgaagtttcgaatttttgccaaaggaaaaaagaaaaagtctatatacacatgtaaactttaggtgaaagtccatccggcacccctaaactttaaaaccaaatatcgaaccccctaaattttggaatatcatttatattatcccgtaagatggttttagatagtggttttgcgtattcggatgcttatatgagtgtttttgaatacttaatatgtcgacggggatacccatataccggatgaatagggtattggggtacgtacgttggtacgaggatatacatgatacgacatcaagcaaacgataagacaaggattatactgattcagacccctcgtaaggtaatagtcctaatccagtttatatgagattgatatagaaaagccacagattacaatagagaaccgatgatctcgagattaccggtgagatccctcgtcgagatggtttcgacgagatctcccggcgagtaggcttcacgttctccggattgtagactatggtggttgtgttggcgctgtgattcgattatttgaacccctcgggggtatgccttttataccgtgaatcaccttagtctccaagtagaactcagagactatggacccgcacgatatagcataaacccaatcctcttcgagtatgactctgatattcacttgcccgtgaggataatttctataatctcatgttagtttccttatcgtatatggaaatatatcgtttgcacgaagatatgccatatccgtatattccataagtcgtaggatagaatgtatgtcttatccataatcatgacataatataacatacttatatatcgtcctcgattctcaatttatactccatagtgatgtcatgtgtagtgatatattgttgacattcatttgttagtgagagcgaaagggtttaaaaagaaatatttgggtaaaaattttaacacatatgtccaattcgtatcttacgtagtcaaatttatctaaagtatatagagataagatataaaaccactctaaaaagttatataaacggtactgtaaagagtggagggttggatgttcggttttaaagtttacggtgctatagaaactctcgatcaaatttaaggtagtatttggattttattttaaaaaagaaaaagcataaagggtgttgcaaattgcaatgtagctagatatgtagcatgaacaatatttcagacacataattttgaattgcacctttttcaaatctgtttgttacaatctaaaaacagcctgtaaaaaaaattcaaaatttgatcatttaaacctgccgtgtatcctagagctattaaaaggttaaaacgacccgaaaaacctatagaaaattagaaaccgagctatgcacaaaagaatttcgatcgagacgcggagaactcgccggcgggcggcgccgtcatcagaagtcgacgctgccgtcgccggctgccctgcacatgcacccgggcgtcctcggctgccggtacacgctccgcccccgcggccgcgcgctgacccgcttgtactcctccaccatgttcctcaccctcctctcgaatccgccccacccgatcccctcctcctcgcccaggatctgcgcgtatcgcttccggttcgggtgcagcgtcggcgccctccccctgccgtggtacacccggtacccggacaccagcgacgacagctggctgccggagtccgtcaccgcgaacacgtccgccgaggcgcacgcgatgaagtccagcgccgcgagctgcattttgtttttttttttctttcggatgtcagaataacggaggagatggcgttgcttgcaggggaggtgtttgatgttttaccgacccgggaggagaagttcttgaatggggctagctcggcggaggagaggacgtcctccttggtgaccaggttggggaagaggcgcgtcagtggcggagccgcgcggcgccgccgtatatctgtgacccggcgacgtagatgaacgtcccgcggtcgtagccgagcgcggtgagcacgagcccggcttcctccggcgtcagcgggcaccgccccaggctgcgctgctcctccgggacaccgacctgcacacacacaaacgcacgcgatggcggcggcgccaccgtgtcagacaagacaccacgccggcgatcgggttcttccgcaagagatcgagacggagacgtacgtgttccggaggcgcatggcgagcgtcgggaagtgggtctccctgtacgcctgcagctcctccctctccgagtcgccgcgcctgaagtcgcagagcgagtacgccaccatgtcctcctcgaacctcatgtgcagcgccaggtacctgctcggctcgccgccggcgaggagggcggggacgtcgagcatgttgctcccgaacagctgcttgtccatctccgtccgcatcgcgccggcgcggcgcagccgctggaccagcagggagcccgcccgctggatctccgggacgaacttgagcgcgtggaagttgcacctgcatcgcagcctctgcaagaaccgacgccgacgccatgagcaaagcagaggatggatggcaatggtgcttctctcatctcgacaagtgcgacgatcgaggaagatgaactgtgtgcgtgacctgcagatgaacgggcaccgaatcgaagccgagccggttgccgaatccgaggaaatggacaacgccattctgctggagaattgggagcacagctttgatgaattcagatggcgcagcttctttcgagatgtccatgtctgtgatctgtcatgaaacagagagatttcgcatctgtttagactttagagggcatgaattctacagaaatttctcaagatttagtgaaaaaattatgatcttcaaactgatcatagatttttttttctcagaatcaggtagcataattgttagagtagagacactaacttggctgccgattgcttcgagatccagtgactgaagatggggaggcaaatctttcacaatgtgcacatcgctcttcatgtagttcacaaagtagtcctcctgatatatgtcaccgaactggctggtcgaaacgaaaggttcggcgaagcatatcagacaaaagttaccaaaaattatttcttgataaaaagatggcaaatagtatcgcagtttatcaatttcagttcaactgataattgatacatgtcagcaaaagcataaactcagttcggtgtgcttttctttccataatgcgattagtagaactgcaatgattacttacaataaaagtaaaagaaaaaggtagaaccaagcttatactggcagtcatagttgcagttctaaccttgtgtccttccaaacgctgctgtaaagaaacctggggaggactagtgtagcattaagcagagctgcaacaacaacagcattacacacctggaagataaaaattcaactattagctactgaatctgaaaataacgtagtatggattttgtgagcatttcagcactagatccttacagccacacgctgttggttcagaccaccattcgcgctgatcagaatgaacccattgttgttctcttcaggcactgtgaagcacaaatccagtgtgagagatgaaatagttgtgttaaaccatagtattttcccatgcttcagaaacatttcagggtgtaggcatatgctagatgttgatggtttaagaattcaaattgcagaggcttcaagcatcaataaaaaaaagctgcaataagggctttcattcttttaatacagaaggggtgggttaagaattctttttgtcacctgatatggtgatgataatgaaactaattgcaattgcttgaaaggaaaggcttcaccttcatcaggtaaactatgctttgcagcacagggcttccatttacgtgcttgtttgtagggctcttcccatagtgaaaattttacactgtcactgtcagactcgttctgcactggcagggagggaaaatttgacatgagtaaaagctaaatatatgatgtcgtaaattacactacttctgaagctaattggcagtttggtgccgcgtatgatggcagcgtgaaacctttgtgacaactgaagttgccatttgcagaagccttgggtgcattatctgctctgctttctccgtccttacagaattttgcttcagttccttcaattcacaaaatgggattatcaggtcgactgattcgacgagaatatgaagaaatcaattaccggtgttctatctaaatttgcaatacgatttataatatgtcagcagtcagcgtgtcatataatgctgctaggtcctgatcattccttctacaggaaccgtacttcatttgaatggaaattcaagctgctagactgacttccattcagttttttattgcattgagagcgcattggttccaatgaccatgccaaatcagtacatttttgttttcattttgaaaaaaaaaacgcaccatcagatatttttttggatgaaatatcattgcaatccgagtttgtaagaaagcccatcataccatgagacttcaaccaaaacaagtcaaggactagaaaaaatgatgaaaatgggatgcaatttggggacgcttttgtgatgatcaaactgagcttaatttgccatgatttgattcgatgagaggagagcagagcagaggtaggcagcgtacctgaaggcccctgaagctcctggaaatggctgcgttcctgaactgcacctggtggacggcggacatcatcagggacgccaccagcaggaggcaccccatcactcccaccacgccggcgaacaccctcaggtgccacgccgtcacgccgccgcccctcgccgccaccgccgccgccgacgacgacgacgtcttcccatgccgcagcctcccgatgttggtcgccccgaccctcccctgccacgccgccatctgcccggcgccgccgccgccgccaccgccgcaagaaccttccatggatgcccggccgtcccgatcaagaaaccatcgtccttcacacctagcttgtcatcgaggacaacctcctcaccagctcacaaaagcctaacgcaacacggcaacaaccattcgtgtaccgagctgttgaatgattcgcttctcctttttctatttctcttcgtcctcctcttgaccagttcatggacaacgtggccatccaatggcagcacactatagcacgtatgctgctggcgccagattaaagaaacggtaggtcaaacgaggcagcagcagcagggtggacagacagaaacacaaccaccggatgagcaggtgatgattctgatccgatcggatgcagatcgaagcttcggcgcccacgcgcgaggcaacgacgattaaacaaacgtgctcgcctcacaggccaggagggagatggtggtgttaaaaatatgtgatttctatgatagaaaatggttaggaattcaggggaagggaacaacctaacgtgagagggactctcccctggagctatcctgacgatggcttgatcgttgtcaggtagtagccatagcgtagcggagtagaggcgttttgtggaagcaaaagggatggcatttcggttgggaagttgattggattattgtgattgatagcgagaaaaagcaagggagtgggtagccgcctagctagcttagccgcttattagcaggttggttggtgcacagtacatgttatgttagtgttacaagtgtacctgcgagattgtaggtagctgaatactcgtagtagctgattcgctcaactgttgatcccttaatcattgctaatctgacgctgtcaccgattaaacagtgtctgtttggtgtgcagcagctgtgaactgtgaggtatcaagcataattcgattgatccccaaatgtgctgcactgcatgtgtgtgcaaccgaaatggcgacttagtattattgagatcggcgggtgatgacgccgggcgggcggcgtttgatggccggagctaaaagggagaaggcggcttcacgagccgtggctacggtgactcgtgaacaaacacggctttgggttggggaagtcagagcagcgccggccgcacggaccacggtacggggatgtcgccttaacggtgaagcagacggtgcaccggaaagaagttgacccaggaaataaccaacggacggccgcacgttctttaacccgtgatggggtatttcaaatagcatggtggcccatacagctttcgcgactaacatcactatattttctctcatataatagcatatatgttttctcaatatattattcaaatatattaaaatgacaacataattttaaattttgcaataaatttacgaaactactactaatgggtaatattcatattgtattttgtatatgtggtagttattaattatttttaatatcaaattttaattatttgtaaattatatctattcctatatggactctagactcgtcttttaatatttcttttttttagttccaaattttctgtaaattgtatttctatatagactctatgctcttctttcaatattatttatttttatttctgaatttttattatttttaattgtatttctatgtggattctaaactcatctttcaatattctttaatttttaattccgaatttcagttacttctaaattgcattcctatattgactatattgactttaaattgttctttccatgattttcttaatctcgaattttagttatttgtaaattgtttttatatatggactataaactctacttttaatttatttatgtttattccgaattttagttagttttaaattcctatatggactctatactctacttctaatattccttattttttaattccgaatttctatttttttcttaattgtatttctatagactctatactctacttctaatattccttatttttaattctgaatttttattatttcctaattgtatttctatatggactctatactctacttctaatatttcttatttttaattctgaatttcagttatttcttaattgtatttccatatgaactctagtctactcttctaatattccttattttttaattttgaatttcaactatttctaaattgtatttctatatggactctagtctcctcttataatatttctttttttaatttcaaatttcagctatttctaaattgtatttctatatgaactgtcttttttttctctgattaatatgagaatttctaaaccatgagagcgaacgtggaggctcctttttctattcctctaataatataatagattgcttttaaaaaaattttaataaatgttttattaccaggagcaacactcaaactatagttatcaaatgtgacggtgaagtgtgccgctcagttttcgtgatggttagacttatcgagttgttcgaatcaataaactgctcggtaaaccgggtaaccaagaaaaaaattaaactaaaattcaaactttttcgtaaattttgtattattttgatcagtttttttttcttaaccaagcaataatcgtgattctcgacagaaccgataaagtgttgttaagttaggctctgtttgattcagcttaggattattataatctaacttattagtagtaagctaaaacaaacaagtaaattattatagcagattattactctctccattttttaatagatgacgccattgactttttctcacatgtttgaccattcgtcttattcaaaaaatttacgtaattataatttattttgttatgagttgttttatcactcatagtactttaagtgtgatttatatcttatacattcgcataaaatttttgaataagacgaatggtcaaacatgtgagaaaaagtcaacgacgtcatctattaaaaaacagaggtagtatcatctgataagttgctctagaggagcttttttcagattattgagtggctaaagacccactactcctacatatttgagaaaaattacccacctataccatcgacctaacagatagctgagggcattatagactttagcctttcaaacccaataatccatacctccaataatccagacaaacaaacaactcacagcttattatatatcagcttattataatccagcttatagtaatctggattaataatctagattataataatcataaactgaaacaaacatggccttaatccctcccacgaaggttgagggggatttggaggggtggaattaatccacctcaattccctccaacccttaggcctgcgttcttttctgtgggctgagaactccttccctccgcatggcaaatagagcaatttattaacgtttgattaattaagtgtttgtttttttaaaaaaaatggatcaatgtgattttttaaagcaacttttatatagaattttttttttcaaaaaacacaccgtgtaacagtttgaaaagcgtgcgcacggaatacgaggaaaaggggttgggaacactgagcaaagaacacagccttagttttgttaatccttatggttttgttcggttaatccattcactgagagagattgaagcctgggcttatttgtttaggcttagacttattggcacttatatgatttataagccgataaattgaaagttctaagtttaatggtggtgtcataagccaaaaaaaactttttttttcttaacagtgagtgatttatagttttagaaaagccaaatgaaaagtactttttggcttataagcctataaacaaagagggtcttaagtgagattaatttcacacctcaataaaaccttatcggaagaatataaagagcggcgggaggggcgtgggtggaatttttgcaaaaaggtcctccgcttcgcgtgtaattcggtcgagcccccccccggtgaacagtatccctaagtggatgctttacttataggcccttcgaaagactggatattctatgcgaaggagagaaaaatcgctaattaggaccacgctgtagaacttgaaaggagaggggcttttgtgcaaaacggtgcgcactaaccccccgccccaaccctagtgtatataaattgaataggccctcaaggagcagcattccctgaatgcaccgggctgtaacagtaacatagtagtattctttctcggattgactccatcaaatattgctccaatataattcgcatccctcaatcgtgataacaaatatattaaccctcaccccctaactattgaaacggatgtaatttaattcccttagcggctttgagagttgttttcgctaacatggcatgttgacggctgactcaagatgtggaacccatatgtcagtgtcacatttccttttcccttcccttttcttctctcactcttcctttcctctctgctaccatgacgacggcagcctcgagaggccggtcagtctagatagtggcatgtgcggcaaagaagctagcgccctgacggcgggcatggtcaaccatcctcatgccccctacccacgtcgacgtcaaacagtattagccagcatccccacctcctccctctctgccctggtgtaggcatcgagctcactccctgccttcctctctagtggtatggcggggacgtactagtcaaggaagtcgaataggagacggttgatggtgtcggcgctgtaggtggcgtcaatgagccatccgatcccaggttaggggagagcggtgttccaattgagggcaacgctttgggctcgagcttcggcgccaaccggctctagtgaggcccacgtgcatggagacggagtggatatggcggcacagacgctggaggaacaagcatggttggaggaagcagatctagtggcaggcaagatgctgaatctcgagtaggggtgaaaacggagcagatattatccgatccgatctgctctgaatccgtccgaagtgaagatatggtaagggttttgatatatccgtccggatgcggatagttgcatgcggatgcggatatggtatcggtaatatccggcggatacggattatccgctattttaagcggattatccgataaacgttttggcgaataatccgaatttcacagcccatataaccactcaaattggcccatttgacatgagcgttttcattgtgtaaagattcagcccatccaggtccaccttatccatcaatctatccaggagttcagtccgtgactccgtcggcatcgcgtcaaccaattttttcatcgagacttctctcgatcatctccttttgaccttagctgcatatgtgtaattatgtcatatgcaatatgcaattcattagtagtactgtatgagaattggacatcatttgtggacctccaatgttctatcacctatgtcatgtgatattatttttttctaacatttgtgaacttctatgtcttacatgttatgtgaatacgatatatcatgatgtcaatattgtatgtgtcgattacatacttttggacagaagacaggtcaatgttaacaacttgacattatattatgatgtgatcggtgctttcatgagtcatatgaattgtgatattggtacctcattgttgctcattgtatagatgatcagatgttatatcaattgtatatacatgtcacatccgattattttcatccgttttcgagccgagtccgcaccgactccgcactatttccgacatccgaaataatccgctccgcatctgcatccgcacattatccgcaccgcctccgaatccgattaaaaaatatggtataggatatggtatgactactatccgtctgaactcgatccattttcacccctaagaaagaggagaaaataagaaaaggaataattccactttgactcccttaaaagtgatccgaatctaattcatgaccctcaaccgcaaaaccggataggacgactcctcgaactattgaaaccagtgcaagttgactcccttagtggttttggagagcggttttgctgatgtggcgctgacgtggcgatgctgacctagtcttcatcccacgtggcgcttacgtggcagtagaattaaaaattcatctgtgggacctatctgtgatgcacacattaaaaaatattatggcccactgacatgtggagcccacatatcatcccctctctcttctccttcctcctccatctctcccttctctcttttatctctcatggcgcaatcggcggtctgggcggcgacggtgggtgggagttggagcgggcggcggtggtgggcaagggttccccacctgcgagcggagcagcagaagcaaagcagagcggagcgcgtacgaagaagccaccgccaccactggcggccgccgccttcctcggccccgactcccccatccaggagacctcccagacggcctacatctcgccgactcctcaagatcctcgtccacagtatgcgcgcgcgacacgcgtcgaacaccttgtgtttcttggggtcggtgctcatgtgcggcgacgtgcagcggcgcgggagtcgccgtggcgccgatgggggtgatcctgggcaaggaggtggacggattctcggtgtgtggaaattatggataccccatacctacacgacatgtatagttcgactgagtatggggtgccatgtatagatagaatatccttaaaaggactcgggttaaattccaaacttgtacgtcaaggaaatacccgggatctagtcggttacgattgtatcttatctgtaactacctattccgttagggatatggactgtgctttgtaatgcggaccccttcccctatataaggaggggtccgggtgcctctaggggcacgatttttctcccagatcatacgatcaataatacactcggcggatcaatccccggacagaagtagggtattacttcttaattaagaaggcctgaacctgtataaaattcattgtctctcaacccttccacttttctagcttgatagccacctcctttagtattgccgaaatcttgtttcgacacggtgcgtgtcgtcgacgccttcccgctgccgcgttgcgccggtggcgccttcatccaggccatcgacctccgctacatcgagggcatgctcgccatgctcaacaaaaccgacaggtaacgagcgcacgttgatctgttcttcttgtgttcttggtcgtgtcgtggtttcttcttgccttgcttacctacctgtcgaaactagatttcggcaataataaaagggggtggctatcaagctaggaaagtgtatgggtttggagacaaaggatttatacaggttcaggccttcttataaaagaagtaataccctactcctgtccggggatgaatccgccgagtgtgttattgattgtatgatttggagaaaatccaacatccgcccctagaggcacccggaccccccttatatatgggaaagagtccgtgttacaaaagataatctatatccctaacggaatatgtaaatacagataaaatacagtcgtgaccgactaagtctcaaggtgtttccttgatgaacaagttaagaaacaaacccaggatacacataagatattctatctatattcggtatcctatattcagtccaaatatcatcgccgtgtagatatgggatatccataatctccacagtagcccccgagacctttgcagtcaaccatcagagccttctcaaagataataatccgagtgcttcaaaacttatcatgccaaggcctgccgagtagcgaagacgaagactgtaaagggcgaaaagataaaaatatggtgcatcgaatagatgcacctaattaggtgtagcccccaactatgtgattagttaacgaactaaacatatagttgagaaacaaaataataacacaattgtgcatcatatgacaaaagcatacacggcgcctagataggcatgctagccgactgctttttagccataatgaaaagagtccgagtggtttacactctaaaaggttcacgaatgaacacactggacaggcatccgaatataaaactctaaagattacccaccaagtattataaaaattatggtaatgaataagtctaatagcctgggccatgactatttaccataatgaaaataggtatatagcataccaaggaagtgactatgataaaaacaagtcattccaaattaacccagacagcttttgtagcctaataaagctaacaaaaagcagtataacacctttctgtcgggcaccttttaatttgcattgcaataattccaaagaattatatgaccgcataaaaaggattttatcagcattgggcaacactattgtgcgcataatattgccaaagcaaaatatgcctaagtccctaaggaacacaatgggccacgctgttaaaagtattgggctgaggtactgttcaggcctaggcccatttgcacctccgatacccttaacaagaagtcccgagatccaagcgacgcttcgtcttccccgccggaactctcgccattttccccactccctgctacagtaaagaactgcgccggcaaactagggttcaccattccactcaaatccaccttcgaaaagtgatcaaaatccttcccgtgatccaccgcctcaattccttacctctcccaagccatccctcgaatcagatcagcgcattcggggaaaatcgatggcggaagagaaagaaagctttgaaggccaatgggcgccgtccgacgtaacggaagagaacctgaaggagatggtggcgcacggcgttctccctgccaaggagatcatcgggtggcggccagcgtgtggtgagattttttcgacccccgatacacacgagattgtggtcttctctcatttcttctatggcggcttcgctcttccgacctcgaaatttttccgcgggatattaagcttctatggaatcagcttgcatcacctaaacccgaattccatagtccacattgccaatttcatccatgtctgtgaagcctttttgggaattaggccccacttcgctctgtttcgccggatcttctttctcaagccccaaccgaacaagaataagccatgtgtagtcggaggggcaggatttcagttgaggggaactctgagtcagaagtacttctctatgcccttcaagacctcaaacaaagggtggcatgcgaactggttttatgttcagaatcctgagcctgctcttcccgagtattcttgtcttcctccggtgtaccaagacacttggaactctcttccaatcggagatgaagctgcccaagccttggaattgttggatcgcatgttaaaactcaaagaacaaggcttgcaaggagagcagatcactcggcatttcatcaaatgccgactggcgccaattaaagaaagatcccatacagcttttgagtttgacggcaagcatgatcctaatcgcgaagaaccagactctctggatttcaaaatcatgaaggagagaatgtataaaatcttctcaaatgccatcgtcgtcagctactcacatcggctgccagttgtgccatataatgcattcaatccgcctccgcaggtatgcatctgaaatcttcaatctatgaccaaaacattatcttgtcttcatgttgaattaattaaccgtggaagcatctcatttaggaatatgcattgatgaaatcactcagcgccggtcacctcgtcagcacaccgttcagggaagtggagggccgacaatcaggtcagacccacaacctcaaacctccaaaccggctgggcagataggtcctcgcaagagaaagctggtgcttaatgacgatgagggcgatgacagcaacaaatctggggacaagggcactcccaacaaactcccaaagcataccatgcccaggaaaaaactggctggccgtcaaattccaaagattagaacatcttccaggtataaacctctcgataccattttatttcggcatgcttctcttatagaaattatgctaaatgtcaaaaggacactttgcaggaaaccatccgacatagatccaactggaaaagatcctgatccggctgtgacagagccaaatttatccaaagacgctgagccgactgccgaaaatcagccgactgccgaaagccagccgactgccgaaagtcagccgactggcacccaagcttcggacgacaaggccaatccgagtgatcagccgccgactggaaaccagtcggcaacaactgaaactgcaacaacccgagaacccccgactggaaaccagtcggatgtagatctaaatcaagagattcctgaagctgaagcgcagacaacttctcaaggaccaaaagttggtaatgactcagtgattgggtctccagataaagagcaaggatcccctcacgctcagccaggcacatcctcaggtaactcatcttctcaagtgatgccactctgaataactccagcttgttcgtctaatatcttgggaatacatcaggtccactaggcggcgacgaagaagaaattctccgcataaaggcagctaatgactctcgtcctcctatcttactcaaatggtgggacgagaactctcaagtttccggcattgttataaatcgccaaaaagaagacgaggaagtgtgccagctgaagaaagtacttggagaagccactcgcattgtgaatgtaagtcttctaggtggttgcctttgatgactttgtttttttgttagcaaaactaatccctgaaccaccgtgcagagaatccatcttcgtaatgaagccaagactgcaaccttagaaaagctggttccacatttgggaactcttgaagccgttagggaacagctacacgaggctaaggagcatgccaagaaaacggagaaggaattaagggagcgaattgcacagctccaggactccaacttcgagctgagtggttcatcaaaaggtaatctctagatctgtcccatttgtgctgtcataactggatcctcaaacatttggatttcaaacagcgcaagccaccaggatgactcaaatggagaagcaaatagaagccttgaaaaaagacaaggtagaactggctgcggaaagggattcagccttgaaggaggttgaaggtactgccagctgacaatttgaactgccctctctgtaaggcagcagattcttattataaatgtgttttgtagaccgtaaaatcaaatctcaagctcagtttgatgtcctggttggtaagatcaagaagcttgaaggagcaagagacgaagtcgccaatgtcgctacaccacttgtccaagctatgtttcttaataacagtggtccgagtgcacttgatgcaaccgagatctttgacaagctaagagttgcaccggatgtgtacttcaagaacatcaagaaagctggaagtatgggagctagcatggcattggcaatgaccaaatccttgtacccgagaatcgaaattgataccattgatggctttgcagacgggacaagtgaagaagctgctcttgatcttatcagtaatgctcaaagtgcggctgacaagattgcaagtgatgttgtagagcaattccgcaacaacgaccttcagccgagcaataataactctgatgatgaaaggattgattctgactgagtgtaaatgtagcaaatggaggctcaatttgtacaatactggtgtatttatgctgtgcttgatagttctagccaagtctttgatttcttaaaagcttttatcaagctttgttgagcctaaaacccaaagaagctattaaaaactttcagtcctcgcagactaagtagaaaaaatcaaacaaggcaatgatagaccaagtaagcaaattaaattgataaaaaatcacactccattattatgatgatagcccccgactgacaacggcaagaagaaaacttgatgttgacagtcaagatagggaaatacaatgataagcttaagcatagaaacgacgaagatgttcaatgttccaagagttgtcgacgagagtaccgtcttcgtgcttgagtcggtaggaacctggtcgggtgacttcagagatgataaatggcccctcccataaaggagataacttgtgccgatcccgtgtagtttgaattttcctcaaaaccaggtcgccgactagaaaggcacgggatcgaacattgcgattatgataacgccgcaacccttgtaaatatcgagccgaccgaatcaaagctgcttcgcggacttcttccaatcggtgcaagtcatccactcggtcctcttcgtagcgttcttcacggaaatttcgaaagcgcaaagattcgaattcgacttcactcggcaacattgcttctgccccatagacaaggaaaaaaggtgactggcctgtggcccgactgggtgtagttcgcaaagaccaaagcactgatggcagctgttgcacccatttgccggcatagggttttagccggtcaaaaacacgtgctttaatcccttgaagtatcatgccattggctcgctccacctgtccattgctcatggggtgtgccactgaggcataacaaatcttaattccaaagtcctcacaaaagtctttaaaaactccaccagtgaattgtgtgccattatcagtgatgatccgattgggtactccaaatctatgcacaatgtgatgaagaagtctcgagcgttatctgctgtgattgtgacaaccggtttagcttcaatccacttggagaatttgtcaatggccacaaagagatgtgtgtaaccgccgactgcctttttaaacgggccaaccatgtcgagcccccaaaccgcaaacggccaagacagcgggatagtttgcaactcttgagctggcaagtgaatttgtctagcgaaaaattggcaaccttcgcacgtgcgcacaatcttgtcggcgtcggacactgcagtaggccagaaaaaaccctgccggtaagctttgccgacaatggtgcgtgcagcggcatggtttccgcatatcccagaatgtatgtcctgcagcaattgtctcccttcctctaaagatacgcagcgttgcagaattcctgaagggcttttcttgtataactcagcttcatgcataacataaagtttgctccgccttgaaatccgctcggcttcatctttgtcttgagggagttcttgagaagtcaaaaatcgtatgaggggttttcgccagtcggtttcaaccatagcgacgtcatgagtgcccgcaacttgagtggtatctttgtgaggtactgtcggcgtataaaggtgttcgacgaaaacatcagagggcgccacctcgcgcttggatccaaagttgacaagtctatcggcgtcttcattattatgtcgaagaacatgactgagctcgagtccatcgaacttatcttccaatttgcgtacctcttgtcgatatgccatcatgttgtcgtcaaggcaggaccactccttcataacttggttgacaaccagctgtgaatcgcctcgaactattagacgctttatccctagggaaattgcaatccgcagtccatgaaggagggcctcatattcggcgacgttgtgggacgccgaaaaatgtatccaaagcacgtagctcaatctttctccagttggggaaatcaaaaccactcctgctccagtgcccgaaagtcgtttagatccgtcaaaatgcatggtccagtgctccatgttctccgcgggggcatcctcctggcactcggtccattcggcgacaaaatcagctaacgcttgggacttgattgaaattcggggcttgaatgatatgtccaaagacatcaactccaaagcccacttagcaatacgtccgtttgcttcgcggttgtgcagtatatcaccgagtggaaatgatgtgaccaccgttaccgagtgaccttgaaagtagtgagatagcttcctggtagtaattagaataccatataacagcttctgaacctgagggtacctcgttttggagtcggctaggacctcgctgacaaaataaatcggtcgttggactttctggacatggccttcttcgtcgcgttcaacgaccaagactgtgctcacaacctgggaggtggctgatacatacagcaacaacggctcctgcgggtgtggtgaggctaagactggtggctcagtgaggagtttcttgaaatcttcgaaggccttctgtgcttcgggtccccactggaagttatctgttttcttcagcagcttaaagaagggcatccccctgtggagattatgggtaccccatacccacacggcatggttatccgactagttataggggataacttatatatatggaatatgtaacagatcatgacttgggtattacgtttccttatatattacggaacagcctaaagtcctagtttgataatattgtaaagtagatttaggaaaccgataccgtattggttaaggtttctatcttgtaatcctgccccccaccctatataaggtgggcaggaggccctctagggggcatgagacaacctgatcgtcagatctatactacacccggcggattcaaatccccaaacaggagtagggtattacctctcattgagagggcctgaacctgtctaaatcctttgtccctgcatccatccactttaggtctcgtgcgctacccccttttattattgccgaattcatgttttgacagttggcgcgccaggtaggggttgcgtcgagtttcctatcaacgagcgcgatggaatcaatttcatgagtcgccgacttcgctttcgctttgggagttttcacttcctttccgtcgaccacttcttcaagctcctcttctctgacttgatccaaatcagtcagggggaaactcaatctgatttttatcattatttatcatactgatttttaatctcagattaatttcttgctattttttgttgttgttcgcatataactacgcggcactattgaggcgattgatgctggtcatggactcgaggcgtctcagctttccggtcgatcggccgcgagtccactccgccggcttgtcctcgccaccgccattgctgatagcaacaacgacttcaccgccggcctgcctccgtcgccgccgagtggatcctccgcctacacggctggcctattatgccgccgctgttgggcgtctacgacttcaccgccggcctgcctccgtcgccgccgagtggatcctccgcctacacggctggcctattatgccgccgctgttgggcgtctacgacttcaccgccggcctgcctccgtcgccgccgagtggtgcctccgcctacacggctggcctattatgccgccgctgttgggcgttacgacttcaccgccggcctgcctccgtcgccgccgagtggtgcctccgcctacacggctggcctattatgccgccgctgttgggcgtctacgacttcaccgccggcctgcctccgtcgccgccgagtggtgcctccgcctacacggctggcctattatgccgccgctgttgggcgtctacgacttcaccgccggcttgcctccgtcgccgccgagtggtgcctccgcctacacggctggcctattatgccgccgttgttggatgtctacatcctcaccgttggctcaccttcgctgccgtcgactggtgtttccgcttacacggctgacctattatgccgccattagtgggcatcttcgctttcaccgtcgaccgccttcgtcgccgccgactggtgtcttcattgttattgatggacgactttgttcccacattggccacttctgccatcaccaaggggaatattacaaagctaagtcatcatttattttattctttatatgatatttttccttttcctctgcctcactacaccaattggtcttccattgagtagtgagtcgggggctacagatgttatatcatattttttataatatttatcttgattgcttgcgacataatctgagtacaaaagtacctatcgagttatggagttctatcttcctatgctttccgtttggtttgccaatggatggttgcctttgggccgattcctagcacccgggggctcgttggatggaccgagtaacgcaaggtgctaagtattattcggaataaatcaaaagcatagagatgagataaatttattttctgctcttaataattgcaaaagtacccgagtagtaaactccgatccgtgaaactttgttccattaatgacgaactcatgtcactcatatgcatgtttgggaagtgcttaggccgactcccagtgcttggtggctatgactagttgggcagagcgtttaaacgtaatgagtcatctgctcggggaaatcaaaattgacaagaggagaaatacatatttataaatattttaaaatacttgattttttctcgagtattatatttatatcagatactactcatcctatatgtttgttctgcaggatccagatccagatatgcataaaagggattcatggctttaagcttatctcttacgctctaggaatggatcagtcagaacatcaccactggccgcctcgtccgccgccgactagtacttccgcctgcacggctgacttattatgccaccgttgttgggcgtctacgtcttcaccgactggcttgccttcgccgctgccgactggtgtttccgcctgcacggctggcctttatgccgccgttgttgggcgtctacgtcttcaccgaccggcttgccttcgtcgccgccgactggtgtttccgcctgcacggctggcctttatgccgccgttgttgggcgtctacgtcttcaccgaccggcatgccttcgccgctgccgactggtgtttccgcctgcacggctggcctttatgccaccgttgttgggcgtctacgtcttcaccgaccggcttgccttcgtcaccgccgactggtgtttccgcctgcacggctggcctttatgccgccgttgttgggcgtctacgtcttcaccgaccggccgccttcgtccgccgccgactggtacttccgcctgcacggctgacttattatgccaccgttgttgggcgtctacgtcttcaccgaccggcttgccttcgccgctgccgattggtgcttccgcctgcacagctggcctattatgccgccgttgttgggcgcctacgtcttcaccgaccggcttgccttcgccgccgccgactggtgtccacgcctgcacggctggcctattatgccgccgttgttgggcgcctacgtcttcaccgaccggctcgcctttgtcgccgccgactggtgtcctcgcctgcacggctggcctttatgccgccgttgttgggcgtctacgtcttcaccgaccggctcgccttcgtcgccgccgactggtgtcctcgcctgcacggctggcctattatgccgccgttgttgggcgcctacgtcttcaccgaccggctcgccttcgtcgccgccgactggtgtcctcgcctgcacagctggcctattatgccgccgttgttgggcgcctacgtcttcaccgaccggctcgccttcgccgccgccgactggtgtcctcgcctgcacggctggcctattatgccgtcgttgttgggcgcctacgtcttcaccgaccggcttgccttcgccgccgccgactggtgtttccgcctgcacggctggcctttatgccgccgttgttgggcgtctgcgtcttcaccgaccggcttgccttcgccgctaccgattggtgcttccgcctgcacggcagacttattatgctgccgttgttgggcgtctacgtcttcaccgaccggccgccgcatccgctgctgactggtgtcaccgcctgcacggctggcctgttataacgccaactgatgctaccttcttcacggctggctacatcgctgtcactactaataggcatcagtatcttcaaaacaagctgcctacgtttgccatggctgccgactggtttcttcacttccatggctgcatgattctgccagtgttgattggccttatcttcttcaccgccggtcgtctcgtctgctgctgactagtgccctcacctctacgtctggtttatacagctaccactactgatggacatcatcgtcttccgttgccgactggttatgccgccgccgactagtgcttttatcttcacaactgcgcgtcttcgctaccagtttgcttctgttgccgccgactcgtgttcacttcatcacggcgatgcaactttgtcatcatggtggagcgacttcatctttattatcttcggcactggcaaactctattgctgctacttcgcaagttttactacttcaccaaccacgacgtctttgtgaacctcgacatctcggcatgcaataccatgatattttactacaacaagtgactctccaatattcaggatttctacttggacaccttcaacacatatcttcaatcaagcaatgactactcgacgacaagaagctataattctcgactctatgttcagttgtttctcaactaaccaaagagtcgggggctacacaaatataaggctcaaaatttgacaaattttatgtcaagctgaagaaatcaattaatcagccaatgagtcaactccaggagtcattatcttcatctttgcttcggaacagacattctacttcaacaacttcaaatatttcggtttagacgagttgggcaacaacatcaactctcctccaattatttgtcttcacggttggcctactacgcaactaccgatagaggatctcctcgttatcatcggctgctacatcgctatcgactggatcaccgacatcgtcatcttcatcaacatcttgtcaagcctcatcaacatagccaactctgctgccgttgatgggaaacttcgtcatcatagtcggctatctcggttgccgctaatcatcagtaccgtcggatgcgtttgtcgccgccgattattttcttcatcttcatgattggtggatttcgccatcaccgttgatgcgcgtctacgtcttcatcgtcggtttgcttttgtcaccaccgactgttctttcgttgttgttgggcgcctacatcttcactgttagctgacctgactgttgccgactggtttcttcgcctccacggctatgcaacttcattacatttgattggtggcatctttactaccactgacatcttccgttacttctgatgagcaatttcgtcttcatgttggtcatttcatctccatgccgactgcgtcagctattgccaatagacaattttgactatgacagaaagacaagctatatgctcaggggctcatcaactcaagcgtgaggattatatctccaatttggacttgttccggatacattccacatggattcatagtcatgagtctattttctatgctcaaagactggaccaattattattccccgtaagggctatcaaccgaatacttgcgccagtcgggattcaattattatatatattttggagtatctcataagggataatcactcagatcagaagctattcatatgagctacacctggtctatatcacccggaagatttattactcgagagcatgttacatgcgtcatcctttaaagggtgtcgaaggcatattttttggtctaggcctaatatgtctgcagcccatattttcaggtgtggcctgtcacgttcttttagggacttaggcactttttgcttaggccaaagtgcgcgtgatcaagtgcccaataccttaaaatccttttataccgcagttactcaactttttaggagttggtacaatgcatcttaaaaggtgtcaaacagtaaagctttatatagctgccccgctgactttttaatatagtcatggtgctgtttgggtttttaagcaattgattggatacaatatcgttgctttttgccacgtaagtgtgcatttttattgaccaatattatggcttaggctgattatatattgtggtcatttttcaggcggttggtaaatcctttatgagtttatttacccggattttataccacatatgccatatatttccaggtgtggtggaaccatgtgtcttctagggacttaagcacatctgttaaagcagtgtgcgcatggcgtatgcccaatactttggaaatttctttattcacagcattcaagcttctttatagctattttgctatatcactcatcatgttttgcaaagcagttggtatatcactcggatcatgttatttggagaatcacaccgcatatgctatatattgatatcaagtcacttggttgattacgattatcaaaaccactcggttggttggattatttattccttgactacatgcttggtttgttcaattaaccacattgtcgggggctacacctattaggtgcatctagtcggtgcacctgactttatttccagccctccacagtcttcagatttggtaaaagtactcgggagaccatgacaaagatgattgaagcactcagctttggagtaatctggttcgagagaagattatcttttcgactgcgaaggtctcaggggctactgtggagattatgggtaccccatacccacacggcatggttatccgactagttataggggataacttatatatatggaatatgtaacagatcatgacttgggtattacgtttccttatatattacggaccagcctaaagtcctggtttgataatattgtaaagtagatttaggaaaccgataccgtattggttaaggtttctatcttgtaatcctgccccccaccctatataaggtgggcaggaggccctctagggggcatgagacaacctgatcgtcagatctatactacacccggcggattcaaatccccaaacaggagtagggtattacctctcattgagagggcctgaacctgtctaaatcctttgtccctgcatccatccactttaggtctcgtgcgctacccccttttattattgccgaattcatgtttcgacacccccgctcgccaagtcgtgaaacaaatcggctgagcgccgccatgcatccagtcagcttctgaacatctttctgggtacttggcggtttcatgttgaggatagcagtaactttctccgggttggcttggatgcccctatgagacaccataaagccaagcagcttccctgacggtactccgaaggtgcacttttcagggttcaatttcatcctgaaagcacggatgctcgcaaaggtttcttctagatccgagatcaaatcatccttttgcttggtcttgacgactacgtcatccacataggcttcaacgttgcggccgatctgcgttgagaagcatctctgaatcatgcgttgataagttgctcctgcgttttttagtccgaacggcatggtgacgtagcagtatgccccaaaaggcgtgatgaatgaagtcttcaagcagtcggattccttcagtcggatctgatgataccccgagtagcaatccaaaaaactgagaagctcacggccggcggtcgagtcgactacctggtcaatgcgaggcaacccaaaaggatctttagggcaggatttgttgaggtcggtataatcaacacacatgcgccattgccctgttttcttccgaactagaaccgggtttgccagccagtcgggatgaaggacttctttgatgaagcctgctgctaacagcttggttaattcctccttgatcgcgtccttcctgtcttgtgcgaatcggcggagtcgttgtttgataggcttggcatcttctttgacatgtaaggagtgctcaatcacctctctaggaataccgggcatatcagatggtttccacgcaaagatatctttattgttctgaagaaaggtgatgagcgcgctttcctatttacaatctaactcggcgcctattacagcagttttagtaggatcagagggatctaggggaatcttcttagtcttggcttcgctttctccactctttgaaatcttggtagcgggctcttctccttcgctcgccgtggctgcagccagtcggatatcctctcgggcagacgccatctcgcgagtttgggccatgtcgcaactctccttgtcgcatgtgacggcttgcttgatgtcactccgtagggataggactcctcggggaccaggcatcttcatcatcatataagtgtagtgcgggacggccatgaacttggctaacgccgggcgtccgagtatggcatggtatgctgtctcgaaatcagcgacttcaaagctgatgttctctgtgcgaaagttttcccgagtgccaaaagtgactgggagggtgatctggccgagtggagttgcggataatcctggaatcactccgtgaaaaggcgcattgcttggttttaactcggagcgagggatctgcatatcatccagggtcttggcgaagaggatattgagtgcactgccaccgtcgatgagggttctgcgaagcttgacattacggaccactgggtctagtaccagggggtaccgccccgggtggaccactcggtcaggatgatccgagcggtcaaacttgattgcgatctctgaccatcgaagatattggggcgtgtcgggctgaacagcattgatctcccgttcagttaacttctgcttccgtttagactcataagccagggggccgccgaagatatggttgagctccttgcggtgatcttgaaaacctgccggggtgtcgtcgtcgtccttcttcctcgacgtgctttgttcttcgtcagaattcttccgtgcagtcttggtgtattgatccgcgaattgcttgtagacgaaacaatctttggccacgtggttggagttaggatggtgcgggcattgggagttcatgatcttgtcgaacgtgttgacgcgcgaacgctgtcgagaagagtgactggcggttgcaacaagttccgcaggcttacgcttgcggtccttatgattgttacttccacctcctcccgtagccggcgtacccttgttttgcttccaactgggacccgactgctttgatgcggtgacggcgtcttcagccttggcgtactcgttggctttttca

SEQ ID NO: 24434 - DNA, 19009 bp, Oryza sativa
  unsure (1)..(19009): unsure at all n locations
tccacctgatggtgtaaaagccattgagtgcaaatgggtctttaagaaaaagacagacgtagatggaaatcttcacatctacaaggcacgattggtggtgaaaggtttcaaacaaattcaaggtgttgattatgatgaaacattctcaccagtcaccatactaaaatctattcggattgttttagcgatgctgcctatttcgattatgagatatggcaaatggatgtcacaacagctttccttaatggaaatctcgatgaggatgtgtacatgacacaacacaagggatttgttgatccacaatcagctaaaaagatatgcaagttgcagaaatccatttttgaggcaatcatctcggagttggaatattcgttttgacgaagtagtcaaggcgttgggctttgtcaaaaacgaagaagagccttgtgtatacaagaagattagtgggagcacactagtgtttttaatcctatatgtagatgacatattgttgattggaaatgatattcctatgcttgaatccgttaagacatcgttgaaaaatagtttttcaatgaaggacttaggggaagcagcatatattctaggcataaagatctatagagatagatcaaagaggctaattggattaagccagagtacatacattgacaaggtgttgaagaggttcaacatgcaagattctaagaaaggtttattacccatgtcacatggcattaatcttggcaagaatcagtgtcctcaaacgactgatgagcgaaacaagatgagtgtgattccatatgcttcggcaattggatccatcatgtatgccatggtatgtacacgtccagatgtttcatatgcacttagtgcaacaaactgataccaattagatccaggtgagagttactggatagctgtaaagaatatcctgaagtacttgagaagaactaaggatatgttcatattctatggaggacaggaagagctcgttgtaaatggttacaccgacgcaagcttccaaacagacaaagatgattttagatcgcagtctggatttgtgttctggctaaatggaggtgctgtgagttggaagagttccaagcaagatacagtcactgactctacaacagaagccgaatacattgccacttctgaagcaacaaaggaggctgtttggataaagaaatttgtttctcaattcggtgtgatggctagtgctcccagccctatggacctctattgagataatagtggtgccattgcacaagccaaggagactagatcgtatcaaaagtccaaacacattttacggcagtatcacctcattcgtgagatagtggatagaggagatgtgaagatatgtaaaatacatacggatttgaatgttgcagatctattgaaaaaaccactccctcagcctaagcataaggcacacactagggcaatgggcattagatacgtgcatgattgactccagtgcaagtgggagactattggtgatatgccctagaggcaattatagagatgattgaatcacatactatgtttacatacttatccaacattgtttcttgaaatagataactcattattgattaatgaatatgtgattctttcatgagactctttatgttgtatgttgtaatttctaaaggatccctgatcaaatatcatatgtggaacaaatatgtttaataatcagcacatgtattaaatgatgatcatgtctcatggatcatggtatagagataccaaattaataatgtggatacatgttggggaacaagttgttggatagacccaatatgagacactgtaagagccatatgtgttatgtcatcagtgatctcatttagtgttggtgttgaatccttagacctgaggttatcacggttcccaacatgtgtagtagcttacttagggactgctaaacgctactccataattgggtagttataaaagtagttttcgggtatgctatgacatatgtagtgggatataaataatcaagatgggatttgcccatcctatggagagatatctctgggaccctcgatgtatagattatggaagtgcacggctatgccaaagatgattgaggagtcaatcacaagttatataatctatcacaggttcgagtgaatgattgagctattagaggatgacacatatccagccttgagcttaatcgatattgtgagacaaaggggttcatacaagtatacactagaggttcagccgatatgatctttatgtatgcacggtgggtcaatacgttctgctaagtgccgctgttgacacgtggaccgaaaaggagttttcgggttacagccgagtgtatatgagcctataggtcgcacgcttaaagggccggaataaaggaattggatggagatccaatacgcattcaatcggatagggatccgagtaggactcctatgggcctcgaaggcccagtcgcggatcctatatattcgtgaggggaagtgaccggcggaattaacacaccacgtgaaaccctagccgtcactcccctccccgagcaaaatcctagccgcgcgcgggtgctagcacatctgcgcgtggcgttccgtccctgtacgtgtggataccagtagaggcgttgctggtttgcggtgctgatttgcgtgggagtacgacgagaagaacgcacgaggaggagaaggtcgagccggtgcgatcgactacttcctctacatcgacgcgcgccacatcgcgaaggttccttcgccttcttagcgccttcttccactgcgcagcacgtcgagtggtaacgatctatgatctaatactttcatggttcctggtttatgcgctagaacattttggtttatgcgctagaaaattgagcgctcgccggtgatatcacaactacgcaaccgtggcacagagcaggcaaagtcatggatcggaggcacggtggatgtaaggtgtctgacgcctaggctgcatcttgagtgctccatggcccgctcaacacaccgtgcctcggtcagctctaccgcgtcctcctaggctcctctcaccctccgccacaactccaacggtgcgcgcggcgtgatggcaatgccggcgaaagaggggatggcgacggcggcgaaatagatggctgcacgaggtgaatcagaaccagggcggtgttggaggggcgcgcggcaaggactattagccgatcaaggcgcaccggggaggatcagcatccaagcggagtggagcggagcgcgactgggagaaacgatgaccaagtgtgattgatgggacaactggataaggcgatgggcgcgagggtgattgagggtatagatgcggaattgctaatgcgctatactcctccctcttctcccccttcctcctccccttcttctctttctactaccgtgcaccacaaatttttttaaaaaaacaaaagttagaaaaaattatgtatagaaatactatatgtaaaaaaatttgaattgacttataaactttggatctactttagttgtataaactttagatgtatagaaatactatatatagaaaatatttgaattcaaattcaaatttgaatcagatataattcaaatttaaatttgaatcgggtatgtatacttttgacttataaactttaggtctataaactttaggtgtataaactttagatgtatagaaatactatatatagaaaatatttgaattcaaattcaaatttgaatcagaattaattcaaattaaaatttgaaacggctatctaaacttttgacttataaactttaggtgtataaactttagatgtatagaaatactatatataaaaaatatttgaattcaaattcaaatttgaatcggatatataaacttttggtctctaaattttataaacttgaggtgtataaactttaggtgaataaatttactaaaataggaaagtaatgcggtgctaaaaaagaaaaccaggtggagggaggaaggagggaggggggcaaatctgattgctacccgatccccagggcgatcgatcgcccattagaagtccccgtatagatggccaaacgagcagcatggcctaggcacggccgtgctcgggccagaatttatcgggccggcatggcccgaccaacacaccgggtcgtgtcgtgccggcccacgtggtcaacctgtggcccaggcacggcccaataatggtcggaccgtgccgggccgacccaaaggcacgggcaacccatcgtgctttctttgaattaagtctatttctcctccctcgtctttcagcatatacatagctaaaataagtctattttacgtctctaatctttgggccgtgccataaaataagtctattttacgtctctaatctattgggtcctccctaatctttgtgccatgtcttacatgcggttaaaaataagtctataatctccttgaagttcgtgccgtgctgggccggcccaccgtgccaagccataggcctaggcacggcccaacagccgggccgtgtcgtgcctggtccgggacaaaatcccgtgccgtgggccgggccatcgggcatcgggccttatggccaactatagttgaggggaggcgtcgtttgtggggaagtcggtgggtagatcgtgattcctatcttcaattgctaggcacagccgtcagtgttcaatttaagccgttgaatgaaaagatcgaacagttgttaaatgaagaggggatttctatgtacgttttgtttggtgaatgtagcaaagaatacaacttctacttttatattttatattagtatagataataataaaacctcctgtatcttgtcaaactacataaagggctatataagaagtattattgaaagggaaaaaaatccaaattacaccctaacagtgttcgcatagagcgtagtctggattgtctggaccatgtctagacactagacgatggattatcatctagtttagggcctaaaccatgaattacactgtttcaccgtctagtcggtcaaagaaggtcctagattatctagactgcacaattagacaacagcaaaatgagtatagaccatttaactgttgtttaaactgtggtctgggcaatggagcaatgcattttttttagtaggagctaaaacttcgtgccccacccaaggcccataggtcttagtgtttttacccccattccaaagccttcccctctgctctaatacactcacaaacacaaagctacgttgccttgcctctactagttgccactgcggaccttgctctcacctctctctggtctatggctctacgcgagtggatgcacctatcataacatcgctagttcttcaatattttattagacataataagtgccaaaaaaaatacgaatagtgtaccatatagtatatcttctagactagctagattcttgtaacgacccgcctctcctaggccgggcccgcttacatcctcactccgtgcgccccggggagaattntccggtccgtcacccatccccaattgctccaagccaagcacgcttaaccctggagttctttggagatcggcttccggaaaagaagttgcaacttgttaatatgagcattctattaatcctattaagccctaggccgggttgttacatcctcacccccttaagagagatcgacgcccccgtcgatctaccccaggcaggcgggcccgcttacatctggcagctttcataggtcatagactgccctcacagaccaacacatgtcttttctacacactttgtcctcactcgtgcgtacccgggaagaattttccggtcggtcacccatcccaaattgctccaggccaagcacgcttaaccctggagttctttggagatcggcttctggaaaagaagttgcaacttgttgatatgagtattctattaatcctaaacttgtcacgcccggaatttctatccaaaattccaaacgcttacatgtgtgcgaaccctcgtccaggaatcagccgaggcacacaataacaaattgataatagagtacaattattactctaattaataagcgaataaaatgtcattacagagatagatagttcctctcaatcaataaagatctaagcagcggaaaaataagataaacggcgcagacgactattgacagaaaacacgaggcctgggagatctgcttaactccagtgcaggtccaaaactcgccttcggatgtatgagcgtgccagttgatttgatcctgcaatcaacaagaaataaaacaaagaaaccgcaattaatcctataaatgatagccgatcggctaggtgccgatgacatatcatttatttcaagccgatgtcatgcgtacatcgatcggcaaatatcaataagcaaatcagaactaaatctacttgatcggctgtagatattaatgatatataatccttatatcgatatatacttaaatcaagtgattgggatatatcggtcgccttgccgagacagtataaatcacttagatcgaaatatatattaataatgggattatatacatttatagcatagccgatcaagtggatctagcatgtatcggctaatactccgataccactctatattaagatgttaaagcaagtagaatataccaaacagaagcctaatatacttagatgcgccaagatcttaacataaagggcagatttaacatataggttaagcatatggaataaaagtagttagatcagataagatcggctgaaactccgatactaccctaatcggcaactgtggacccccgtttttataacaggaatcaatcgtgtaaacagtaccatttccctggatcaagtagtttggtacacacgaattcatagctgaaataccaagtgcacatacacgagagtctagtacgaattattacatcataagctcgcagccgcagtcttaaatcatcggaccgagcggtccggaatacattccaaaaacagaagtaggtaaggcagcggagttaaggcagcggcacgctattgccacaggcaacgaccgtaactaagacctactgagtgccatcgtcttcatcaccctcctggtaatatgcatagggatcctccgaagcttcatcttaggcctctaattaagtttatatttgcaagggtaagtaccaaccgtactcaacaagccaccatagcaacaatgcatatgacaggggtattcaaaagatggctatggttcttttgcgcaaagcaagttttgtaattcttttcacaaacctaagacctagcacagactgatcaaattttagtaccagtgttcatattaaataatgacggttctgtccaccatccattgtgatcccaaggatagcttcccgccattgaatcgtcatggttttctgaggacgtccaccttccctcctctcaggaagtggctccatcagcatagaaatcatcatgcaacatcccatcccacacaagttaagaatttagagtctagccaagtgtaatacatgtcccgatgctcaataaccgcgagcatggctattcgaatagatttggtttactcacactgcagtggatgtacactttacccgcactccgcgactgcccaacacatgagccttgtcccaacacatgagacatgtcacggcaaagcttttcgataacctcgcattggcagtacccgctccatgaactttacatcctcatgcactttaggcgtacacggtttctagcagtgagaggagttctggcgcacccgggaagggaagacttacacatgcattaagttataatttagattctcacatggcagtcctaccgatggcgacatcattgtagacacccgcctcgcggtcctaccaatggctgccccaccgtagagcccctgcctcacacatcaagaaaccactatgcatggatattgcctccgctcagctatctactccgctaggtctatacccattcgagaagtacggttatacgggggtcgtttcatgcttaacttcatggctcggtccttaattgaccagggacggcactagccttttttcggataccacccaaatcctccatccgccccagtcgaaaacatttgtttagtttcattttcctttcacaaatcatgtcatcaatatcgtggcaatgtggcgctcatgtctccacatgccgcatctcaattaccttcccaaaggtaattgctcaagcatatatcatttgataaatatgaatatgcataaatctagagtagcatttctaagcatttgtcatagttgactaaggacttatacgtaaatcatggttacaaggatttaagggtaaacaataatcaaggcatggcataatcacaagtaggatgttcatcattgcatacaattttatttgtaaacaaaataatttcgcacttgggatcaacatgttcaaagaatagtgatgacttgccttgctcaaagtcttgcgggtcttggccttcacttggccttcacttgctcaaattgatttgaattcggttagaattcaaataaaaatccaaataaatccaaatggaagtcaaatgcgaaagtcgattctttttattaactttactattcgctaactagggcaaaccctatttcgatttatacatcctaaactatttttgcgggtataaatattttgttaccataagtttttaatttaatctacccgagcattatatccatataataggttagaaatttctatcgcgagctaaatatcggacaaaatcctaaaattatcttataatattgtacgatttaatttagtctatgactaaacgattaaatataatacacggctaaaattcctagtaattgaatctgaattcctaccgtgaatcgatgacttatagagattacgaaaaataatctataataatctttaagaattcacctaattgtttagttattaattacatctaaattactaccgcgaattgatttcttatagaaattaccaagaataatccataatttatattaaactttgcaattctacgactataattaatctataattaaattctaattattttaaattttctaaacttccctaatctccctctaatttctatttatttttttcttttctttttctctcctcttttctctcttttcttttctttttccttctctttctctcttttcttttctttttccttctctttctctcctcccggtttctctccttctttctttctttctctcccttggcttctcccttcctctctctctccctaccagaggcggcggcggcgacagcgcgcaaggaggggggggggggggcggcggcttaccgacggcggcggcggcgacataaggcgacggcgacacccggcgcggcacacggtgcggcgcggcggcactgagggcggcggcgcgaggacggcagcgcggcggcccgagggtggcggcacggcggcacaaggacggcagcgcggtggagggaaagaggggaggaagaggaaaatggagtggggaataatggagaggggtggggtgtttatagggaaaaggagaaagagggagagaaggaggggggtgacgcgacggcgggcggcgcggcgcagggatcggggcggccgggcgcaagatgacagggcgctcgcgcggcgacgggacggcacgtggcgcgaggcgcgaggcgcgacggcgacggccgacggcgcacggcgcggcaggcgacagcggcacagcggcgatggcgacaggcggcgatggcgacggctcggggcgcgaggcgcgcacggctcggggctcgcggcgaccgcggcacgcacagtgatggcgacgacgacggcagaggggaggcggatcggcgggcggcgcacggggcgcgagggcagcgcggcagaggaggggctagggctagggaacgcgatcgaacaccttgggagcaatgaatagtgacttttcctatttatcccgattttagtctatttcctatataaattccattctataattcctaatttttacatatactaattttactcaatatttgtgttattccaaccaatgcattcactcaagattaattttacccatattttatctttatataatttactttaattagagttaattcctattccatcgcatttaaatttaattgataccaatatggtcgtgataatattttatttatttctatcctcacctaatctttattttaaattatatttattttgccaatttatttttagggtttattcctaattaactattctttattcgcaattaatgaacttcgaaatcaaatccaaataaaatatgcgaatgaaatcggcatgatgcaattaatttaaaaagttattgaaaatccgtatttttagagttttgtttttattggttaaatttttagggtgttacagcaaccagaaagcaggctggagattgcaattctaagcacgacttaatagatcaaactcaactaatgcagcattaagtatgaaaagaagaacaatatctagacaatcaagccaccggaagtttcatagagtggtagatatatcacataatctaagttaacgtcattgtctaacctaatcggctgccttccattaacagatgttagccgattataggttagataaagatattatcgaagattatgtgagatatatgataactcgacgaattatacagacaagattagagtatcataaagatggaagcactaatcctgagaacataagtcgtcatgacaagttttacctcttgttgaggatcgaaaccgatgcagctcaacccgagagtacgaactcatcgaaataaaagtaaagcaaaatgggtggcgatgcgccgagattgtattggatgtgtgtcttttttttacatagggctcgggtctatttatacccgagaattacaagatacgtccataacagacatgactattatctctaacaaactctaagataccataagtctttacggcagacttttgcccaaacatatctctaaggaaattacatagaatatcctaattaatagatacaattgcctttccaggactctatccatgcgtggcaatcatcttgaagcacatcaacttgaacccgatgacgtacaccgagtcatattatcggaatcggctgtatcggctagccccgtccgactcgaactctgccgacctgaccttagccgatttggactgcagccgattcttactctattttcgcaacgatcttcatcttggattccacttcaatctgatcttcacctccgatgccaatagtgatagaatttactaaatttggtcgttaacacatgccccccaagtccggaatattggataatgtttcggatttgccatataccgactctgagagaaactcgcacttgctgttttcccgaccgttatcgctctgctttaaatactaatcgttgcccccaagaatcttcacgccgtgattttcgtcttcaccgctttaaacagatcccgtcctctctctctccagtgacctcctcaacgcgcattgcgatttccaggcgattccactcccggccagatcttcacccgcgacgatgtcgacctccaccaatccgaccgccgcatcatcagccgaatatgctgaggtaagtccccatcagctagatccccttttgcgttcatcagaccggttttcgctcaccttatcttgttttcttcttcgctattcttgtagcatgtttccaatcttgttgcggttcccagtctgttgcatgaccaacaatactttctcggtccaatcggcaatctagaccccgctgagtttatcatagccgaaaccaacagaaccccttttaggtcggccaatccaaacacaagccattggaaaaacaccttcaaatcctggccttctctggagaaaagctggcctgtatggtataagaggatatcggctagcaaacaagcctattgggatgagatcggaatcagccaagccctagccctcacaatagcaaattcggccaaagatgaacccctgatggctgctgcaacttatttctggtccaacactctcaatgctttccttttcaaccaagggccgatgaccccaacgctgctggatattatcatgctcactggcctagatgtaacctcatcagctaaccccatgaacctgaacaccaagaacacttttgagttcaaaactaagagcattgggggttggtcaggatatatcacagcatatatgggcaaagggccagtcactcctagagaacacgtagcttttttgctaatgtggttggaaaaattccttttctgcggatcaagctgcggtcctacaaccaactagcaattcttagccaaggccctagcaacgaagaaacaatttcccttaggcaaaatccttctctgctatctataccagatattaaacaacgcatcggccaagataattatcggctcagtggttggagcaggtggaccatggtggctcttgcaatcctggctgaacctggtagtcatgaaagttgtcaatcggccatctgtgacagaagctgaatttccaaggttggagccgattgtggaagatgatggagaagaacgcacccatcgtagatgtatgtcatacggagaatatgcatctactccagccgatgcaggagcaaagttatcggctgaacttctgaaggactggttcttcagcttttatgacggattccaaaaagatgcccgagtctggttcttctatgccgactcaatggatttcgaactgccagccgatttcaggttcgaggatattaatcatgaaaagtttcagcaatccagagaaatctttactactgctatcagcccatgtatcctcccagtcggcatccatcaaggaagaaatatccaagtcttggaatgggacaattgccaatcggccagacaacttggaatgggacaattgccaatcggcctgtactttgccaacaagatccaatgcagaggcgacatctcctcaactttaatgatggatcggctgttgaacatccctggacctccgttgggcagcattgagaacataaagctggcaaggttcaggagtagggcatttgacagatggtggggcgagtggaagctgcatctgttccatcaatcggcttccatgtacatgacagacttatttcctgatgctatccctcaggttaatcttcatttcttcaatcttgcttgaatagtcactcagccgatttgaaccttgactaacttttcttctgttttgtagacaacagaatcttctcctcctcgccagagcaatagcggcaaggtcattaagtatgctccgggtctaattcaaaatggaggtgggccatctccttctaccatcggcttcaatgcccccaagtctttagcacttcttcaagggctcatcagagaaccagccgatgctagcaagaagcggagaaccagatcatcagctgcagatacttcagctccggctccgaagaaaaaaactaaaacaaagaaagctaagccagctgatgatctgcccgccctagatccatccattgaacaagctctggatgaagaagaaatcgaggaagacatcgaccaggctacagccgaaataagcgatactgaaagaacaccatcggcttcacctaagcaggctcctccatccccttctgcttcagctcaattggcaaaggtaagcaactttctctgtccacttttgcagtcatttacttttgcagccgattcctcacaattttaataaataaagagaaagaaaatcgctgtgaggaagagatcggctacttcaacccctaaaccagctccaccagtaagatacttttatcatctcattaactgatttgggctgattatatctaatatttatccctttaacagcctcctcctccttcttcccctcttgtgcaggcagaatcagcggccgcactccatcggctgcaggcagtcatcatgttgaagaggaagaacaatgagctgcacctactatcccagtaagttttataaatttgagatcagccaatcatatcttgatccttaatcatccatgatattgtctcttgcaggtcttagccgatctgttctcctttgacatcaaagattacctcgatgaaacagaagaagacaccaccagtaaagcaacagttctcctgtctgatgatgtgaagaaaacactcgaagacatctcccatcggctaggagcatcactagataacctggtgaccaattgtggctcaatccgggcaagatttgcagatatccaagcctttcttccggacgaattaaccgacgctcttactccagctgtttacctcgagcagcatcaattcaaactggagaaagccaggcagaggttagccgatcgccgggagcgcaaggacatcgaggctacaatccaaaccaatcggcagtgtgttcatgaagagaaagccaagcttgatcatttatctgaaggcccgatcaaatctaatattgattggcttgaagctcgcaagattgaactcttggcacaactttaagaatgcaatgctgaactggatctagagcacaggaagttagccgatctcccgcaagctgtcgaagaacagaaggcaaggctaaaatcagctatcaagaacgttgctgagatgactaaatccttgaaagtcattcctggaaccgatgctcaagacgcccaaactatcgaagaaatagatcaaattaggcaaagggctatatcggctatccagcgatacttgtctcagtgatttccatgtaatagtctgcagaaaactgttgtaatcggctaagacaccctaattactttgctgtttatacaatccctgtgccatccttgtgccggcttgttcaaaaatttgcaattttctttgcaattctctatgtatgtgcccccctaattttacaatgttgaaaacattgacaaaattatagaaacaactaagggcgatataacaatatcggccatttgcacatcggcaaaccacaaccgattacaatagtgaaaagcaactaagggcgatataacaatatcggccatctcaaggcgatgtaaacacatcggctatcatgtatcggcaacactagccgatcatgcattaacccaaacactgggataatatttcttcaagtatttgccatttagagctcggccataaacttctccatcgagtccttgcaacatgtatgctcccttagataccaccttataaatttggaacggtccttcccaattcggcgaccacttgccaaatttgttatcccgagtcccaatcggcagaatcaacttccatacaagttcaccttccgaaaagtccttgggtactactttcttattataatgccgggcaacgcgctccttatccctagtaacctttgcaagggtcgtagccatgattgaaccagatcttccctttcatcggccataaggttataatactcattggcagttaaagtattttgcaactctgtcctcctcgagccgattcgaacttcccatggcagaacagcctcatgaccataaacaagtttataaggaggaacctgtatcaatccatgacaagccatccgataagaccacaatgcttcagccagccgagtatgccattgccgaggataatcagaaatcttcatcttaatcaacttgatcaaactcttattagatgcctcggcctgcccattagcttgtgcataatacggtgaagaattcaacaatttaattcccatgctatcggcaaattgaacaaactcatcggatacgaaaattgaaccttgatcagtcgtaatagtttgagggataccaaatcgatagattatatgctcttgaacgaactggatagcgtccccagaatcaactttctttaaaggaatggcctctacccacttggtagaataatcggttgccaccaatataaacttatgtcttttactcgagggtggattaatcataccgatcatatcaattccccaacctttaaaaggccacggtttaataataggattcatagccgatgccggcgccctttggattgctccaaacttctgacaatcttgacaacttttataatatctgaaacgatcctccagcattgtcagccaaaaatatccagcacgtcggagcaaccacttcattttatgagccgactgatgtgtaccacatatccttcatgaacttcgccgattgcaacttttgcctgatcgacactcaaacatttaagcaacactccatcaatcgtccgataatagaggtcatcatccaataaagtatatttcaaagccttataatgcaatttccacgaagccgattgagatggattctgtaaatactgaaacacatcatatctccaatcatcggctataatagtagcaatctctatctcgatatcttttgtcattggcttatatcccaacgctccttgagccaaactattacgactctatattctgttctcgagatatgtgcttcaaattcaccagcctagattcacttatcaacgttcggaacttttcgtaataaaccatcaatgtatcatccttgcattcatactctcctgccaattgactaatcaccaacaacgaatcacccatgatttcaatagcatcggctgctacttcctgaagcaactgtaacccttttaagaccgcctcatactcagcctgattattagtcacacggtgtttaatagcataggcaattcaaaacttgccccccaaggcgcaattataaccaagccgataccataaccatgactgcatacagatccatcaaagaataatacccaaggcataatgtcaaccaagccgattgaatcatcatgatgacccacaataaaatcggctacatcctgtcccttaatcgcctttggtgattcatgctgaagatcaaactccgttaaagaaaatatccacttgccaactctcccttttaaaatcggagccgatagcatgtacttaatcacatcggctttacacaccatagtgcattcattggacaacaagtaatgcctcaacttagtgcaagagaaatataaacacaaacacaatttctccacaggagaataccttgtttctgcatccaagagccgacggcttaaataaaacacaaccctctcttttccttcaagttcctgaatcaagaccgagccgattgacttatcaccggccgacaaatataaccggaaaggaatccctttttgtggaggaatcaatactggaggagaacttaaatattctttaatattatccaaagctttctgttattctgccccccaagtgaattgctgatcggctctcaatcttaacaatggtgtaaaaggttccagtcttccagacaaattagaaataaaccttcgaacaaaattaattttgccgatcatctcctataactctgtcttgttttccggaggcttaatctttttgatcgcattgatactcctctgaggtatttcaatccccctctcatgaaaaagaaatcccaagaactggccagccgatacaccgaaagcccattttgtcggattcatcttcaaaccatatttcctagtcctctcgaaaacctttctcaaatcggctatgtggtcctctatttctctggatttaacaaccacatcatcaatgtagacctcaaccaaccatccgatcagatcatgatatatataattcatagccctctagtacgtagctccagcgctttttaagccgaaagtcattacaacccattcaaacaagccgattgcaccaggacatctgaaggccgtcttatggatatcttcttcggccataaagatttgattatatcccgcgttcccatccataaaacttagtatcttatgtcctgaagcagcatcaaccaactgatcggatattcatccttcggggtagctttattcaagtccctgaaatcaatacagaccctcaccttaccatttttcttgataacaggaactacactagaaacccatttagcatatcggcaaggacgaataaaaccatcatcatacaaacgtttgatttcagccttgacaggttcaagcatatcggctttgcatcttctcggaggctgctggtgtggtctaatccctggttttaaaggtaatcgatgctcgacgatcgatcggctgagtcctggcatctcataatactcccaaccaaagcaatctctaaactctttcaaaagctccatcagcttggttctaaattccgaagacaaattcttactaatgaatgtcggccttggtcgatcacccggacctatatccacttcttccaaatcatcggccgacataaaaccctgaccttgcttgtatcgagatcatctaccgtgtccttggcgtagacgcttgaaccctccacaacgccctcaaaataatagcttggattcttcatcttcaatcagctgtcggctggcacaatctcaaccttgtcaccttgccattgaatcaagcattggtgcatggtcgaaggaatacaacaattggcatgaatccaatcccttccgagcaataagctgtaagaaccttttccatcgatgacaaaaaatgtggtagggatagttttactgccgattgtcaattattctacattcagaacaccctttgttcccgatgggttgccaccaaagtctttaagcaccatgtttgtcttgatgagatcctcagtagttctacctaactttctgaacgtagtataaggcatcaaatttaccgcagccccaccatcgaccatcatcttagacatcggcttcccattgacatagccatttatatacaatggtttaagatgccgattttctatcccctcaggcttttcaaagactgctcgttccggtgatagaaccaacttagccgattcctcttccagttcgtcaacatcggcctagtcaatcccgaattcggctggcaaagtaaagaccatgttaattggcgccgttaaaatacttttcccttttgccaacctctttgcttcgtcggctgcaatatcatcggctccaagaacttgattcttaacacgccactccttccttggctttgctttcctcagccgataccaatttcttgctcgacctcctgaaagcgctccctgctcctcaacctttgaacccttctttt

SEQ ID NO: 24435 - DNA, 11196 bp, Oryza sativa
cggtatgcaccatgttaacagggaaaggattaccatcaaccttcatcggctttttggaatcatcaaacttaatcttccctccttcaatggctacttgaatttgctgtctaaaaaccttgcaatcattagtagaatgagatctagaattatgccatttgcaatacctccttttgcctagttcctcagccgatggaattacatgaccagcggggagttgaatttgcttctcccggagtagcagatcaaaaatcttgtcagctttggtaatatcaaaatcatatttctcctcttttccagaattctttacccactgacaggtataacatttttactccttacccattcggctgcagctatttcggagtcatcgtcgtcatcatccgatccatacatgtaagggcagacatgattaaccctcttagagcttctcctggcctctgcaaacctctgttcatgcaatgttaccttctacacgagatgcgacaggctatcaaaatctccagatgagaatttcttcctaatcggaggaatcatgccttgaaaagccaaatcggctaactgggcatcagtcaaactcaagctaaaacacttgttcctcatctccctgattctctgaatatactcatgtacaggttcatcatgcctttgtttgattgctgtcaaatcagataacttcatctcatgaactccactatagaaatagctatgaaactgcttctccaaatcggcccaactattgacgcacccatacggcaaagaagaaaaccatataaaagccgacccagacaaggacaaccggaacaatctaactctgagagcgtctacagccgatgcttcgccgcactgagctaaaaatcggctaatgtgttcataagttgacacaccatcttgtcctgaaaatttggagaagtctgggattttaaatcaattttaaaccactcagggtaaggttgccgatacaattttccagtatctttcggcttaagcccaaattattctctcatcacatcggcaattacatcagcccatggtcgttgttgagctgctccttgcgactgttgccgtattggttcaaactgattatattgagaagcaaactgaggttgagttagccctccttgctgatactgaacttgtggggaaggaggctgatattgataatttatattgcctccttggtaattctggtaatttggctgaatactttgtaccaagtgctccggcacaatctgaggcatcgtcgtaccatctggctgtatatggtgaactaaatgttctggaacaacctgattcagggcatgtccagcctattgcccagccgattgattcatcaaggcttgctgcggaatcggttgtatagtttgttgtcccggaggtgttggctgaactggctgcacaacctgctgccttggtggagtctgttgaatcggctgcacaacctgttgccttggtggcgtctgctgaatcgaattgacagtagattggaggggtagaaacatagcagccacctgatcctatgctggccgatttaccgtctgcccgctatgctgtggctgctccctcatcaatagccgaggattaatcggctggcctggtgtcgacgatgatggagcaagcaaagaagtcaagtgcgcgggataagaaaggatggcataatatagtctcatttgcataaatagcatttaataaacatttcagaatttcataaaacagtaaagtatttcattaaacagtattaatccaacgctatacaacaaaccctgttgcataggcccaaccattctgaacaaccaatcccggctgcacagttctatctccaaaccaggaatatatcattccaaaccaggagctaaacaaattattaacatcatcatttattatggtgtgaaatatgagactaatcacgaaagacattgttagacctgcccattaccgcgggcacagctattcgaatagtttaaactctggccagaggtgtaccactgtacccacaagacacaacctcaacatcatgtcaaccatgcgtcgcgatacttaacaagtacccgaatagagattgtgacaataccctctatataacacaattcaaagcagtgcaccattcccggatcataatcacccccttgcaaacaaggcatggactccccagcgacccccgtgggcttatctccgccacttcacagtctggtgctctacaatgaaccatactatacagaaagtaaagccgttgcccacgctggcttgtggttggcacggtaaatgtttcacaaccaaaaatcgtgaaccggtccttaattgtcatgagcacgaccatcaataccatgtgctcacatcccaccattatcaggttttagttggcaaattaattaattaaccaatcatgattaaccatcatgagctatcattaagccatcattcaataatagtgaatcataagttatcccatttatatgagctagtgtctctaagcatggctaagcatcctattcactttagctaaaaccatataatgttctagctaatcaaattattaacaaagtgacaaagaatagggaaccaatagcaaaagggctataacaaggcaataggttatttccacccaatgacattcaaaaataaatgcagtagttgaatagaaacaatagctttaaacgggatcaacatgctcaaaggattgttttgggatctgtgtgacttgccttgctggccttggaactcttcaaaatcttctcctgcaaacacagactctccgggaacgtcggaatctaaacagaaaagagcaaaatcaccaaaacagcacataaacaagcatgaacagtacatgtggatatttttaacatgtagatctcaattttagaaaaatttagagacttgaaccaactaaatccgaacaaagatgacttagttatgaattttcaaagattaaatcggattaaatcctttatatagattttaattgaattatgacgcaataaagaattatttttgaaaaggaaaagaggattattgcatcagcgggctcggctcacggaacgaacggccgagatctatcctatccacaacggacggccgggatctatgggcccacgaccggtccacgggacacagtgacgatgacgtcggcgatgacgtcaccaccggcagcgactcgggcgcacatgctcgccggtgaacgacggcgcggcggctcaaacggaggacaccaacgggttgcgggcatcacggtgaactcactggtgacctaaacgacggcggacgatgaccggacggcgacggcgtcgaggaagaagcggcggcgaccttcggcttgacgacgacggcggtgttccggcggtcttcggcaaaacggaggacgggacgaggacggcgacgacttggcgaacccgacggtggccttcccaagcaacgacgacgaccggagcggtggcggcgcatggctggacaagtggcggtgacggcggcgcacgggctcacgaggctagggcgctacaggcggcggcgagctaaggtgagggtggcgacggatagaggaggtcccggggttctttttatagcggctaggggcggcgatggaggcccacagcgaccggtgacggaaaggaaaggttagggttcgagtgagagagaggaatccgattcgagatcgaatccaccgctttccaaacgattttagccgacgattccaaaagagaaaagatagaggggatcccggggatcatttcccctctattgatttcatcggagaaggaaaggcgcagccgaatttggaaggagacggcggcgtggctcggctagggttcggccacgcgacagcgcgaggaagacgacggccttgacaggtgggccccacctgtcagcgggtggacgcgcacgcgcgagcggcggctcggctgtgggccgacttgggccggggaggagagagagaaggttttggccgactttcggcccaaagccaaaagagaatttttaaaacctttttcaatttaaattattcatgaaatgcaattccatttattaaaaatacttccttggctcaaataaatcccagaaaaatctaggaactatagaatcaagtaaagtatttaataaaattttatctggcccacttttatattggaatttattatttaaaaattagatcttttcttctagacttttaaaatcatttctaataattccaattaaacaacaatttatatatttaggatttttagggtgtgacaaacctaccccccttaaacagaatcttgccctcgagattcggaagaattggcgaacagatgcggataagctgactttaattcatcttctcgttgccaagtagcttcttcttccgagtgattactccattggaccttacacaaaaggataactcgattcctggttcttctctcatctgtctccaaaatacggattggtttctcaacatatgacagatcctcttggatttctatctgttcaagattagcttcctcagtgggtacccttaaacactttttcaactgtgacacatggaacacattatggactcctgccaacgattgaggtaactccaactgataagcagcctcacctcttcgactgacaatcttataaggtcccacgaaacgcggtgccaattttcctttggtatgaaaacgatgaacccctcgaagaggcgtgacacgaaggtacacatgatctccttcttcaaaactcaaatctctgcggcgattgtcggcataactcttttgacgagactaagccacacgcaatctttcttgaatgatctttaccttctcttctgcttcccttagaatatcagtcccgaaaacctgacgttctctcgtttgatcccacaaaagcggggtgcggcacttccgaccatacagtgctttgtaaggagccatttgaagactagcttgataactgttgttgtacgagaattccgcgtaaggcagattcttatcccaacttccaccgaagtctaaagcacaagctctcaacatgtcttccaaaatctgatttaccctttcggtttgtcggtctatctgcggatgataagcagtactaaagttcaacttggaactcatctcttcctgaagtttcttccaaaattttgaagtaaactggctacctcgatctgacactattttcttaggaacaccatgcaaacacacaatccttgccatatacaattccgccaaacgacttccggaataggtggtccttaccgggatgaaatgagccaccttggtaagcctgtcgactatcacccaaatagagtcatgacctgatgacgttcttggtagaccagtgatgaaatccataccgatttcctcccacttccattctggtatcttcaagggctgcagcaaacctgcgggtttctgatgttctgccttgactcgctgacatacatcacatactgctacatattccgctatctcacgcttcatacttgcccaccaaaatctttccttgagatcctggtacatcttagtactaccagggtgaacggagtataaagtttcttgggcttcctttagaattgcatatttcaaatctttgttgtctgggacacagattctctcacccaaccatacagttccttgctcatcttccaagaaaccgatagcttttcctcttctcatattcttcttgacctcatgaatatcaggatcattaatttgagcttctctaacttgatcaatgaagtgggcctcgcttttaaggatcattaatttgagcttctctaacttgatcaatgagagtgggcctcgcctttaaggctgcaacgaaacctctactgacaattcccaaatttaatttttcaaattccttgcacaattccaatggcaactgttgcccttccatagcattacaatagcctttcctgctgagggcatctgctacaacattagcctttcccgggtgataatgaattcccaggtcataatccttaatcagttccaaccatctccgctgtctcatgttcagatccggctgggtaaagatatatttcaaacttttgtgatccgtatacacctccgtacgagtaccgaaaagatagtgacgccaaatcatcaacgcatgaaccactacagctaactcgagatcatgagtagggtagttcttctcatgcggacgtaactgacgagatgcataggcgaccaccttcccatcttgcatcagtacacaacctaactcaagcttggatgcatcgcaatacacttggaaacccttctttggatcaggcaaaatcaaaatgggagctgatattaagcgtcttttcaactcttgaaaactctgctcacattcttctgaccacttgtacttcacatctttctgaagcagtcgtgtcatgggcttggcaatcttggagaaattctctatgaacctccggtaataacctgcgagacctaggaaactgcgaatctctgaaactgtcttcggttgtttccagttggttacggattccacattactaggatcaacgacaactcctcctgctgagatgacgtgaccaaggaacttcacttcagacaaccagaattcacatttgctaaacttggcatacaactgatgttctcgcagcttctctagtgcaagacgaagatattcttcatgctcttctttagttcaggagtagatgagaatgtcatcaatcaagacaaccacgaacttgtctaggtattccataaacaccttgttcatcaagttcatgaagaaagcgggggcattgataagtccaaaagacataagagtacattcaaacaacccataccgagaggtaaaagcccgtcttaggtatgtcttcctctttaatcctcaactggtgataccctaatcgaagatctatcttggagaaaacggtggcacctttaagccgatcaaacaaatcatcaattctgggcagcgggtacttattcttgatagtcacatcatttagtaaatgatagtccacacacatcctctgggtatgatctttcttttccacaaaaatagctggagctccccatggagatgaacttggtctgatgtatcctttctgaagcaaatcatctacttgcctcttgacttctctaattcattggctgccattctataaagtctcttatggatcggagttgttcctggtaccagatctattctgaattctatatcccttttaggcggcataccaggtaaatcatcagggaacacatcggggtactctcgtactataagaatctcttccaaagttatttggttcagacttgactctaaagtctcagaaggcagtgcatgaacagttacgacttgaccgtcattgctggtgagagttactttcctattggcacaatctatcacacctttatatctggctaaccagtccatccctaggatgacatcaagatctttggattctaacagaataaggttggccagaaagggtacaccttggatctctattctgacagaggggctacgttgtggtgagagtgcttggttactcggggtactacccatcaaaggacgtctaagctcttctacctccatcccatgatttcccgcaaaactcatagataaaaatgaatgcgtagcaccagaattgaagagcactgttgcaggaactgagttaacggggaacgtacccaaaatgacatctagagcaccttgaggttctgcagcagcaacatggttgacacgagccttggctgctggtacggaggacttgttctgagcagggacaacctttacgcggcgggacttcggacacttgtcagagtaatggcctggttcgccacagttgaagcacactccgggcttgtttccttgttccctcttggcaggctgatgttgtgtcggagctgccacaggacgtggagcttggttgcagttgttgttgccagcattgttgttgaagaactaacgctgcggacgaacaacagacgaagaacctccctgtgacattaactggggtcccaaagtaagacgcggcctctgactattcccctgctgtgccttgaagtgaacaatccggcgtttcttctgctctatgcggttgtacttgtcctcctgacgaatagccttatccactaacttctgaaaatcatgataatccccagtcatgagtgggtacgaaagctcatcattcagcccttcaaagaacttctcttggcgctattaatcagtgcgcacatcttccggagcataacgagccaggcgattaaattcatgcagatactcggtaacagtgtgggatccctgagtgagcgacctgaactccttcttcttgagagacaccactcccgatggtatatgcgtctttcggaaagcagcggtgaactcaagccaagagataggttcagcagtagtcctgttgaggcggaaatgatcccaccactcagaggcagggccatgaagctgatgcgaagcgaaggagactttctcttgatcggtgcactgaagcaggtccaacttcttctctatggcgtgcagccaatcaccagcctcgactggattagtagtgctagaaaaagtgggcggcctcacacgaagaaattctgctaacttgttctggggaggtgcatggttatttctctggttctgctggttctggagttgctgcatcatcatgttcataagctgtgcctgttgtgccaggacatgggcaagcgttggattctctccattgttgttgttgttgttgttgttgttgttgttgttgttgttgttgttgttgttgttaccattcccaacgctgcgagtgagcaccatctggcatggacaggagcagaagaagagaaacgggggaaaaactacttaggacagagaattatttttttctactaacttaacttttattgatcttaactgagtttcattattacaaaactgaagactctcacaccactaaactcaccaactacctaacactcgaaagcaaacaaacgcatgcacttacaacccaccactgatgtaaaccacatgcaagacccacacacacaaccaaacttaaaacaagtaaaccaacacaacgatctagggcaacggcttgacaaggcattctagatcttccgggcatcggagttgattgaaggctcgtttggctcgtctccatcatcttgagtagctccccactcgacctttgaatgggtgcgcttcgattcttctccttcatcatcacttacgttgacgaccggaggatccactagggctggggtagcttctttttccaccacacgaacctttggcgccaactggtagcgagggacaaatagagctctcttccttgcggtaagacgaaccctggccttttgtggtggtgcttctcccttcaatgcggctagctccttctccaaccgatccaccttgtcctccagcttgcaaatcttaccacggttccggtcttcacgatcttgagctgctaacacaatctccgcgcgggtctcatccatggcccacagcatcttgaccaaatgccttgtggtagcatcattctcaatccccgcaggttcaaggtagctaccacggtcacttccctggggttggcgaggatggtagcgatactcggtgtcggccaaccgatcattatagctttcgcggagctctcctatagcgatccttgccacctcttgacaagcatgaatgtagcttccccctccagcctcgaacatcaccgatgggatatcttcacgattactattcaaggtgactttgacacggcacttctcttcatcacgatcatgaggaatctgggcatacaaaggggcaatcccaaatcctatgaggaaggacattgtacgcaactcctggacaaatccttcggtaccgaacaagtactcaggcttgtagcgcggcatctaagacaagtgaaaggagggaattaagtcatttatcccgttaatagcacaagtttttgggttaatttgaataaagttagaaaatcaaagtaaaaggtaaataaataaagtaaaccaagcttgcaagataagttgaaacagttggaaacaggatcacaaattttgcacttttgaacaacaggtttcaaaaaaaaaaaaagagggttataaaatcaacatgctaaatttatttcattgcagcaagattaaataaaacaatgttgtaaaacgctttgctggtaaatgggccattagtacagtaatagatgtacggtactgataacacaggaataataaataaattttaaatgagaacaattaaaggaattataaactgcatgtgccattagtttggtttaattaaaagagaaagggaggagaacagttctacttttccaatatttttagagggcttgtatgggtaaccatttggcataacctagggtcaaggaggctctgataccaacttgtcacgcccggaatttctatccaaaattccaaacgcttacatgtgtgaaccctcgtccaggaatcagccgaggcacacaataacaaattgataatagagtacaattattactctaattaataagcgaataaaatgtcattacagatgtagatagttcctctcaatcaataaagatctaagcagcggaaaaataagataaacggcgcagacgactccactccacaggcagcttgaccagggctacacctaatcctccacaccatcagcatcactgtagaactcctcctctgatgaatgattgcaaggtgagtatatgacatactcagcaagccacgcagcaaatatgcaagtgcacgggataacaaaggatggcataatatagtctcatttgcataaatagcatttaataaacatttcagaatttcataaaacagtaaagtatttaattaaacagtattaatccaacgctatacaacagaccctgttgcataggcccaaccattgtgaacaaccaatcccggctgcacagttctatctccaaaccaggaatatatcattccaaaccaggagctaaacaaattattaacatcatcatttattatggtgtgaaatatgagactaatcacgaaagacattgttagacccgcccattaccgcgggcacggtattcgaatagtttaactctggccaaaggtgtaccactgtacccacaagacacaacctcaacatcatgtcaaccatgcgtcgcgatacttaacaagtaccgaaatagagattgtgacaataccttctaataacacaattcaaagcagtgcaccgttcctggatcataatcacccccttgcaaacaacgcatggact

SEQ ID NO: 24436 - DNA, 753 bp, Oryza sativa
cggtgaggatgtagacatccaacaacggcggcataataggccagccgtgtagcggaggcaccactcggcggcgacgaaggcaagccggcggtgaagtcgtagacgcccaacagcggcggcataataggccagccgtgtaggcggaggcaccactcggcggcgacggaggcaggccggcggtgaagtcgtagacgcccaacagcggcggcataataggccagccgtgtaggcggaggcaccactcggcggcgacggaggcaggccggcggtgaagtcgtagacgcccaacagcggcggcataataggccagccgtgtaggcggaggcaccactcggcggcgacggaggcaggccggcggtgaagtcgtagacgcccaacagcggcggcataataggccagccgtgtaggcggaggatccactcggcggcgacggaggcaggccggcggtgaagtcgtagacgcccaacagcggcggcataataggccagccgtgtaggcggaggatccactcggcggcgacggaggcaggccggcggtgaagtcgttgttgctatcagcaatggcggtggcgaggacaagccggcggagtggactcgcggccgatcgaccggaaagctgagacgcctcgagtccatgaccagcatcaatcgcctcaatagtgccgcgtagttatatgcgaacaacaacaaaaaatagcaagaaattaatctgagattaaaaatcagtatgataaataatgataaaaatcagatt

SEQ ID NO: 24437 - DNA, 3675 bp, Oryza sativa
taaattattcatgaaatgcaattccatttattaaaaatacttccttggctcaaataaatcccagaaaaatctaggaactatagaatcaagtgaagtatttaataaaattttatctggcccacttttatattggaatttattatttaaaaattagatcttttcttctagacttttaaaatcatttataataattccaattaaacaacaatttatatatttaggattttttgggtgtgaaaattctagaccaagggtcacggtccgtctagcatttagcatctaggtgaacattgcccactaactattgtggtagtcagatttaccctctccccaaaactatacaatgctagacatttcctgtcaactcttcaaacctgacgagtattccccgaactcaatccaaaatgtttttgatctttggtgatacatacagggtagtccaggcagccaaaaacggcggggctcacctatcagtgcttcctttcctttcacctcctttcctttccctcgatccccattccccaatcgtacggaggtgggcaacagcctccatgagctgccgaagaagggcaacagcctgcatgagctatcggaaaaaggtacccacctgattcaccgttttcttcatccatgcttcccttcccttccctccccatatccccccttctcccatggagggtagcagccaacgagcatgtggaggacactagtggtgtgggcttgggggatcgctaatgggcgagtgatcgctgtaggcgatcacccccattccctccgctaacacgctcctctccccttcctcccccttcttctcttcctactacaccataaattttaaaaataaaaaacacaagttagaaaaaaaataaaaataaatctaatactcttatttatgtgtatagactttgcacgtataaactttatgtatagaaatacaatatatgaaaatatttgaattcaaattcaaatttgacttgggtatataaacttttaacttataaactttgggcacgtataagctttatatctagaaatactatatataaaaaatatttgaattcaaatttaaatttgacttgggtatataaacttttaacttataaactttgggcacgtataaactttatatctagaaatactatatataaaaaatatttgaattcaaatacaaatttgaatcgggtatataaacttttgacttataaactttgggtctataaactttaggtgtataaactttagatgtataaactttagatgtgtaaacttgaggtgtacaaactttaggtgcataaatttactaaaatatgaaagtaatgcggtcccaaaaaaaggataccacgtgaggagggctgatcgtgcggggggacgatcgcccattaggatttctggtgggcttgtggaggtagaggttggtggaggtgatggccggcgtgggaggcaaatcttacgttcgagctgagaacatggtggatctctataggaagaggcggtggaagacctcgaggacacgatgggggtcaggctcgtgggagccagcatcaaggccaacacacaactgggagaacctgacctcctcctcccacctcccaatgagctgcttgtaggatcgaaacacaagaactaagccaaccagaggggggaggtgaatggttggtatgcccaaaaaccaaattttcagcggaattaaaagttaccctcaactttgatgtagatcagtgatgcgaacccgctagggtttgtggcccgatctttcgatgagaggtaagggataactcgattggatgaagacgacgttcacggcccgactacaaccgtccaaagacgctgcgccttagcaaccgatacaccgtctccaatggtcgacgcgaacttgtggtgcgcgtcaacccggccacgagggcactcgtcctgcaagcaattgaagaacaagcaagaacaagtagaacaagcactgaaattgctatataaagatgaaagtttcactatcaaatacaatatggtggggttccgattacaggcagacgagcggtttagccaacacgcgcgctgtgagccggtagcaagtagctatctctatcatcaaaacccgaatgttcttggcggcgactagaggtataagaagaggggaagaacgaccatagggtcgtgctccaaccctaggacgtgcccctaatgggcccaacttggatacacagcccattgggccaaaagaggtgacgcaacaccatggacagaaaacagtcgggagtaaaatgacaattgcggccgctccagaatagatatggacatgtggctggatccatttgaaagtagacttgataagctttccatgaaatacttgcacgcccaaatcggagttcgcttgaagtcgtggcggccgtcagaagttggcgctgccctgcagtccgaatccaccccgcgcgaatcctcttccctttggatcctctccatcgttcctgagtaaaacacaagtgcacgcgtctccggggtataaagaagaggaatatgaactcaagaaagaactcacctgataatttagttgacgtgcacgagcgcgggtaatagaaccatcatgttgtacatggggggacgtggatgtatcgatggtgttgatgtcctcatcatcctccccttcttgcatttgagtcgtcctcgactcatgctcatcttcttctcccaaatacggcttcaaatctgcaacgttaaatgtgggactaaccccgaaatctgcaggcaaatcaagcttatacgcattctcattaatctttgctaacactttaaatggtccatcagctctaggcatcaatttagactttcttaaatcaggaaatcgttcttttcgcaaatgcaaccaaaccaaatctctaggttcaaaattcaattcccttctacctttgtcaccagcaaacttatacttagcattcatgcgctctatgttttctttagttgtctcatgcagttttaacatcaactcagcacattgcttagcatcaaaattcagtttttcagaagatggtaaaggcatcaaatcaattggagcacgaggcaacaaaccatacacaatctgaaatgggcacatttttgtagtagaatgcaaggaacgattataagcaaattcaatatgaggcaagcattcttcccacatcttgatatttttcttcaaaacagccctaagcatagtagacaaggttctattcaccacttcagtttgtccatcagtttggggatgacaagtagtagaaaacaaaagtttagtccccaatttagcccacaaagttctccaaaaatggctaagaaattttgtgtcacgatcagaaacaattgtgtttggcacaccatgcaagcgaacaatttctcgaaagaacaaatcagcgatatgagaagcatcatcagttttatgacatggtatgaaatgtgccattttagaaaatctatcaacaaccacaaaagtgctatcacgtcccctcttggtcctaggcaatcctaacacaaaatccattgaaatatcttcccaaggaacagtaggaacaggaagaggcatatacaaaccatgtggatgtaagcgtgacttagccttttgacatgtagtgcagcgagcaacgaacctgccaacatctcttcgcatctgtggccaaaagaaatgactagcaaggatgtcatgtgtcttcttgg

SEQ ID NO: 24438 - DNA, 807 bp, Oryza sativa
agactgttttaggagtcggccaactttgaattgcctcaacttggcttgatcaacctcaatcccctgcggagttacaacatagccaagaaaagaaactcgatctgtgcaaaagctgcacttctcaaggttaccaaataaacgtgcatcacgaagagcattaaaaacagcacgtaaatgattaaaatgttcacccatagacttgctgtaaatcaagatatcatcaaagtagaccaccacaaattttccaatgaaaggacgcaaaacctcattcatcaacctcatgaaagtgctgggtgcattagttaaaccaaaaggcatcactaaccactcatacaacctaaacttcgttttaaatgcaattttccattcatcacccaacttcatacgaatctggtggtaaccactacgcaaatcaactttggagaacacaatagagccactcaattcatcaagcatatcatcaaacctaggaaaacgatgacgatatcgaatgataatgttattaatagctctacaatcaacacacatacgccatgaaccatctttctttggtaccaaaattaccggaaccgcacatggactaagagactcgcgtacataccctttatcaagcaactcatgaacttaacgctgaatctccttggtttcctcagggttggtccggtatggcgcacggttgggtagggaagcacctgggatcaagtcgatttgatgctcaatgccgcgcaccggtggcagccccggtggcacttccttgggaaacacatcagagtactcctgcaaaatgttagcaacagcagggggcaa

SEQ ID NO: 24439 - DNA, 3410 bp, Oryza sativa
aagtgcaagcttctccaccatctcgctgctagccaagttgttgcagctacctccatcaatgatcatgcggcaacaacgctctttgacgacacactttgtttggaacaacgtgtgttgctgattttgctccgccttctccatttgtgcgccaaggacacgctgcacaatgaggctctcatagtgatccgcaaatgcagccccaatgtgctcttccggtggctcattatctgcatggtcagccgcaagcaaagcaagtgtatcatcatcgaaatcactagcagaggagtactcaccatcttttttgactaccaaaactcgcttgctagggcagtcacgctgcacatgcccaaagcccttgcaacggtggcactgaacatctctcgttcggcctgtggatgccattgaagaagcactcagtgctggctgagcagcctttgtcgctgacttgtcactagatggaggaggtgctgctcgactgattgtgggtgtggaagatggagaagcagtacggccggccggaggagtggtgcgtgtctgccatgatgaagttttacctgcagaaaaattagccttggcactagcacgtcgtccctgcacttccctttcagccttacaagtaagatgaaacaatcgggtcatattagtgtaatctttatagtctacgatgtcaaaaatctcgcggtttaacccacccaaaaatctagccatggcagcgtcctcagtttcctctaaattacaacgaagcaagcccatttgtaactcctgataatattcctctacactttttgcaccttgtctcaattgttgtaacctattcagcaagtcacgtgtatagtaagaaggaacaaatctagcccgcatgacccgtttcaaagcatcccaagtttgtggcatgttattaggatttttcttgccatgttctatccaccaaaccaaagcaaaatcgatgaactcactagtagcagctctaactctagtgttctcaggaaactcatggcatgcaaatttttggtcaacagcaatctcccaagagaggtacgcatcaggatcatattttccatcaaaagtaggaatcttaaatttaattttagaaaaagcatcatcattgttgcgtacctcgcgtcagcagcgaccacccatacctcgtcgattgttgtgtagccgtcgacgatctcgagcatctcgatcatcttgttcagtgtcagcaatatattcatcctccaaattatctcgacgtactttccgtcaatgtcatcgtcattacccccaccattgcctccagcattgagagcatcaaaatgcctcacaagagcagcaaggcaagtgtcaatgcgggcgaccgctgtctccagcactgtaagcttagtgttggtggagatctgcgtggacttcaattgtccaatcttctcatttgtcacctgcaaatctgtatcaagtccttctgtgtgctacttcacttgccttgtaaagtattggatgatgcctttggtgcgtggggaatgagatgcaccctcctcatctttattctctggacctgccatgggttagaaatgaaggacaacaaaacaatggaggatgtaatgtaagccctacacaactattgggatgtagcttttgcaagacgctcactctcacttcactcgcagcttgtctcacaagctcttaccagttcttaccttgcccacaggagggggacagcaacccacaagttagcaaccgtggaacaaggtgtatcggtgctgtagcaacaagacctgtcaagctgtagtcgggtttgtggtggagctgttggtggctgaaagcaatgctcaagagaaaactagaaaccacattagccaaagcaaattgaataatcgctcaagggtatagtgtacagtgctggtcctaggctagtcgaagtagagacacgagtctaaccacaaaggacgccacaaaacacaaacccaaacagcaacgaaaacaagaaacggtggtgcaaggtggtgacaaagggggaatggtggggtgtgctcgctggatcctcttcttccttttttttttgcttgctctctctagtgctgaggagagacaacttttttttttattatttttattttattttattgatatttttttcacaaccaggagcacactggaaccaaccacagaaaatcttgtctcaaacggacaaagtatgaagcttatagaattttttcaaagttctatgcgaataggtcccgaagcttctcgccacaaaaacagaattttgcaagtggaatttggcgattttaaatttgccgaacccggcaaagcgggggagaatcggatgtaactttttttgtagatgtccgtggatatattataagcctaatttcgagtccgtatgagaaaaatatgactgttttaaggaaggtcactcgaatcagggttctatttcctttctagtggcggcaggatacaaggcaactcacaaaagctatcggcaacagatcaaacacaaatagaaagtgatttggtgggtgactgcgacggcggtgacggtggtgatgatggcaaaattgatgaaggtggcgatgtgcggtggtggcaagaactcgaaactctaatcgcctaacactaagaccagcaaattaacacaaccgatgcaatcaaaaactcaacaagccttaactaagcagtactagtaaaaaggcacaatggtctataggatcacgggaaaactaatctactattttttttgttggtcttttctggactataggaaaaaaaattaatgacgaagggaagggtaaattctctcaccgaagaaccacgctctaataccacatgatgcgaacccgctagggtttgtggcccgatctttcgatgagaggtaagggataactcgattggatgaagatgacattcacggcccgactacaaccgtccaaagacgctgcgccttagcaaccgatacaccgtctccaatggtcaccgcgaacttgtggtgcgcgtcaacctggccacaagggcactcgtcctgcaagcaatcgaagaacaagcaagaacaagtagaaaaagcactgaaattgctagataaagatgaaagtttcactatcaaacacaatatggtggggttccgattacaggcagacgggcggtttagccaacacgcgcgctgcgagccggtagcaagtagctatctctatcatcaaaacccgaatgttcttggcggcgactagaggtataagaagaggggaagaacgaccatagggtcgtgctccaaccctaggacgcgcccctaatgtgcccaacttggatacacagcccattgggccaaaagaggtgacgcagcaccatggacagaaaacagtcgggaataaaatgacaattgcggccgctccagaacagatatggacatgtggctggatccatttgaaagtagacttgat

SEQ ID NO: 24440 - DNA, 733 bp, Oryza sativa
caacggtggcataataagtcagccgtgcaggcggaagtaccagtcggcggcggacgaggcggccggtcggtgaagacgtagacgcccaacaacggcggcataaaggccagccgtgcaggcggaaacaccagtcggcggcggcgaaggcaagccggtcggtgaagacgtagacgcccaacaacggtggcataataggccagccgtgcaggcggaaacaccagtcggccgcggcgaaggcaagccggtcggtgaagacgtagacgcccaacaacggcggcataataggccagccgtgcaggcggaagcaccaatcggcagcggcgaaggcaagccggtcggtgaagacgtagacgcccaacaacggtggcataataagtcagccgtgcaggcggaagtaccagtcggcggcggacgaggcggccggtcggtgaagacgtagacgcccaacaacggcggcataaaggccagccgtgcaggcggaaacaccagtcggcggcggcgaaggcaagccggtcggtgaagacgtagacgcccaacaacggtggcataataggccagccgtgcaggcggaaacaccagtcggcagcggcgaaggcaagccggtcggtgaagacgtagacgcccaacaacggcggcataataggccagccgtgcaggcggaaacaccagtcggcggcgacgaaggcaagccggtcggtgaagacgtagacgcccaacaacggcggcataaagg

SEQ ID NO: 24441 - DNA, 691 bp, Oryza sativa
tcctcccgggccaagtggcccgcagccgagccgccgctcgcgcgtggggtccgcccgctgacaggtggggcccacctgtcaaggcagtcgtcttccttgcgccgtcgcctggccgaaccctagcggagccgcgccgccgtctccttccaaaatcggccgcgcctttccttttccggtgaaatcaatagaggggaaatgatccccgggatcccctctatcttttctcttttggaatcgtcggctaaaatcgtttggaaagcggtggattcgatctcgaatcggattcctctctctctctcgaaccctaacctttcctttccgtcgccggttgccttgggcctccatcgctgcccctagccactataaaaagacccccgggacctcctctatccgtcgccaccctcgccttagctcgccgccgcctgtagcgccctagcctcgtgagccgtgcgccgccgttgccgccgcttgtctagccgtgatccgccgccgctccggtcgtcgtcgtcactcgggaaggccaccgtcgggttcgccaagtcatcgccatcctcgtcccatcctccgttttgccgaagaccaccggaacaccgctgttgtcgtcaagccgaaggtcgccgccgctttttcctcgacgccgtcgccgtccggtcatcgtccgccgtcgtttaggtcccggtgagttcccgca

SEQ ID NO: 24442 - DNA, 10233 bp, Oryza sativa
ggaggtacaggcgtaccgtgtgggcgcgaaacgggttggcctgggggtggcagctgtgttccccgaaggcggcgtaaagtcggccgacgagcgcgtcaaggctgccccacgcctcgcggagcaggcacgggcacggtgccggcagtgaggggtggctccgccggccgcacgcttgtccaccgccgccgccgcccactccactccgccggccgccgtcctcgccatctccgccgcgaccaatgccaccccgtgcgagcacgctctgagagagaaaagagagagagataggagagaaataggatatagagatgacatgtgggcccaagggcatttttgacatttcacgcgatttctctctcctccccaaccggaaagtattattttaatcggcgcggtgtccattggtaaattaccacgtatatggagtgttttcccctaaaagtgagtttgggcagtgtcctagtgctaaaaccacacataacaagtgtcctgtagcaaaatttccctaaaatttaatgtgtgcctagtgcatcatatcaactcacatcttctcatcccaacatttatcaactattggcacacaaggtagagcatcaccaccatggcgtccactttgcatcgtggatttttgaaaacaaattgtgatttgcaaacacgctgacaccaccaatcgagttttcaaaggtttataaacccattttcctatatcaacaagcaagtgtgaagtgtgtggtattgtcgacacctatgctcggggcatggttgccgaggtaccattagggggagcgacaaaggataaccctaatcaacatcctataggtatagtgcaactattaggtaggtttgttagtttgtttcgtgaactagggccagtcatatttatcatgcacactaggaatgcatttttttatttttttttaaaaattataggctaggagcaatatgatcaaataatgacttgcctctgtcttcattttcaaaatcttcgaacttgcttgtctagactaattttcgtcgacgtggactacacaggaaacaaataaaaccaagcaaaactaaacataaaataccattattaataactaatcatgccattatcaatatctcatttttaaaaaaattagagacttgaacgaggttgatcggagttaccaatagggagatatgaagtttgaaagattacaaggtttttctagaattagaaacaaaattaaaggttttctgtgaaagaaaaagaaaaggataggtggggttggttggattgggtagagggaggatgtaaagtagactttgtttgagtgggaggagattgttgggccgggggagagagaggaagaggggcaaggaccttttaggcttagcaggccacacaagccagctaaagccatggcgttgcctataagcgaggacacgcgggggcgcggtgtggtttgctgcctatgggccatgacctagccacgtaagcgccaccacatgggctgtagaccgggccagcgttgacccttaccagcatcaacagttggtggaagttggtggcgcatcaacgaatagcgtcttgccagactaggattagccaagaactattcgacgacatgtaatcaacggctagccattgacttcctcccgcctgtttctcaatgtggcgggtggctagggcttgtgattcaatgtcctaccctcttgtggggctttgtatatatactactagacaactttctcttcgaatagaactcagatactctaagtagggcacaaatagatataaacttgcctttcacgaatcggagtccaacaacgtactactctactatgttcttaattatccattgtattttcataattgcgtatacgtttccgcacaatattaggtatgtggtatttcagggcgttatgattccaattatagatgtgataccttatctaatacttactcacaggtttaactgtggcatataggaccatgacgctcatcaataatgccaatgttttctagattgataaaagtgccaatgtgcaccatataatctattttatatctattatattatgaaaacaaccttgaaaaaaggcaccacgttcgctgtggaggttagaaattttcacattaatcggagaaaaagaaaagaagagttcaagttgaacacaatttagaaatatctgaaattcggaattaaaaataactaatattggaagaagagtccatatagaaccgaatacgacattaattaaaattcggaattaaaaataaaataaattctgaaattagaaaaaaagagtctaactaggaatacaatttagaattatctgaaatcggaattaaaaataactaatatctaaataagggtccatatagaacaaatatgatattaattaaaacccgaaattaaaaataaaataaattctgaaattagaaaagagaaggatagttcaaataggaatacaatatagaaataactgaaatttgaaattaaaaataagcaatattagaagaagagtccatgtaagaacccgatacaagattaattaaaattctaaataaaaataaagttaattacaaaatttttagaataataaaaaatagagttcaactaggaatacgattttgaaacaactaaaattgagaataaaaaataaggaatattgaaataatagtccatatagaacacaatacgagattaattaaaatttaaattaaaaaataaaataaattcagaaattagaaaaaaaataaaagtttaacaaggaatacaatttataagtaactgaaattcgtaataaaaaataaagactattgaaaaagagaccatatagaacacatgacaagattaattaaaattcgaaataaaaaataaaataaattccaaaaatagaaaaataactataagagtccaagtaggaatacaattttttaaaaatatcatggtgaaagatgtggaattttttttttaaaaaagtccatctcgaacacaacaatgacaaatgaggggagaagcaatagggctgtaaaggagtagagtggtggcggttgatgggacatctaaagttataagaaaaaccccaaatagaatctcaacgacgattaagaggagggataattggtaggccattaacagcacagtcacagtggttgacgggtcttatagaaagtaaaaaataaaccttaatgataatcataaatctcaatgacaatagatagggggaggttgtgggcccgcccgtaaaaggagtacagtgggtaaagtcgctgacagtttgacgggacttttagaaaataaaaaatgaacccaaatgatagttatagttatgttcgatttttaaaaccccggtgacaataaagagaggacgcaacgggcgggccgtagaggagtactgttatggtgtttgacggaatttttaataattataaaaatgacaaccaatgagacaatgaactctaaaaactacaaggtccaatttttaaaggtttcaaggaggatgaataaaaacagtggtagatcgacaaataaataaaggggtgacaatggaacaagcggtagcgattggcgtgagttataaaaatataaaattagaaacaattggatgataaagttcagtctttcaaagtactaagataacgagttatctatttaacaaaatttaagtaaaatcatatatagaaagtagataattttgtatgggttgctagccgcgcaattgcgcgggccacccaactagctatattattaagctagcatgaaaagtaagcatcacattctctctagaggctagaagttcacacattaattggatataaaaagagaaacgagagtttaagtagtaagacaatttactaacaaaaattagttcatatagaacacaatacgaggttaattacaattaaaattttatgctagaataatttaataattctgcatcgtaacataattttgcttcgatgctagccatacatttgcacggaccaccttgctatgctagttgaatgaagcctgtagcaaaactctagtaattatgtatgtgcgccatttgggaaacaaaaagaggttaagtgttgtcaacgtctcaacgacaaagaagagatcatgcgcctagctacaggacatgcatggacagacacaccgtccagaggttagcgatggcgcgaggaaatgcaaacgctaaaattggcgcgccttaacatagcagttggcggcaccatatattctcctactcctcccagatcatcccaccagtggctaagagaggaagaaggagagaaacatctagagtgaataagaaagatggggttcgtccgtgccctgttcctgctggcgatggtgtgcgtggcggcgcacgcgaaggactaccccaaggaggagggcgcgaaggcggaggggccggccgccgcctcggggggcggcggcggtagcacccacgacgtggtgaagctgggcggcaagggcgacggcaagacggacagcaccaaggcggtcaacgaggcgtggacggcggcgtgcgctggcaccggcaagcagacgatcgtcgtccccaagggcgacttcttgacgggtcccctcaacttcaccgggccatgcaagggcgacatcgtcatccagctcgacggaaacctgctcggctccaccgacctcgccttattcaagtcgaactggatcgagatcatgcgcctcgaaagcctcgaaatcagcggcaagggcaagctcgacggccagggcgccgccgtctggagcaagaactcctgcgccaagaaatacgactgcaagatcctccccaacgtatgcatgcatgctttcctgtgatcgatccatcgagacatacacattaattatttatttgatcgaccatttggtatgatccatggatataaatatatgtgcagactttggtgctggacttcgtgaacaacggtctcatcagcggcatctctctggtgaaccccaagttcttccacatgaacgtgttcaagagtaagaacatcaccatcaaggacgtgaccatcaccgcgccgggggacagcccgaacacggacggcatccacatgggcgactcctccaagatcagcatcattgacacggtcatcggcaccggcgatgattgcatctccatcggccccggcaccgagggcgtcaacatctccggcgtcacctgcggtcctggccacggcatcagcgtcggtagcctgggcaggtacaaggacgagaaggatgtgacggatgttaccgtcaagaactgcgtgctcaagaagtccaccaatggcgtccggatcaagtcctatgaggacgccgcctcggtgctcaccgcctccaagtttacctacgagaacatcaagatggaggacgttgctaaccccatcatcatcgacatgaagtactgccccaacaagatctgcactgccaacggcaactccaaggtcaccatcaaggacatcaccttcaagaacatcaccggcacctcctccacgcccgaggccgttagcctcctctgctccgacaagctgccgtgcaccggcgtcaccttgaatgacatcaaggtcgagtactctggcacaaacaacaagaccatggccgtctgcaagaatgccaagggcactgccaccggctgcctcaaggagctttcgtgcttctaaacgatcaacccacgctacatcctgccaccaccaccattattttttcatttctatttctattttccaggtcacttatagtttttctctggcgatgctctgattggattgttctgatgcagtcggactatccgactgctctatagtcagattgtctgcagtggtaccggactatccagttagttctaagctgtttgtaagtttaagaaatttttggaaatacctattcatccctctaggtgacatatacaatcctcaagactctttcaatcacattatctcaaactagatggagcatacatcacataatagcaactattagcaatgtataccggtggttgcgatggtggatttggttgcttcgccggtgcattcagtcatgctcttacgggaggagactcaggagaaatggccgaacggggcagcgacactttgaggtggctgaagggggcggcggggcagggaggttcatttacaaggcgaaggaagatggagctagggctaggtaccaatctccggtgcagcttgctctaccaaatcaacctcctagcaaccaactcatatccattcaccaggtattccatttccttttaaatgtggagtaacttactcacaaacttttgtgggctatgcaaaagagaaatagcttgagggtgacgcctagtcagtgaggaggagaaccttgaagagtaacaagctgacagatgaaggtcaaatggcgatccagaagtgctcaagatgcaatacctagctctgagtagctcaaatccccaaatcccactccaaactcacaagagatgctcaagatagaaggtggatttcgtgttaatcctaatggaggctaaggaagtaggtctgataggtcaaacaacaagccatccaaagaggggtggtaactattaaatacttgacctacactaaaattagtcgttactgacaataaatttgaatgtcaaagggtctaatcaggcatattagaacttctaatccgtggcatccattgaatcgttcgatcaaccctctctgtcttgatgaggagcaccaatccagactttgtatgatgtccatcgaggaacttctgatcgcccttcctcaacatatagagagctttgattggaggtcctgattgcaattgatggaactttggatctggaagctatactaagcctattttcccatgcgggcgttgcgcaatgtcaccttctctctaaagactgaaggaatattgagcgtatggagacacaaatgttgatattgacttgaaaccctcataatatgcagcttttcctatgactcaatttgaaataaaaaataaatttaaacttctttagtcatttagccttgtttgcatttgtaggggtcgtcatacattcatgttaggcccttatttggtcgggttatgaatcatccaaaatagactaacacactaggggcctagatgcactttcagaagtaactatagtgttagaggagggggggagggggtgttggtatttcttaacaacattgctagaaatattcattccagcaatgtcgttagaaatgggcctgatatatttatggttacagaattaatccgcaagcgcacggatataccattgtagcatttcactcggaagtatttcaaggtatcgtatttttaatcccaagggaagacaataagagtgaactttactaatgcactttatacatatattacttataattgtcagagcctaagtaggggttaaatataatataaggtagagtgacatgaagcaaagctattcaatactcataacaaaataattctaactaagtggacgaagaaatagaaagcactcaattcctatacttctagtatacactcaaatcctaacttacatctgctaatgtataattgtgtggccaataaccctaacagtgtcctcctggtacttcgagagaccaccacgggttgccgagtttcttacaacaacttgtcatggccgtccaaccgaggctaaatacggaggagtacactccccaggaatttatcttaggaatatatactaacgtggaggaatacccaaactgagctgtcaccatcaacggcccacctctactatcccgcaacatatatgcccaattaatgatacttaataatctaagcatcatgcttatattgttaaatactactctatacccgcatgaccgacatagagtaactgatacagacattaaacccgcaccattacacctctctggtaggctacccacacaattatcataatgcagatataaaataagaccagtactcaaactaaataaagtaccgaagatatataaagaagagtacttcattaattcggaaatttggaaagtattacataagagattacaagagctgctagagccataccgaaaacttttccaaagactccgaggacttctgaacactattctattgtactccacttagcactatactactaatactaaagtatgaagaggaatttagcatgcttgagtgtgttgagagagtgaatgagctcctccttttatagggcccgtatgacggttttagctatgcgcaatttcggttttgcccttgtaaccgtcattgaggagtgatcctggacgtccatgtggagggccagccggagccgacgccactaggtttcagccgaaccaggggttcagtcgaacctgggccagcccagcagacaactagtttcggcaggtcgctaacaaatgggtcccttaggcggttttggcagttaaagtcggtttctgacggttgcacctgacttgtgggcccatcttatccatttgcttgtttaggagtgaggttttctccactttctctttattttatttgataaattcttgcaacatgttattctccaagtacaagtggaaatatattatttagaaataagcatgcattgtaagcatagctagttctccattattttagctatattgatggtcgaaattttgtcggtaacaaccgtcaacaaagggtaaatctaacacaccccgccctggcaccaccatcaacgtgttgatgcgaaacacagcggcctaggagatttgcttcactccagtgcaggaccaaggcttgcctcgagtgtcaagagcgtgtcagctggtttgatcctggaactaacaaggaaaatagaaaatatagttagctgcacgatagctgatcggctaataagccgatgacgtatcgctatgacctagccgttacagtcagaccagattggttgtgtgtttatgatacaatagataaagcaaaaccctaaatatgtcccattggctgtaatattacccttttggtttttgtcaatttgatttaggtaatattataaaatagctgattatccaatatttagagcagaatagatagaatacgggctattactctagtacaaacttatataggcaaatcgatctagataaatataccgaataatgaccaatcttagatacaatgatctaaccgtgattgactaagacttgatatataaagtgatctacctctataaatggcaaatatatatatataacaaactaaaagcatgcaacattatatattagataagatcagctgaaactctgatactatccctaattatgattaattccaagttagttttttagggttctagacaagactagggttgatgcaactcgaagtatgtaaagaaacctaaagtctaaacaatcaagtaattaaccaattttcaggatggtagataccttagctaatgtaatctagcaaggcaatttagccaataccagtacaaacctaaagcgagtctcagccgatactaaatcgagataatagactagattaagtaagatatatgataaacgatagctataaaaatgagaccaatacatctaaagcgatgcaatagccccgataatgcaaaccattgggacaagttacctcttgtcgagagatcacaaccgatgccccgactcgaagcaaaaacttgtctaaaacttaaagaaaaaggtggcgatgcgccgaaagttgtatttattggaagtttgtcctgttttataatgatcttgggtttatatttatacctagagtacaaaacttgtctattatggatatgactcaaactttcctaaagataaaaacaacaaacaagtccacatggaggactcataccatgtctttaatttaaaccgacattaaaatcctaattaataaatacaattgccataaataagcgaatgcaaaagactcggagacgaggttggccccgacagttggactgtagagaataccgacgccgttcccttccaaatgcgcgtcaaaaaagtttaattttcaagtagctttttttttcttgaactgaatttgaagctagctaggccttttagttaagtttttttatacactagctaggtagcttggctagatgtaattagatacatgtagatgtaagtatataaatctagttgggtatatgcctatctatttatagatgtaggtatataagcctcgtgtgctatgtatattctaccgatgtagattaagttggtgctgatatttatgaaatagtaggatggtaggtatatacatagtaccaaaatattctgtattaatttgcatgattacaacgtgcaaattt

SEQ ID NO: 24443 - DNA, 9390 bp, Oryza sativa
ccacccgtcgacagggtggtaactattaaatatttgacctacactaaaattagtccttactgacaataaatttaaatgtcaaagggtctaatcaggcatattagaacttctaatccatggcctccattgttcgatcaaccctctctgtcttgacgaggagcaccaatcgagactttgtatgatgtccatcgaggaacttctgatcgccctccctcaatatatacagaactttgattggaggtcctgattgcaattgatggaactttggatctggaagctatactaagcctattttcccatgcaggtgttgtgcaatgtcgccttctatctaaaaaccaaaggaatattgagcgtgtggagacacaaatgttgatattgacttcaaaccctcataatatgcagcttttcctatgactcaatttgaaataaaaaataaatttaaacttcttgagtcttttagccttgcttgcatttgtaggggtcatcatacattcacgttagtcccttatttggtcgtcttatgaatcaaacaaaatatacttacacactaggggcctagatgcactttcagaagtaactatagtattaggggaggggggagggggtgttggtatttcttaacaacattactagaaaatattcattccaccaatggcgtcatagatggtcatggtatatttatggttacagaattaatccgcaagcgcacggatataccattgtagtatttcacccggaagtattcccagatatcgtatttttaatcccaagggaagataataagagtgaactttactaatgcactttatacatatattaactataattgtcagagcctaagcaggggttaaatctaatacaagggtagagtgacacgaagcaaagctattcaatcctcataacaaaataattctaactaagtggacgaagaaatagaaagcactcaattcctatacttctagtatacactcaaatcctaacttacatctgctaatgtacaattgtgtggccaataacccctaacagtgtcctcctggtacttcgagagaccaccccggattgtcgagtttctgacaacaacttgtcatggccgtccaaccggggctaaatacggaggagtaccctccccaggaatttgtcttatatactaacgtggaggaatacccatactgagctgtcaccatcagcggcccacctctactatcctgcagcatatatgcccaattaatgatacttaataatctaagtaccatgcttacattattaaatactactatatacccgcatacccgacatagagtaactgataaatcagacattaaacccacaccattacacctctctggtaggctacccacacaattatcgtaatgcagatataaaataagacatgtactcaaactaaataaagtaccgaagatatataaagaagagtacttcattaattcggaaattcgtaaagtattacataagagattacaagagtggctagagccgtaccgaaaacacttccgaagacttcgaggacttctgaacactattctatttttactgcacttaggactatactactaatactaaagtatgaagagatatttagcttgcttgagtgtgttgagagagtgaataagctcctccttttattgggctggtatgacggttgtagttatgcgcactgtcggtttcgcccttgtaaccgtcattgaggagtgatcctagacgtccacgtggagggctcagccgaacccctggttcggcccttggttcggccgaacctgggccagcccagcaggcctccagtttcggcaggtcgctaacaagtgggtcccttaggcagttgtggcagttaaagtcggtttctgacggttgcacctgacttgtggacccatcttatccatttgcttgtttaggagtgaggttttctccactttctctttattttatttgataaattcctgcaacatgttattctccaagtacaagtggaaatatattatttggaaataagcatgcattgttagcatagctagttctccattattttagctatattgatggtcgaaattttgtcggtaacaaccgtcaacaggggataagtctgtcacaccccgccctggcaccaccatcaatgtgttgatgcgaaacacggcggcctaggagatttacttcactccagtgcaggtccaaggcttgtctcgagtgtcaagagcgtgtcagctggtttgatcctgcaactagcaaggaaaatagaaaatatagttagctgcacgatagccgatcggctaataagccgatgacgtatcgctaagacctagtcgatacagtcagactagatcggttgtgtgtttatgatacaatagataaagcaaaaccctaaatatgtcccatcggctgtaatattaccattttggtttttgtcaattagatttaggtaatattatagaaatagctgattatccaatatttagatcataatagatagaatactggctattactctattacaaacttatataggcaaatcgatctagataaatataccaaataaagaccaatctcaattacaatgatctacctgtataagtggcgaatacatacatacatacatacatacatacatacatacatacatacatacatacatacatatatatatatatatatatatatatatatatatatatatatatatacacgcatggatggggctccatggagtatgggctccaacgttaggagccgtaggatgcttactgatcgattttgatcatttgggtacatagcttaatgggtatacaccccgtttagtgtatagtatttaataatgaatggaatccatatatttgaatagacagtaacaaaaggaataaatgcatttatatgcatgcatgcaatgcggatgagagaatatccataattgcgtgtacatttcaaaaatggaaacattaaatacccatgaaattggaaataatatctttaaatatggaaacttacttgcttcacgatggggtctgaataaatggaaactaagtatatggaaaaacaaattattttttttggaaaaatggaaagtaagtatatgtgaaaatggaaactaagtatgtaacactaaatactgatcattggtttttggaaacatggaaactaattagttggaaatttattatatatatcgcagcaaattcattatattcaaatgtatttggaaacatgaataatatcgcaacaaatttatatggtaatgtatccgtaccaaattattacattcatgactccattaatttagcaatttgagtgacaaaatatgcaacaaccggtcactttccatttttaggtacggatgggtcgtatactcaaaaatttggtatgaaacggaaaaagaatcccatgcaatgaacaaatttcgattttagtctatgttaagtttatggcaaaaaaaactgggtattagaagtacatttttttttgtaattatatgatgtacagagatgatatattctcaaaaattaatcgtagtatgtgaaaaaaaaacttaggtacagttgtgcatcacgccgcctagccgtttgatttaatatatgttggatacttgaaaaatctagtatatactatctaaaatatcagtatataccggagaaaaattaagtacaatataacccataaacagaattgatttaggtatatacccattaaaaattgcatattttggacacccatttttagttaggtatatacctatctaaatgggcgtgaaaaaaatttgattttcaagtagcttacattttttttcttgaactgaatttgaaactagccaggccttttagttaagttttttttatactctcgctaggtagctgaccagatgtaattcggtacatgtagatgtatgtatataagtctcgtgtgttgtgttttctaactttttgggtatgtgacgtgcatacgtttcaaacgtactacaagctaggtatttacatgaatgcatttgagatgtacatttaattgggtataatactatttaggatacacatttttaggtatttaaacacgtatattgggtatgtgtgacataccatattctatttgggtatatactggtctaaacacacattctaggtatatacccattaaaaattgcatattttggacacccatttttagattgtagtttggtatatacctatccaaatgcgcgtcaaaaaagtttaattttcaagtagcttattttttcttgaactaaatttgaagctagctaggccttttagttaagtttttttatactctagctaggtagcttggccagatgtaattagatacatgtagatgtaagtagatgtaagtatataaatctagttgggtatatgcctatctatttatagatgtaggtatataagcctcgtgtgctatgtatattctaccgatgtagattaagttggtgctgatatttatgaaatagtaggatggtaggtatatacatagtaccaaaatattctgtattaatttgcatgattacaacgtgcaaatttcatgttaatacactgaaaagaacatcagtttaaaaaaacttgtgttaatacactagctcttagcgcgtgcatccaactggtgtttcttctgcccacgaccatcttctccgcatgatcccagggcaacatacgtatgtacagtctttggctcactaggaagacaaaccaaaaacttattagtaggatgcattcccatcttaaggtcttgacaacgaaatgaaattgttacagtactcaatctgcgaaaacggtagaacagggacttgtcaaaatacaagaataaattgaaatgaattacacacgaaccacgcgtggcgaccgtcggtgatagtagcgatgaacctcctcacgggcgacctgcggcggcgacaacgaaccttgcgaacgaccggcgcgcggcgcgtaacggcgtggttacgaagctaacggatgactgacaacggcaacgaaaccttgcagacaaccggcagtgatgaaaagctcgccgacgtccggccggcagggtaatagcgtggactggacagtggagtgtgtaaaaaatgaaatgtcgtaccattttatatgtacacaaaaagtagaaaatattaatcggtatttatggaaataaatcaattacaacctaattagtggaattactcaaaatttgtggatttgattcagtgtcatctcagatatggaaataaattcacacaatcatagggaaacgatgtgagcatgtgcaaaaaaaaaaaggaaagtatgcatcatatatggaaataaattatcatgcaatcggaaggaaattattacgtacatgtttgcttatatggaaacgatgtgagtacgtttatatggaaaggcaatcacgtcctgcaatacatgcacgcatgcaaatcatgcgggtactctaaaaatggaaagatctaatcgggtttacccgttaatatgtctaatactccggtttgagcagcacaaatctcaaagcacatatacggtggatattgttggagcccatactccatgtagcaccagttaatttactctagcatgcaatattatatattagataagatcagctgaaactctgatactatccctaattatgattaattacaggttagtttttagggttctagacaagactagggttgatgcatctcaaagtatgtaaagaaacctaaagtctaaacaatcaagtaattaactaattttcaggatggtagataccttagctaatctaatctagcgaggtaatttagccaataccagtataaacctaaagcgagtctcagccgatactaaatcgagatactagactagattaagtaagatatatgataaacgatagctagaaaaatgagaccattacatctaaagcgacgcaatagccccattaatgcaaaccatcgagacaagttacctcttgtcgagagatcacaaccgatgccccgactcgaagcaaaaacttgtctaaaacttaaagaaaaaggtggcgatgcgccgaaagttgtatttattggaagttcgtcctgttttataatgatcttgggtttatatttatacctagagtacaaaacttgtctattatggacatgactcaaactttcctaaagataaaaacaacaaacaagaccacatggaggactcataccatgtctttaatttaaaccaacattaaaatcctaattaataaatacaattgccataaataagctaatgcaaaagactcggagacgagattggccccgatagttggactgtagagaatactgacgtcgttcccttccagatggcatatccgaattacttcggataaaagctctgcctcccttagccattcgtcactcattatggatgttaactctgaacagtttcccttaggaagcccaattccataggatcgggaggtggcaaaggaacaagtgatttcttcttgctaaaatagttcagggtattgccatagtcttcgttaaaatcgtccctgaacagaattgcggcacgatccggagtctgaatttcttcattctcgacggacggctgcttagcaaccttctcatcaatcgagctagcagaagtggatggttcagtgagcggctcgatcgttagaggttcctctattttggacacgtatgcctccggttggggttcatcagattgcgtcatgaaggaagtattttctagaatatgatccaaaattgttcttccttccgacggcgttttgtgcatcaacgatcctccgacggttatgtccagatagaatgcagactccttatccaaacctatatggaaatgttgcagtagcacatattcgggtaaggatagggttggtccggactgcactaaattagtgaatctggacaggctgcaccgattgaaactgagaatttctactcgaagggcagtaatacgagtaactgggaagaaggaaagacagaatctgtctcgcaacttctcccaactacagcttacacatccaacagtagaggtgtaccattgctttgctctctcttgaaggaggtggctcatagaattcgccccgaggagcagacagctcaaaaagaagtttcaacaattactgtataacaattacctaaacactacgtctaagcaattaatatctactttagtgtttataactcactaaagcaatcactatattttagttgattatagtgaacaataatcccgtatgctatttaggaactaaccaagagataattctcacaagataaatctaaattacttaggaataatattatattgaattcagagtaataaacagaataaaagaaataggagaagattactgacaactccggaattcttccgacttcttctactctactctcttcctattctagtatacaatatagtacaatagagcctcttataattcagctcaagcttggaagtgtgtaagtgaagtgagggagtgatgtctttatatagcggtaggtatgacggttggcgaaggggaaatgtccaaagtgccctccaaccgccatcagggagtgatctggagcatccatgccaaaacctgggatcaacggtgatcaccagggttcggccgaaccagggctaagcccatctggcctagcctttggcccatgtcctcccccgatcctcctatgtttatttctcaggatttttgtttgattctcgggtattttgacaaagttcacaacccatccttgcatggatacatatttctcctcactttagtctagatttcctcccaacatcgggttttatccctgcatacaaatatacaccaacacttgtagaaaacgtgagattaagcacctattactatgttggatgttttattatctgaaatttatgcagatgttggcggtataaaatcgacatttaacagccgccaacaaaaccccccacacttagccctttgcttgtccctgagtaaaggttagtgtagaatgaattccttcaagatatgaaccaagcatataaaccattcacaaccatatccgtacttatgaactttatcagtggctatcttaccatcttgagtaattgatagatggaacaatctcgattccagtcctttttgcttctctgtcagactcatgagatttttataaattttcgcaaacaagctcttttcctcatattgactttctctcaaggatatatattttctttttggatccttaccaaggcaaagtgttccagaatttacccctattctaaggctgaaatgtggagcttggtagggataaatggtgacatacctacatcatatatattgcaaagccaaaaatattgactcaagaagatcatcagtcatactcctagatcaagggtctttatttgtggtagaaaatgggaaaggaaaaaaaatattttgtggaatggtggaataaagaaatgattctccccttttcctatactttctcctctattttgttctcttggcatgaatatggaagaggcatggctatattttctttccaactttgctcaatgttttgggcgcaagctttatttccctctctcttttttttatagccatgcctttcctcctttttttttatttctctttttgccaagaatttttttctaggagaagaaagcatagtctaatgtaggagttatttgaatggaacttttgtggaaagccaactttcagtgtagaagcttagcttaattatatatgtggaaaaaaattaaaatggaaatgaccccttgatcatgtgagtatgaaagatatctaacacgagtcatataaatttgacaaagctcaatataatgttaagcagttatatgcataataaggtttatcaaaggtacacttgcatatggccttggtgggtataaaatgaaatcaattggaggattgagcttttaaaacaattttattttgaaaacaaattcccaagagtcataacaaaagttgcgaaaattcctttcatcttgaatcatctcacatgaagctgggcggcaagggcgacggaaagacggacagcaccaaggcggtcgacgaggcgtggaaggcggcgtgcgctggcaccggcaagcagacgatcgtcttccccaagggcgacttcgtgacgggtcccttcaacttcaccgggccatgtaagggtgacatcgtcatccagctcgacggcaacctgctcggctccaccgacctcgccttgttcaaggtgaactggatggagatcaagcgcgtcgataacctcgaattcagcggcaagggcaagatcgacggccagggcgccgccgtctggagcaagaacacctgtgccaagaaatacatctgcaagatcctccccaacgtatgcatgcatctacacaacatgtattgatgatagagacatgcatcgatctcatttggtatgatccatggacataaatatatatg

SEQ ID NO: 24444 - DNA, 5707 bp, Oryza sativa
accccatcatcatcgacatgaagtactgcccgacaaagatctgcactgccagcggcaactccaaggtcaccatcaaggacatcacttcaagaatatcaccggcacctcctccacgccgaggccgttagcctcttctgctcagacaagctgccgtgcaccggcgtcactttgaatgacatcaatgtcgagtacgctggcaaaaacaacaagaccatggccgtctgcaagaatgccaaaggcactgccaccggctgcctcaaggagccgtttctgaacgatcaaccacgctacatctggccaccaccaccgttattttttccatttcaatttctatttttcaaacaaagacaagagagggaacatgtgtgcagattggtcgctgagatcatcgccggtcgatccaccacaaacactagaatttcgccctctttgcctccatgatatgcgtctagctgaaaattttgtttactaattgtacgatgcaactgtagaatcatgtgatgaataatcttggtgacgaccaaatttgaaagataagtgttcattgaaaatacggcgaatagtgttttctgtctgtgaatagtgtgttggcactgtttattcaaaatacggtgaatagtgttttctatagttgaacaatgtattggcattaggagccgggcggtgcacaccagtttgaccgcacgtgttcaggcggtctgaccaggtagcccgacggtcagaatggcagactgggaatcggtttcaggttgttttcgttaaatttctagattgctttatatttatgacttctagatggtttctattcctatgtgatactattgtgtgctgaagtgagtctagttggtgcgaacttttattcggatatggagtttttctttgttcatgtgcaggtgttgcttgagactatgagaatatagcctgtgatggatcaggactaggcttgggagaagttgaagtccagatgatcaagaatatcacgcgggatgctcagtctagagaatattacatagtggagttgaaggtttccatatagcgtacatgtggtgttgtgtgcatttggaaagaggaatcaaatttggattggtgtctaagtttgtaaagattgcagtgttgagttgtatggggatgttgatttcatggtttggtaggatcaagcttgggggtttgttgacggtcgttatagaccaatttcgaccgtcaatataattaaaataaaggagaactagttatgcttgctatgcatatttgttttagaataatctattttcacttgtacttagattctatctgtcagtagataaaagagatacaatatggaggaggaccaatagcaaaacactcaaacaatcaatcagatgctaatcagacttgtggacaaatgtgccagaaactcagaattgacacgatcaaataggcccataattcactgttttgagtctagaagcaaaagaggaggcgacctgccgagaactgggttaggccggcacagcccagggttcgaaccagtcccagcatcgttcgatccaggcctttgatcagacggtgggaattcactcccaacggcggttggagggtctttccgactttccaaccaccacaaccgtcattcttcagttataaaaggccctcacctcctccactcgttcacacactcaagcaagctcaagatatctcttctacactttagtttagtattctagtgctaagtggagtagaatagaatagctctcgttgtcctcggagtcttcggagaaatttcggtatggttttagtagttttccttctttcttttgtaaggctttcgaaattaatgaaatactattcattatatacttttgatactttagtatatctgagtatcgtctttactttatatctgtatcggtacagtcgtatagttagtctaccagagaggtgcagtggtgtgggtttaatgtctgattactcggttactctatgtcatctcgggggatgtagaatagtatttaataatgtagacgtggtgtctagattattaagtatcattatctgggcatatatgctacgggtcagtcgaggtgggccgctgtcacaccctgaaaatcactaaattataaatcattgtgaaaaaggaatttttagaaattacttaatgattaaagtaagtgtgtgaataaaatctataagaaatttgaacttaaacttgagctagataaaatttcattaaatattttgtgtgcccaagtattttcaggatttttcttggatttatttgtgcattggaagtatttttaataaataaaagatcatttcagcaattatttaaattaaaaagttaattaaaattcctcttctttgtctgggccgaattcagcccactcctctcctctctctcttccttagcccgcagcagcccactcttcctctctctcttagccgaagtccagtttttatccctctagcaatcaggcctagtaaagaaaaggaagcccgaaaaataagtctgttttgtctccctctgctacagtgtcgcccctaacctccagccgatcggtcttctctctgccgtgcccgtgtacagcgccacctccccaccaaattcgtcccctccgttgctcctctttccaaattggttgaaaaaacggattcccctcgatctcctctatcttatccccaagaaacccccttgaatcccgttgtatattgcgtgaattcgacgcggtttcgagctccatttttccggcgaaccctaactaatccgttgccgattcttcccgtatccgagccgatctcctcctcctttggctataaatagcagcccctcgacctcctcttccgtttcctcctttttcccgattttttccctagccctagagccgccgccacgctcggcttctctctcctatgccggccgccgctccagccacgtcgcgccgcctcctcggtcgtccccgacctgcgctgtcgcctccctcggctccgcaaggccgagctctaccccggccattggtccctttgtgccaaatcccgccggaagccgcttgccgacgcgaaccagagggtttcgacctttgccgcgcctccagccgccatccaccgtcgaccccgtggtcgccgaacctcgccgtttcctccggtggcatcgcagcgccaagccgaaggccatccaccccttcttcttcgccggtgttcgccgtaaagctgccgtcacagtcgtcccgatctcgccgctgctcgaagctcgtcgccggctgccgttcatcgtcgatcgtcgtcgtgtaagtgtgggtaaggacggtcttgttctactcttcgctttagtgctctcgctttccaccgttgtgtcatcgtttgtcgtcgccggccatctcccgttgccgtttttcgtcgccgtcaccattggtgagttcgtcgtcgcgtcttctctctcccggagctgtccccttatcgtcggagcgtcgccgttcagtcctcgttgttatcctgagccatctgccggtgatgatgttatcgctgacatccgcatcatctcgagccattgcaaaatcaatataaattctatcttttcaatgacatattattcctttttaatatatgtcatctatcaaatatgatctaatctattttcggagaatgttttaatcttttgtctcagctataaatcatttgtaaattgtttaatcaatttggaatagtcttttctttaataggtttaattggaattaaatcttgtaaaattcatatctaactcatacgaactcggaatgaggtcgttcaagtctcataattcatctaaattcaagctctacccatttatgaactttaattgtactattcatttggtttttattagtgtttttcctcgttttgcgttctaggtttagttttccgttatttcggagcatcgtttgttcgttggagaagttcttgaagacgaattgaagatgcttgtttgtaaggcaagtcacacagatcccaaacaaccctttgagcatgttgaacccgtttaaagctaatgttttatttcaacttatgcattattttcgaatgtcatcgggcggtgagcctttcccaattaattaatggccgaagatgactttattttcctatgggtaataaattgattagcttgaaccttatatattagtttggtttagctaaatgctatatatataattgcttagccatgcttagaaacattagctcattaatgggatgaatcatattatgttattatttatggttatatttaatggtagctcacgatggttaatcgtgttatgataattaattgataattaaaacctgattaaaggtgggttgtgagcacatggttttgatggccgtgctcatgacaattaaggaccggttcgcgagctactgttgtgaaacattaaccgtgccaaccacaagccagcgtggcaacagctttcccttttgtatagcatggttcattatggggtgccagactaagaagcgtctagaagtccatgggggtcgctggggagtccatgcctctggttttttaggaggtgattatgatccaggaatggtgcactgtggtgagttgtgttgtgcgaaggatattgtcacgatttccccctttgcagtgtcgtggtggtacttcggggcatggcaacatgtgtggaatcatgtcttgtgggtacagtggtacatctctggccagagtaaaactattcgaatagccgtgcccgcggttatgggcgggtctaacaatgtttttcgtgattagtcccacactactcattaatgataataatgtgataattaatttgactcctggtttggaatggataattcctggtttggaggtttgatctgtacgaccggggttggttgttcaggtttggttgggcctgtgcagcatgggtgtgctgttcagtgttgattaatattgaggattaattactctactgttttacaaattctcaactctttgctaaatgctgctttcgcaaatgaaccctatattatgccatcctttggtatccatgtgcacttgcatacttgctgtgtggcttgcggagtattccatgtactcaccttgcaataaccatcaaaccttagttgaagaaaaatgatccggaaggagaagacctttggcttagatcctagttgagctgcctgtgggggtggagctgaagcttcgctagattttattttccgctgcagttttcttcatggtgaggactaagtgcctcttatgtaagtatttatcgttttagttattttgatgaatctgtacattaaagtgtcagtttgtgtacctcagctgattcctggacgaggattttaatgcacaaattagtttggaaattacttgtgaatttctgggcgtgatagccactgatggtgacagctcagtacgagtattcctccacgatagtatatatattcctaagaaattttcctggggagggtactcctccgtatttagccccagttggatggccatgactggttgtcgtaaggaactatgcaacttggggtggtctctcgaagcatcatgaatggccactgttagggggtattggctatatggttgtatactagcaggtgtaaactaaagttgagtgtatactagaattatacgaattgattgttcttctatttcttcttccacttagtttaggaatgattaaatgagatatatgagtgctttgcttcgtgtcactctacttgtataaatatcttaacccacgcc

SEQ ID NO: 24445 - DNA, 690 bp, Oryza sativa
caaattccaagctcatccacctcattcctgccatcaaaaggtgcatgttttcagttgctggtgaataaaaagtccattttgtttggacttggaggcaaacaaatgaataaacagtgtttaaagagtaataatccagcaagtaaattgagtaataagtatcttgatatgcctcttttccggcaagtccaaacaaatggatcttttctactcacaactaaatccaaacaaatggctcttttgcagctaataatccagaaaaaatagagtatctagatcaattaatcaaatgactcttttccagtcacactaaacaatatctaatttcacagtaacaacaactataaacaatccagcaagtaaattgaaataggcagagtaataggcaattttgatacacaccatgaacaaaaaattcagccaccaatgaaacagtacctgaggatacaagtgcacaagagacaagttaaagctttgtacctgagcatacaactagcttagggaggactgatctgaccctgtccaaatgctatcatttgtcgaaggaggctctgagtatctgctgccatcttcctcaggctctcaatctcctcagcttgtttttccactttcgcatcagattcttgtgcctgcgccttcaatctttcaagctcctcctgaaagtactgcagactctagcttctttgcatctag

SEQ ID NO: 24446 - DNA, 588 bp, Oryza sativa
tttcctctccacttaaaaattgctgtcagcagatatattcaaaggagtcccctcatacattacttcagaaaagaacaaatgcacaaaaacacaaacatcaaatattcaaacaacatcatacacaacaatcaaatcctcagatcacaatttaaactgacagccatgttctaacagcaggttatggtgggacttagccatacacagatattttactcaaaatcactatattcaccatcatcatggattggcccttcattttcactgtcatattgtctcacagtttcgtcagcatcatcttcaaagccattttcttcaacttccaattccctttccctctggatctgatcaactagggaagcctgaacacaaataccatcttcataattgctaggctgctcgttgattgaagctctctcaagatctgcaacctgaaaactagtattttcttgctcatcatcttggtatgacaattcatgctctgcctgggccggcaggtcatcattttcttcttcgggcacattccacaagtgcctatggaaaatttttgaacaactttccaaggctcaccatgcttgttatcttctaagt

SEQ ID NO: 24447 - DNA, 616 bp, Oryza sativa
taacaataagggtcgcaccaccgagatgaaataactatgaagcggttggcttgtggtccatcaactacagtaaatttttggcagggatatgacattaatagatactcgtttagcacaagagcccgagatagtaagacttgtacgcaaaacagcggtgtccgtgtggaggcaattgatgaagccgggaaaaaacaatcatacttcgggtttattgaagaaatatgggaaatcgactatgggcacacaatgcaattccctatatttaagtgccagtgggtaaaatacccgaacggggtcaatgttgataagttcggttttactgttgttgacctggcgagtgtgggtcacaaggatgacccttgggtactcgccaatcgcgtggcacaagtgttttatgtgaaagacccttcaaatttgaagaaagatatagtgctatcagggaaacaaaagatattgggagtggatgggattgaagatgtcgaagattacaaccaatacgatagtatgccactttatagtcagtttgtacagaagattaagaatgtcgacacatctactcaaaagaccgtgaagccttacatgcgcacggacggtgtgggcaaaaatgttaaagggt

SEQ ID NO: 24448 - DNA, 647 bp, Oryza sativa
gtcttctttcagacataaggcagttctacgaaatccctacatcctgaattaaacaaacttttatcaaatcaaataaccaattaatcagcacataaatcaacatgctaatggccaaatgcataaatactcttcaatccttgcatggcatagctatggccagtgccacagcatgccacaagagagggtccgccactggcaagagcttcaatctcttgaaaaattttccttgagtttatctttctcatccgattcatgtgttttttttggggtccaatcaaacgaccattcctgtgtttttccgcgttttgcaatcatctgatttacacctacgttcctatcagaatgctgtatttttccgtttttcattcgtgcgattcaaagggctacttgatataggcacacaaagatagtattttaaagtgtgtcaggcttttgacaggttgatccaagcacatttggcacaaaataagtgaagtacagggacgatgtaggtcggtggacccatctgtcgtaaacccatactagttccttagtttctcacatatcattcaaatagttaaattctaaaaaaaatcatagattaatatgtgatatatacttcatacacatgtaagtttaaatacgacatataaaatttgataaaaaaa

SEQ ID NO: 24449 - DNA, 1507 bp, Oryza sativa
gattaaataattgatagtcttggctacgcatataaatccacaatatccccaccgcgtggttataccgacacctggacaaaagaaagtcgcacggataccaacagaaatcaacattttacacttatcatatactcactccgtttcaaaatatttgacaccgttgatttgtttgaccattcgtcttattcaaaaaatttaaataattatttattcttttcatatcatttgattcattggtaaatatagttttacatatttcacaatttttttaataaaacgaacggtcaaacatatgctaaaaagttattgatgttaaacattttgaattagagggagtactgagtatgccgcaagttggtccatagattaggattagaaccacgaattataagtcttcacacaacaatagcttcaaattctttatttagtgttgggatcaatcttcttccaaaataaatgaagcatctgacatgtcttttagaaagaaaggctcagctgacatccgaattccgaaagtgagtgatcacctttcaagtttttgaccaaatttcaccgaacgaaagtgacaccggctaagactgactcaacgatcctcatgcacggcgttcttccacttgccggccacctcctcgagcgcgcggcgcgacgccccgtccggcgaccacgccctcgccgccgccgccgcctgcagctccctcgcccggcgacgcgcggcgctccccttctcccctggatccatgagctccttcaccgccgccgccacctcctcccgcgacaccacgccgccgggcgccaccggacttagcggtagcgccaccccggctacctccgtcaggatggccgcgttcatcttctgctcggcgtgcagcggccacgcgatcatcggcacgccggaggacacgctctccagcgccgagttccacccgcagtgcgacacgaacgccgccgtcgccgggtgcgccagcacgcgcacctgcggcgcccacgacgccacggcgaggccccgcccgttcgtcctctccacgaagccctcggggaggaagtccatcgggttgccgtagctggcgcccatggaggaaaggagcccgccctttcttggcatgcgcaccacccagaggaacctgtggccgctcatctccagcccggcggcgagctcgcgcgtctgctccacggacagcgcgccgccggagccgaaggagacgtacaccaccgaccccgccggctggcggtccagccactccaagcacgccgactcgtcggcgtcctcgtcggaccttggccggacgaacggcccgacgaggtacaccggcgggaacgcgccgttctccccgtctcgcctgaacgcttccgcggcgcccggctccatctccgggaaactgttcaccaagaagccgtcggcgccgccgtatcgccgcccctcctcgagcacgtaggcgtagaccggatcggcagaatcccggaacccgtcggggatgtcgccgtggcggagcggcgcgcatccggggag

SEQ ID NO: 24450 - DNA, 1895 bp, Oryza sativa
tggttccaatttataagttctaactgattcaactgttgttagttgtaattgtcagattccctagtttttttgagttcccagttgaaatttgtgctggcctgcgattctattcagaagaagcaaaacagtcattaatttagacccatctgaatggagttctttagacacgagggaatgaaatgccattacttttgatacttctcttattcgtggtatacatggtatctttcacatgtaggatttgaaatttgaacttcaaatataagctggtttctccttgatgttgcacttaaaggtaataccaccattaaaagtgtccagtgctgtcatggaaaacttatggaagatataatcagtgttctattatcttagcctcatatctttggaatacatgaaggatttaacaaagtacagtcaatacagtttctaatccagtacaactgttatcttcttgagttcttgacatgattttgtatgtgttgcttgattataggtcagatggcgcatcaacatctaatatgcgtagaggacggcgaagaagtataagttttacccctgaaattggtgacgatattgtgaggttggtaaacccgacctttaaccctgagcaatgatacaatgtggttaattgaattgtttattcatagttttgcccaataatacaacttaacaacaatagtaaaatccttgcttgcatctaaatactcaatggaagaaaatttcattttcaaagaaataatagaactataaaaattggttatttggacaatccaggtataatttatccatatcatgcaacctggtttataaatctttgtgagttttgttccatttagcgaagttgtgtgtatgcgaactgttttttgttccaagtaattatgtggttttagttctctcttttttttaacttgcatcctgtatttctggctttctgcattgaaccgtttgtgtttctttgctgtcaggactgataggaacttttacttgcttgtttacagcgcagttcgagcaatgagtgaaaggatgagagagaatcgcctttcaaggggacaaatgatggtagtcctggacaattgaatgattcacaaaaaaatgtattgttttgcccctttttagttgattttgttgatatgctttgctgttcaattttcaataatctttatgtgacctgcttatggaggacagttgtatgctcattatccaatgcataaattttgttggaatggtttttgattatttagtctggtattcacatttcgtgattgattccatatgttatacaggaatcacctcatgatttcaatgacaatgaactacatgtaagaggaccagatgagcaagagggctcaagaaggcaagttagtaaccagaaggctgtgtcattaccttcatcgccccatcgattgcgcagtgatggttctggcctcagaggaccagccgagtttctgacagcagatctgatgtccacttggaataaggttttgcgatcttcaccatttctgaacaagcctttattgcctttcgaggaatggcatattgagttctcagagattactgttggcactcgagttgggataggcaagtacatggttcgctatctatattctgctacattcaggaagtccctgcattatgaaatacaccacttcgttagtttttatcttttattgaactttttagaaaatcataatgaatgatcaattatcccaatataaataaggatgttttaagttgaccttttagagtcaagaaacagcctcttggtagaatgtcattttaaaactgctaactcatctgaatgttttccagggttctttggagaagttttccgtggtatctggaatggaacagacgtagctataaaattattcctggagcaagatttaacaacggag

SEQ ID NO: 24451 - DNA, 5136 bp, Oryza sativa
  unsure (1)..(5136): unsure at all n locations
accgcccgccgccgctccacttccacccgcgacccctttgctccgcccaccgcccgccatccttccgcccgcagcccctttgctcgccgcccgccgcccgccggggtagagagaagagagagatggggtagagagaagagggaggctgacatgtgggaccacatgggctccaccttttctttttttagctgagatgtgggtcccacgttttttattattttcccgggatccatttgccacgcaagcgccacgtcaacgccacgcgggacgaggacctagtcaaagggagccacgtaggcgccacgtcatccaaaaccgggcacaatacttccgagggacctcttttgcacggttttgtaagttgggggacccgtcatacccggttttgcgatgaagggacgaaaatcggactgtgcgacaaatagagggacccaaagtgaacttattccggagagaaaaggggaggagttgggccggctgtagagaaaggagggggtgcggcccaaaaggaacaatagcacatgggaattttcgagagagggtttggaaagaaaattattgatttgactttgaattttgaattcaaatttgtgatttgaactcaaggaagaaatgggatatttttgagaggataatttgatggtattttgggaaggagaatattttggagggattttgaattgtaaaattcaaattccagggttcaaatctggatccgaatttttgggatgagatctttaggtctcaagggcagggattttgagatttttggcacttagtccttagtagcacacaaagaaccaaaaattttggaattaggatttgtataaaatagtttctaacggcccaaaaaatcggagctttacaatttcaggggaaatcctgcaaaaaaaaatgtaaccgtgtttacatgctaaaagttgggtctgaaaatttctgtgcactaatcttaatcatgagaaacatcacaagacatggtatacaaattttcttgaactctcactactcaatatcttcccctggatgctctcagctcagtggattaattgagataccgatccaattctcccttatttctgatacttgtgcataaggattgcgacagcatgttttgatatagttagttgcagtgaaacagcaagtgggacttgcaaaagtaaattcatggatatatatatatcctagccaaaaccaaaagatgaaaaccaggacttccaaccatcacattatcaccgacgatgatacacagagttaataacacatgcatatgaaactaagaacctcatgcgtttctgtgcagcatccatcctctgccttgttgctgcactattctgcaggttacaggcttgagctcttagcagttagcacgatgtaagatataccagcgacgagtctcaaaaaggatgatcgcaacttacgcaccttgatcgtttctgaaactgcgtaggtacagatttttaaaaagactagcacactgggcatggacgcacggccacttgtgttcgtcttccctgcgcggcattttctttttttttaccaattcaccagaggggagagattccccacctgaaaactttgtcattatctaaaacatcaggaaaagttcattacatagtactgagagtttgtagaggggtacagaagagttctttccaagtcgaaactacaggtctatcggaactcttcagtctttcagcccataggccggcttcgtccacacacttccttaggcatctgctgagcgatggagtttgatttctgaagcccagaagcataggagatagaacagctgaaaatgttttctgggcagcccttgccccggcttcaataggtgcagcatcttcacatcttatatcgtaggatggagccctatcttgttccagaaggttgttgcaaaaggacattgtatgcacagatgactagccgtttcagccgagctttcacaaatggcgaaaaccgccgagctgacaatgttcttcttgaagatattttgttttgttgataaccgctctctgctaagaaaccacgcgaagatttgaactttcatcggggctttgcttttccaaatgaaggtccagtttggagaggtttcgcccccagttagcaacgcatcataaatctgttttgtcatgaggtttcctgccaggttgttcgcattgtatctttggtctgcagcttgcgtcagggagtggtaatgtagcaggtccagcaggcagcagcattgccctgcgcggcatttcatcaaacaggcaagagctcccagccatggaaacctcccactcctccgctcttccccgtgcgagcagaggaaacaccgcaggactttatatactccgcctgaggactcttagagcctatggagacggcggacgatggccggatcccggagcggcgcgcgcggcgggggcagttgagtttcttggctgttggccggggaaacacgtcctgcgagtctcgcacggagcgtcaatggcgtgattaagcagcaaggaaattttacacgatcgttgatttacctccacgccgccgcctcctctgctcctcgcctcctccccggccggtcgccgcggccatctgcccatctccacgccaccgtcgtcttccccgccacgcggtaacaaaacttttctcgaggcgaaatcaactcacggcgttaatacttaatagtgggccggccaaagtacacgtgattttggaacaggatgccaggtaggaataagtctatttcgtgtcccttatctcttgccgcgggttgaattatctccctcaatcataaaacaaagtataacgcattccctatctctgaaaaccggtgtaaatcgtctcttttgattgttttggaagtgattttgtcctacgtgacgctcattggacccacatgtcagtgaaaaaaatgaaaaattaacagccccacatgtcgatcattctaatctctttttctttctcacctctctcccctctttcgctttcctattctctctcccagaaggaaaaaaaaaaagaaatctcaccacattagcagcaaaagatttcctcgtttgtcttcataatttgttgccctgggctcggttatgccaactacaaagcaaacgctctgacatagttcgatgagtgaaatacaccagcagttgctagctccgttgtctgtgtaaactttagtttacgttcctctctgaaagatttaatcttttttttttgaaaagaatcagcacgagattgtgctatttcattggatatagaggtaaaaaaaatacagcccctagagacaaaagggaaaactgaacacaaatacatagaggctaatgctacgaagggaggaattctccaagtcgccttgcgcctgccatgatccaggttcttgcctcttcctttattttcgccataagattgggagccgttgtttccttgtgctcaaagatccgttgattcctttccttccagatttcccacacaatgagcagggttaaagatctcagtcctttcttaggcacttcctttttgttgtttagcatgtcccaccactcttggatgctttggcatgggtcccaatggttcggatccaattgctgataggcgacccagctggccgttaatctccaaatcctcctggtgtatctacaaaaggcgaccaggtgacatgccgtctcgttcgtctcccgacataaggggcacagaccattattttgccatcctcttgcagctagccagtaagatgtttaacccaaaagggnaaatttgggtttcccccaaactttgttttgtatcacaagccacaaataaaatttgcatttcgcaggggcccaagatttccaaatcaaggaattgtagttggtgccgacatttcctagcaattgtgccttgtaggccgaggaggctgagtattctccatggttcgacagcttccaggtgatgtgatctggttcatcttgatttagtaggatgccctgggttgcactccacaaggacacaagttgtcttattacgtccactgtgaaggtagtgttcccgttgagcttaagatcttcaatccaggtgtcattttcaattccttcgcgcagcgacttgcctcttttcttggagattgcatagactagcggcatgatgccttttggtcgttgcccatccagccaggcggagtcccagaatcgtgccgtgttcccgtcccctactgtaattttggtagctgcggcgaagaggagtttgtcggtttcatcacacggtgtctctagacacacccacggtttggttggatgaaagatttaattttgaaactgatacgagcttactaatcttttttcttttaggatgggatggctatactcagattcactgaaagcgactgaacacaaacaaaaaaggttctggtggagataccagcttacaaggaaacatcaacttcagaatgcaaaacgccaaaatgcatgcgggaagtaaaaataatcagaactgtcaccaacatcaccccggatttctagccatcttcaaatttctttgaatttctcgtccttggatggcttcagagcacagcagcattgctgcaaaaatgaggcaagtttgtagcaaccatatgtgaaagcaacatcattttgaaaataagagtgctgcagtactgtgggaagttcttcatccttgaaatttgcacttgcatagcttaaactacctttaaagcttaaggtcccttaaacctgctgctggccggtgaaaatgtcctgtatcttctgccacctgcttcactggcaggtgaaagtccaccataacctatactgcctcttttactgacaggcgaaggtgaaaatgccgtgtagcttctactgcctacttcactggcaggagaaattccgccataaactgtacttcttacctcactggcaggtgaaattccaccccggctcatattgtgtgcttcgttgacacgtggaagtcccccagtttgcttcactgcattgtaggcatctccccaataagtttcagtgaaatcacttcgcgagtcatcttgaagcagatctttttccagagatgccagaaactcttccatggtgtcacctgcagatgtgctaacctgtgacaactgttcttctgatacacgagaactgtcataaaaataaatttgttaccatcaggcattgtgttgtgctt

SEQ ID NO: 24452 - DNA, 3352 bp, Oryza sativa
agtaaagttgagcagttaagttttcctttagaagataccatattatttaaagaagaaattaccataggccttcacgttttggtccaaagtatttggatggaattgggctttattgagatattttccatgatgcaccagatggcagtccattatttgttgaagaaatctgctggcatgttgcttggatagttggatgtcaatttgttcagtgtgattttcagaaactggtaaatctgttcagggtatcaacagaagcaaggcataaatcaggaagcatttgacatgaagtaatttccacagcaaaccatgaaggagtaatggcggcaattaagttactcaaaagaggcaagccagacttacttgctggtgctggacttggttgcattgagcatgatcccttaaggtaacaattgccattgctggtatgaaatgattcatgttcttgatgaacattcatttcttcagtgtagctagagtaatttgctggtcttggcttgcatttaagagcatggttaatgatcatgtcccaatcttgatcagaaatatttcccaaaatctatacaggttattgtggcatgttacattctataggagtacagaatagaaataaataatgaaattcattgcgtaccttacgcaattctttgggatttttatggaagaagcataaaaaatccccctccgtcttgatacctttatgctgtagtaacttgtgcctatcaccattcatggcaattcgagtcagtttttatacagcatcacagggagaaggatgttcactcttctttgttgctgtacagaaagacgccaggcattagatgtagaagaatgagacctagtagacatatgaatcagttattgatgaaaaggttcggtttaaaaggttgtgttcacacctagcagaccattgccaggatgcacaaaggaagatagtttcatacgtttactgatcaaatttaccttacataacagaacagttcttcaaattgaggattgtggcataataaatgatagagaagcctccacttttctagtttagggcctcattactaaatgatgctggatgctgcgggtttctcttttgagtatggctgtttaagagttaccggccttttaattaaaagtaaagacgctatgaggtgtaaaaataagtatcatgttgaaaaggcgttaggaacttgaatataacaatgttttgcacttgtcctttagctagcttatgcaacagaagaattttgttagagagattgacagaatgcatatatgtaatgagagctatttatatgaagagtaatgtgtatgattgtctaaacttttggtgctaggatgaaacttaatattacttacagaatccccggccatcctttacggcaaaagattcagatattccttcgaggattttttctgatatgctatcatcagctgccatgactcctaacctgaactgcttgcttggaagaaaactcgagttatcctggaatttggcaccatagaggttagccacaccattttccagccttagataaagttcgttggcaaacaaaggtagttttccaggccgcccatatactatgttctgaaggaaggagtctctattccactgcactttattgtccttgttaaactcgccattcatgacaacaatcctaacttgcattgaggataaaggtccatttgtgataatcttattatcatgatcatatatggctactttgataggactgccgtcatcagctgttatgacgtgtctcgagaacttgtcgttgcaacatctgttctcaaatttcagtcggtgcgttctaatttctctctgataagataagccccttaaaagttatgttaaatgatcaagtatactatgtccaaaattttaactaattagaatcacctacataaagtctactgagtggcgagcctgtgtacgagacgggccaaagatttgatacttcaattttctagaacaagagatttcctacctgtgattagtgtgtttcttaacatggtccccaggagtacttgtgtcctgtcacagaaacaaatttacaatcattagtcagaaagagcaataaataaattcagctcagcaaagatgctaaattcttcaaatgatgagattgttttttgacagtgaaacacggaatgacggaaatgcctttcataaggattttttttccttgactcagtttccttgaagttcccattttgttagtataaaaatgtcaaaaaaactatcaagcttagttgctattatatcgggttgtcctttggttcatatcattagttctgataattgtagatattgctgttttccgtagtcttcagttcagtgaccgagtgactttggtaggtttgtagcctttggtgttaccatgcattctcacaaggaagtaaagaactaagagtactaagaatataagggagaggacctagaaaattttcagtcaagaatagtcgaatctatcaaaacttgaaagccaattatgaagcttccaactataaagattaaacaagaaagtaggtgtttaccgaaatcaaggtgttgaactgcccccagatctgttccatcctcctctgttgctcactgatctgctcattgagctgcagctgggaattttggtaaaacagttgcatctctctctgtaagactttgcgctcttcaatgaaaccttttgacatacattgcatttctttcttgagtatttcaatctggctcttgtagaaatcttgtgtctccctatcatgcacataaagaagaagaaaattctcaaataagaaaatggtctcatcttattattccatacaaacttgcaagaaaagcataaggccttgttcgtttcgggcgggattgtggcccaaaccccatggatcagcctggcatgggaaaaatcacggcctgcatagaaatgtgtgttcggttaagcctagtcgggattctaacccagcccatcctagccttttcccctcaccccggcctgggaaaaaaataatcttatccagaggtgtggaaaaggaaaatgtatacgaaggtccctcaacttgtcatcgagttacaaaatcgtcccccaaccgcaaaaccagatatatgacatccctcatcttacaaaaccgttcactttaggtccttcggtggttttgaccccggttttgtccaacgtggcagctgactcagcgtgggactcacgtgggccccacatgtcagtatgccacgtcatctctctctcacttttttcctttgagccagccgaccggcgggtggtgtgggacgaggtcgccggggcgaggcgggaggggaggaggtccggcaacttggcggtgggccacaaggaggcggcggcctccggtttcccccggc

SEQ ID NO: 24453 - DNA, 6170 bp, Oryza sativa
ggcgccaatgacattggtgccgcgaaaaagatcatttctagaataagtttttttagaggcctatttgtaggataagtttttcaaaaagactaaaatgtgaaaaatccagtcagaatagcttccaggcactgtacaagtctaaaaactgtctctgcttgaagaaactctgaaaattaacacggggaatgattccaacttaggcaccttcctcgtttctgaaactggacatatgtagatttccagaagagagagaagagcataccaggaatgcacggcattatataaaaaacgtcatcattgccatggaaataacaggaacaaacaagaacaacaaacagggttgttggtcacagatcagaggtcagagccacaccaacaggttgctttccaatgaaatagtgcatagaattgtactaaatttagacgccttggtttttctcaaagcaaaaatataactatggtatgcataaaatgtactgaaagctatggtctgtaaatatactaataacatccaaatatgcactaaagttgaactgaatacaagcaatccgatgggagtaccttctgaataaacggcggcataaaggcatgcatcacccgtttcatcagtgaagtatatatatatatatatatatttttaagaagagtgaagtatattattcttcatccgtgaaatatttacttgtattgctgatattgtctgaaaacaagacaggcggcagtggggtaaaccataagcagtcgctgctactggcttctccaaagacttgttcaccgtagctgctactgcgtgcttctctgtgtcttctactgccagctcccctggcaggtgaaaatgaatgtctcctgtgtctcctactgcctgcggcccgtgaaggaggaagtcccctgtggctccaactgcctgcttcattgacagccccattgtagttcatgctacctgcttcactgacaggtgaatgaccccagttttgctccgctgcagtgacaggcgaatgaccccagttttgctcagctgcactgcaggaacctcctgagccaggagttcccgtgaaatcatgctccccccgccccacatattcactcagcaaattttctctcctctgtgcatttaccatagattccaactgcacatctgcgtggccatgaatccagtccaacgacgaattccaatcagatggattagcatgtgataatccattccctaatggaaaaatatgacagcatgcaaacatcagactattattccaaaacattaactaacaaaaagtgccacagaaataaagttgctaccatcaatttcagccgtattgatgtgccccaaagaatgttgttgctgtgagctcgacacttctaacatattgttatccatggatgaaaccgacataacctcatttcctaccgatgaaacttgccggtcgacaacttggatacgctcaagttgtcctgcagaaaattcagagcaaatctacctttaaaactgatgacatacaaaatatacacaccacagagaaaaaggccaattaccatgatgcatcaagttttggtctgaagtgtctggttggaacttggacctatttggcacaatcactgataatccaccggatgatagtccattacacgttgaagaaatttgctggcgagttccttgaacatcaagttgttctgtgagtttttgaagaatcaataaacctccattgggatatccacagaaacaaggaactacctccagcagcagaccatgaatggcgaatggaagcaatcaaattactcaagagaggccagtccaaacctaccttgtgatgtatgacttggttgcattgagcatgatccctgaaggtaatagctgccattgcttctaaaaaatgcctcatgttcatgagacacattactctcttgaaggcaactagagtaaattcctggtcttggattacatttcagagcatgactaatgatcaaatcccaatcttgatcagaaatctttcccaaaatctacatagggtgacattaaaaagaaaagaaaaggaggattaaaaagagaacaaaaggaggaactgttggtgatattgtatatgagaacaaattagatagcaaaataacagtgttaataattcattctcatactttacgcagatcatctggactcttgttgtagaaagataagaagtcctccactgtcttgataccattctgctctagtaacttgtgcctgtcaccgttctttgcaattttgctcagtttatatacagcatcacgtggggatggattgggattcttctttgttactgcagagaaagacattcaatgtagttatcctgcctcttatcctttgaaaaatattgatgtgtgaaaatgttttttctgtaaaataaatggatggtggccaagttttaaaggttcttaagtatctaaaaacaggttttacatattgataaaatatgaaatattcacatgggttaccaactagttatcgtgatccctaaattgttcttactactcattctgtttgcaccttccaggttaatggatgttcatgtacatgatagagatatcagcacagaggagcaaaataataagtattaaaaatataatagaatagcgtgaactcacagtatccccgaacatccttcacagcaaaagattcagttattccttcttgaattctttctgagattctttcatcagctgccataacacccaacttgaactttttgcttggaacaaaactagaattgtcttggaacttggcattgagataacccacaccattttgcagcctaaaatacagcttcccagacagcaaatgtcctttttgaggtcgtccaggtactattttactacggaagtactcttcagtccactgtcctttatgatcatcatcaaagtcaccatcgatggctacaatcgatctgaactctcattgaagaaaatggttcacttgttacgatcttgttgttacgatcatatatggctacctgaagggggctctcgtcatctgcttctattttgtgtgttgagtacttatcgttactgcatgaattcacaaattgtaatcgaagtggttcgctgcagttctgatcaggtaacatcctaaaaaatagtgcaagtacatcataaacatacagtgttgaactttaatatatggcagttacttatgtgtactcaaagaaacaaagaaaaataacacagagcaatacaggtatcccatatatgcacgtgactatatgagaatgagatatgatggactagatgttctcttttccctcaactcttaacttgctactttcttgagaaaaaaggtgcccggtttaattttagctagcactttttcgagaacatgtgagagccttggatgtcatttcactgagagccttgctagtagaacacgatgggtaaagttaggccaccaagcaagctgaaccctttgataagttaaccctccccaataggcaaacaagccaattaagactttaaagaaaggacttcataaataaattaagatcatcatggttgctcaatcccacaataatgacagcatgtgtgacaacatcccgatttgtggctagtacattccaaacctccctaactccacctctttgcaacagaaatccaaacgattaaccttcagaagatgacttcactatttatataatcttattttgtttcaacatcggataaaatatctagtcaattgacaactgacatagcaaaaacaaaataaagaaagctggaaagataatgcaatgttttttagtcctttacagcaaagtaaataaaattgcatattcttgcaacagagataaacattatgtttctataaaaagagatagacactatgtcagtttataggtgcaaattcaacatatgtgaaactacaaaatgaaaaactgaacgaaatgtgcttcttcatctgttaactaacatcataacattagttaaaatagcacaaaacttttcttaattcatgtacaattcaaaaacttaaagcaggtatgttgtaactccatgtacaaccgaaaaacttgaagcaaaggaaaatgtattaatgccaatattaccaagtaccaacctaggcgcagggattcgcttatggtaaccaacaacttcacttattgcctgccaatagagtttaaagagcatcactttctagacgtaaaatgcaaaattaatttgcaacaatattggtataaattctgataaacctcaaatttgatatacatcagttaacatatgacatatcttaagtacaaggtagttcattaatctattggctcctatccttttgagatcaaacaatatgtaaattttgctacttaagaactgagcacacataatactatccaaaaactacttttcaagatctcatatattgtatctaacagaaacaatattgtaaaggaagaagttcattttatcatccttaactttcatggaagtcttaaaatcaactttatatttcaaaactggacatttcaaccattctaagttcagcttaaggttgaaaagtgaatgattttgaaagttcaagataattttcttttataaaggaagttcaagattttaaagttggggtttgatgtggaagttcaagtccataaatgaacttcttcatatcggaaagctctggaatcatatcatcccaaccatgaagtctgaagcatacatttttgctctatgggatggaagcacaaattaagctcttaccgctgttaggctggaaactttttctcgcagctcctgattctccctaagcactaatttgatcctctcattttgctgctgcatcattcgattcatccgtagaatctcctggagcatttcagtctgcttgtcactgccatgcaagcgaaagaaaataagctcaatttcttacctctctaggctagcttaatagcccacaggtagtcatcatctgttttttttttcatttcacagcatattgtgcccattttattgggaagtgtttttgcaatactttcttctatgcaaactaaggctgtgtttgaatctgtgggttcgtaacccatttctcccgcagggaaaacaaggtagctcattaactcatgattaattatgtattagcgaaaaaacttgagaaatggattaatatgatttttaaatcaactttcctatagaacatttttgcaaagaacgtactccctctgtcccaaaatataacaacttttagctcttaagatttgccacagaatataacttctccatcaacattctcttcacaaccaatcacagccctccaccattcatttttcccacctacctccactactcatccaatcacaacccttcaccattcacttctacctactttcttaataaccgtgtccaactctaaaacttcttatattataggatggagggagtaccatttagcagttcgggaagcgtgcgcatagaaaacgagagagtagaagttgggaaagaggatgttcgaccgcagcctaaaggtggatctactgcaatatgtaccattttcccttaaattattatatttacataaatcacatatagattataaataaccgattttcttagtagagaagggtttatttatagagggagggaataagatagtgagaaaatatggattgagacacacttgaacacaaggttggcatgagcacctggcaactccctgccgctaggctacgatgctgttctcaggagagggatttactgacttacttctttttcactagacaggcatggtcaattttattaagaatagagaggcgtgaccaacaaacatggttattgtctagaaaacaacttggaactcaccagagttccgaacacaaggggggccttttaaaaaagtggtttttgcatattgaaccaccaacacaagttgctgagtttggatgaagataaactggagaaactaaatcctggtccgctttccctttaccaagcagattaatctgaggaggaggaggggggggggggtggggaatttacatcaacgaacatcatatggcacataaaggagagtgtgttgtgattagatcaaacaaaatactgcaaaagtgaaacataaatgaagcaagattgtagaagtgagctcactcgaaatcacaggagttccgcagtcgcttcgcaggcggtgatctttgtgatccttcgtcgtcattctcctcatgatcctgaggcag

SEQ ID NO: 24454 - DNA, 4059 bp, Oryza sativa
tcgtgtaatcttcctttgatgcacggatttcctagatttttgcaattcacaccattgacagctttcttttcagaaggagagagagagagagagagagaatgatccacgtgaatgttccatgaaacttcagccgttgcacagcagtacctcactactgagtcaatgtggagcagggaagcattaggtgcgtttgattccctgtatttcaacctggcctaaatggaccgtttattggaggagatcaacctccaagccgcctaccgcgtccgcgtggagattggagagaagatcgacacggttttggctttggaaaattgaagcggaaccgtctctagatgcttcttttttttttttttgacaactgatacttttcagatgaagctttcgtttcaatttcccgagaaaacacctaagtatatatcccaatggaatttagcatgaagccccatattcgtaatatttttctattgattttagtgggttcaaacaaaatgggcaaataaaaaacgaaactgttggggatgtgcgagacttaccacatatgtgccgactgttgattgacaactgtagattcgatggagaccgcatctgcatctctacgaacacgatctctcccggtgcggcatttcgccgaacacctctgcgtcgctccctgtcatgggcctgggcctgtcaagtgagctatgttgattgggctggcttgaggctgaggggaggcaaaggatacactataaaaggaaagaagcaacaggcatgaaggggatcgatgaatagaacttgtggctgctgcctcttcttcctcctcctcctccggatttctttcccactcctgctgttcttccaatctcaaactctgcttctctaataccagtcccttgcttccctttctagtcttcactcctatattccttgcaattgtatcccaattacttgagtgatttctactgtggatcgttggttccttcctgtgttgatattgatctgtgaatgagttgacggatcgtgacaatatggtatcaaagcagtcgattcgtggggtttcttgtgtggagatgaagtgggagagcgctggtggtcagaggaacagccaacaacttggtggtggtgtctttggaggagatgcccaccacctgttcgatgaaatgtcgagctgtccaagagctgactcagctgctgtccttcgcgtcactgtgagccagatcatatatccagtgacatctgaggtgttgcatcaagtgtacgatacctatggagcagtggcggtgcaggttcttgcggtgagcacatggcaagtcaaggctcttgtgtcgttcatgtccagccatgacgcggagagggctcggtctgccacccacggtcgcgacatctacgacgggggttgcttactggatgtgcagcacgtccagatgttccctggagatggcgccaccgccacgcacaccacctgttcgacgatggtaccaagtagcgccaccgcaaggccagtggccaagagtactgctgctgcaccagaacgcgtgttccctgctactacagcttcatctgtaccctcaattacatcagcagccatggtgacatcggttcctttcaacgagaccaagaaggctgagactgacatggacaaggtggtggagaacttagacaagaccattcaagacctgtgcaccaagatcgatcggatgctagagaggcatttcgcgacaccaaggtcagtacagaggccggctcaactaaccttgttgacacagccaagcttggcatgggaacaaccatcgagtgttcaatgaagtgtgagaaccagttggctgatgatgatgatggcaaagacatggccaaggaggagtggatggagctcatggaagtggataccatgttcaccgctatgtatttatgcttcagagatccatttttaatcatcaatgcaattcctcccaggaactggagttggtgcttgagccgtgcctactttggagttgtaggcctctctttcgtttcatcgaaattggaagtactctatggttgctttgaccggagcttagaatacacagctagccctccaccggtaccaccttggagagcagcaattccatggaacaaagctgagatgacctcaggttctcggcctttaccatggcctgatccacagctttgtcaaggcagcggaggcgtggtggtaaagctcttacaactctagccgccacctattcaaacaaatgttaaagctgaaattgaaacactgaatttatatggtgagtctcatcaagtctccttgaactacagtgttgcccagttcatgagtagaacaattaattccactgagggcttgctgcaaaatctgatggttggatggtgtatttggcatgagatatgtctctctggtgcctttaggaaggcctatcagcacacacatcattcaacctatggttgggcatatggggatcatgaattgttcttgctgctgatgctgatttcccagttgtcacctgatgcatggtgtgattgcttattcagttgtgataatgctgatggtatttgtacttgcaagtcacccgagagaagtaccaactgccatgctcggtgctgcagtgttccaactccatttcaggttcagagcaaaaacaatggcgtaataggtgatacttcatggactcaattcagatcaaacaatggtgatgctgtgctgttggtgccacaaccatggccacagccgattctcttcccagttcatattatggttgagctagaggtttcgttgaagggaattattgtctcaacaaaaaagttggtcaacttgcaatctttggctcctccttcgctttggagaaatgaggtattcaatttgtgtgcaacaggagggcaagggctaaatttttcctggaaatgtatatatgaagagctacagcagttgcaatgtacctttgagtttactctttggaatcaacatggacagacatataagctattgttacaaaaggagcagctgaaacttggtgcagtctatctcagtttggaagtaaaatcttcagagacatgcttcacttgccggacttacgaggaggacatgttcttacaaatcacaaattttgtaggtcacaactatgaggggagtaacacttgttctacccatcaattcagtcatggttggcctaaatatttggtaagagctaaattcgttcaattccaaagaggcaagattctttaggagcaagtgcaactggcatatagcaggccaaacgggcggcccggcccagcacgacacggcacgccgacggcacggcccactagggcacggcccgttaggcacggctcctgtagcgggccgtgccgtgccggcccacgtgccaaggccacggcccaagcacggcccaagaaggtgctgggccgtgccgggccggcacggctactgtagtggcacgtgggctggtagccggcccactagtacatgtggcccataaaaattgaaatttgagggaaaaaaaagaaaaaaggcagaaaaaacataatataaaggaaaaaatgataaatataggataaatgtgaggaaaatttaggaaatatatcataaaatatatggtacaaataggataaaatgtggaaaaaaaataaaaaatatgagaaatatatgggaaaaattagaaaatcgtaggaaaaataaatgggccggtgggccgtgccatgcctgggccgtgccgtgccggcacgctacagtaaacgtgccgtgccgtgctagcccacgggctgaggcatcggcccaaacacggcacgggataacgggccgtgccggcacggcccacaggctggcgtgccgtgccgggcctgggccggctacagtacttccgtgctcgggccggcccggcttggcacgacccatttggccaggtataaactggcattgtatacaacatcactggtgcgggtgacttgggatcctggtggctgtgttgtatcggcttggggacaagccgaaattcatggagggaggaatgtcatgggcctgggcctgtcaagtgagctatgttgattgggctggcttgaggctgaggggaggcaaaggataca

SEQ ID NO: 24455 - DNA, 741 bp, Oryza sativa
agtcggaggtactcattacaacaacattgaattgaaattacacgatagaagtatttagtccgaacactcattacatcacaacagcattttatttcctaaatcgaaagcattgttacaccatggaatcgcctgctgcgcgacgacgccttggccttgcgcgcctgcttgttgttccttcaccaggtggtcgcctaccatcacttgcctgtccagatggactagcatctgcgccgcttggaacttttgcattcttcgggcatttcttgtaagtatggccgcgcagatcacacttgctgcagcgtaaagtcctcccacctgcttctgactcatccatatcatttctgatgcgtctagtttggcgtcgaccctttttcacccttaacttagatggatctggaatgtaaaaaacttgggcactcagcgttgtgtaagatcctgagatcccgaacccatatatctgctcactccatgtatgaaagattgcttctttcctgaaataatttgagacgtacacattgggagatatgccacaatcaccggcagcagcaagaacgtgtgagcaaggaaggtgatgaagcttcggcttcatacaactgcaggtacatccaccatccgccttcaagacacattcctgcacggcttgcttgcgatagataccacgcctgctcctatcaacacacattatttcataccgatgcacttgtgtgccttgagcaacaactcgatgtctccgtgcctttt

SEQ ID NO: 24456 - DNA, 5650 bp, Oryza sativa
ctacgtttgacaaggttttcgaacttatagacaggtaccgtcataagttcctttgttaattaagaaaatcttgttatgttaattgctactacgaatcatagctttaaactccatgtagggcttggtatcggttccgtcatttggtccgcggtaaatggagagaaagacttattaattagttcaaatttcctgtgagtacacatgctctacatttatatttctccgattcaaatacatacaagtgtatattaattagatctctcgttgtttgtcatttatttgtagtgcgcaaagcaaaagcagggaactaacttgtgcggctattacgtgtgcgagtattgccactgccttgcagaccaaatcatcactacaagagagctcgatgtacgtacaaataaattcaaaattttattacgtagcgatttcttgtttaattactaatcaatttcatacattcatatagtttattcgcatgagggataacctgaccacacacaaggaatttatcgcggcggttcaagaacaacctcatgggattcatcacgaagaaatccttgatcccaagggtgaattctactacgacggaaacacaattcaccggtccttagcttctgagctagcagcgactactactacgtcgaaatcgtagctagctaggacatataatggattgtaattaatacatgactacatatgtttctatatgcatgtgtacacattttctataatgtaaatatattttggtcatatatatatctatatacatatgcatttgcataacatatatatgtgtaaatacatatatattatgcatgtatatacatataatataatataatataatatatatatatatatatatacatatatatatgtatgcatatatatgtattgaaacatatatatgcatggtttatatatatatatatatatatatatatatatatatatatatatatatatatatatatagatatatataaaccatgcagcaacagggccatgaaaaaaaaaaaaggtcagctcgatctttagtcccggattggtactcccggtttggaaaccgggactaaaggggagttacgaaccgggactacaaaggtttctccaccagtgaaaggtgctaaagatttcacttttttttataatctacagcgaatattttataccgtttagtagggcacgtttaaataaattgtacatgtagctaagtacacttcatgtcaagttctatgtgagagtaagatttttttttcagtaacactaacaataaaaatctcggtgctccaatagtagcatttttccagcaccaaaaactactattagtgtttttgaatatgctcaatttacatgttgatacataaaaaataattactgttgtaaattatttaccttgtagggtagaaaaaaaaagctagtgcttttgattttgtaagataggtagcccatgtactgaacttatggtcagaactaggggtgaaaatggtaacggtaattaccggccgaccggcgttcgttttcgactttctaccggccgagccatatggaaatggtaatcgaccgaaacaaaaatggaaatggtaaaaaatatggaaatgaaaacggaaatggttttgctgttataccgatcgtttccgtatttaccgtattctcgcggaaattaccgtttcttataatatggtaattaccgtattctaaatatgtcgatattataggacatgtctatacttgacccacagcttatagattgaatgactcttcaataaaatctctaacttttgtacatggctaaaatgaagttaatttataatttatatagtataagcttgaatttatgtatatatatataacatacttatgtaaagttaaatatatgtttttatagtttaatgtttccatatttgttaccggtttctgatctgtaccgacatgtttccgtccgtattgttccgtttccggttttccgatatttccgatatcgttttcgtttccgactttaccgtttccgatttcgtttccgagaaaaatatggttacggaaatggttgaggctgttttccgatcgtttccgaccgttttcatccctagtcagaacatacgcaactgctgccttattgttggcacggttaaatagttaatgacatgcttttcacttaccttattttggtaacatttcattaatatctataacttataataaagtaatagaaaaaatagcctccacattagctctcaagatctagaaactttcatattaattggaataaaatgggaaaaaaaaaggaaaactcattgcagacaaggattctttctttttatttttttaaaaaaatcacattatagatgtgtagtgtccgatcggacacctgctgacctgcatagaacaaatcttttgcagtttgcaaaagaaaaatcttttgcaaggaaaaaatgacctaagctggctgctagagtacccgtgtacaacacaaatcacaagtgtgcatgtaagtagtactcccaatattggctcattaacagcacatcgcaatcaagaaaaacacatacaaagataaaatccgtacccctatcactgtgtttgttacttcgagcagagacgggttgtagtgcctgtatgccagtttatttcgatcaatttgacttgtgcaaacctgatgatagctttagtgaaaatcacagcaagcccaagccatcacagacggtccactacagccatatgcatctcaaattgggctgagatgggcccacgttaaaaacttacttataggccggcgcatactaccacaattctggcccatatggaggcacgtcaaccgcgaccccctttcggcccagcgattcgtcgccactagaagaattttttttatttataattttttttattaaaagtttgacaaaaataattttccattttgaaaattgacggaagtagtcgcctaccgccctctgggagggcgatttttaaaaatcgccctctcatagggcggcgaaaatgacgtggcagacggccgttcgctctcgggcgacggccgtcaacgaaatttgcaggcggcccccttgccgccctccgcgagggcgattttgtactgtgcggggggccgcctgcaaatgggcggcgagggggggcatggaaatttacaggcggcccccttgccgccctccgcgagggcgattttgtactgtgcggggggccgcctgcagatgggcggctagggggcatggaattttgcaggcgggccccctttgggggcccccgggggcctccgttaggagaatatgtactgtgctctatatttttgtataaatatcaatagttatcaaatctttttatattgaaaactatacaagattaaaatctccaagactggtaaaatacaattttattattttttagggcatatttggattgttaccgtacaaatatttttttaccgtacaaatattttattaatttttagggcatatttggattgttagtgccaaatttttcttcacgaccaaatatttggtaaggtaaaattgcatttgatcatatttggtttgctgccaaaatgtaaaattgtagtgaagaatgttctacataatctcaaatctagattacgtattaccaatgaataggctttcattttcgtgtgttgtgtgatagtgggaaagaagatatgaagaggttgccttcagattgtcaattatatagcgtcgttttcactgcaatatatgtgaactcaatgagatacattattcattagatgtgacaagacgatcacgcgtgggcgtgattcactttatgtaaacaggcagcgccgaaagttgatagtgataactcgagctgccgcttttcatgtgtgctgttgtggactgtgcgcgctactggatctgacactaccgtgcagcgccgaaagtgtgttgtcgtgagcataagttgttctagcaccatatgaatgaaaagaactatgtagacgagacaaacacaagtagtactgcagtagtaatagcaaaagtagtactgctttacaagtttgtaagccaaaagaaacggtcacataaggactgaagaggtagaacactactgacgaggcctcttacccctgtccctcctaccctgcgccctaacgtgcccgtgggagtacgtgagtcggtccgggggtacggcacggccaacccgtcctgcctgtataggtgtgacctctggctgctcctgagtgtgcgcctctggagctcctccaagctgagaggagcctagtacgtcgtggtggtctgcaccgtgcaagtcgtcgtcgtagaactggctagtaggaccagtcctaccggcgtgagacgaagaggccccagtaccgaagatcccggctgcaaatcctgctggacaaggaccatcagtttcgtacaggtatttaacagtattaataaaaagtaaagtaccgtgtgggcgagggatcgacgctccgtgagaggaagagctggcgaacgcgcccgaagaggtggcgaacgcccctgcggagctcatggaagcgccggtcgtgcctgcgaacgcgctcgaaggcagacgaggtcctgcgatgaggaaacgtgcagttaaaacatggtgacataatcgtgcaaaagctgaaacaaaaatgaactaatatctgggctgaactgtaccgtgcgaaataggtgccgtaggtcgaggtcctgctccgacggtaggcgcgcgaggccgtggttgtaccggaccagctggaggtacgacgtccacggcgctgcgacaggagaagacgcgcatgaccgcacgcatcttctcctgcatccggtcgaaggtcgccctctgctcaacgtcagtcaagtgcaaacctctgttcaacctcacttggactgcggtgatatcggcactgatatcccgtgcggcatcagcctatgcaagatggaaataacaaattcagtagttgtcctatattatgcaagataaatgaaataattgtaagaagtaatacaaattggacgtaccgccacgaagtagtctcggtcacggtgcgtgggatacgcgtccgtgacagcggcaacgtgcggctctggggcgtctggagtgaaggtcacacgcgcacgagtgcgaggaaggtaccagcgaaggtactcacggtagttctcctccgtgtgtgggaagagctcgttgatcacctcctctgtagctaacacccagtcgtcaacgtactgctgtacacgtggagcccaaagtgcgcctgctagctgtccccgtcgagtcaacctgtgaagagaggtaaattatatggctcgatgaagtaattatcataaaaatttagaaatgaacaatccgaactcacgagtggtcggcagggaggacggtcggctgcacgttgcccggaaacacctgcctaagtccgaactgtctcatcacacgctgcgggcagtgaggctcaacgaaaatgtcgaacaccatcggcaggatggtgagccagtaagcctggtcgcgtgtgcacaaggacgaaagtcctagcggtgctctcgcagcgacggcctcttctgtgtacggctcccagatgacgtcgctcggctggagacggtcaaactcgaacacgaagtccgggtaaccacgtctcacctggacgtgagcgtaacaacgctgcaataaacatgatcggaattagacagggctgcag

SEQ ID NO: 24457 - DNA, 955 bp, Oryza sativa
cgaacaaccacaacaggtacgcctcaagggagcgtcggaccgagtaatcatcagcgtcagggtgcagaaggtccgcctacaattaagaatgaaatgttagtacaaaacactcattcggtcgcaaataagcacgtatgataataacaacttatttacttacagtgaactggagcaaccaagccttgctaggcccgactgtagagtacggaggaagggtggtggtcggtcctaggtgtggaaggcgcatcacctgctcgaagcgcgcagtgatatcctccttccacccaaaaaaaccgtccacgggaccaactgctgctcccgccagcggtagcccgagcaggtacgacacgtcctgcagtgtcggagccatctccccacagggaaggtggaacgtgtgcgtctcaggtctccagcggtctacaagagtggcaaggagtgaccggtctgcatcccaccgcttcgctgggtcacggtcgtccgccgccgcctcaacaagcctacaaagtggtagaaggcctgccgcacgcaacctgtatagagcaaacttcaaacataagtacaacacaaagcaaagttgagttgaaatgtgaacatacgcgtaccaaggaacgtgacgggggtcgacacgcaaccactcgcgcgacgtgcgtggacggaaggtgccgagctgtgcaccctcgactgctgacaggaacgagcggtggttcctgtcaatcccacggttcaacagcgccggtgtgtcgtacgccatacctgcatcaaataggttgatcagaaacatataaataattagttcaacataagtaataaatgttcataagcgaattactaacacatattaaacaagagtacaaacaaacaaaagtgtttagtccgaacactcatcacgataacattatgatacaacaccgaatagttcgcaatactactagtacaacaatagtcggaggtactc

SEQ ID NO: 24458 - DNA, 1830 bp, Oryza sativa
  unsure (1)..(1830): unsure at all n locations
tgtgcacagagcctcttaaagagctccataagatgcttgttcttgaattgcttgtagaaatttgcacccatgtgacgcatgcaccaccgactccgaacatcaggccacttagctggaagtcccttctcatcccaaccgttctgcaagtagtcaatagcccgcaacatacccgcatgacgatcatgtataaggcaaacgttgggcctcatacgcaccactgcaatgtgcactctctctaggaaccagtaccagctttcagtgttctcactctctacaaatgcaaaagccataggtagaacctggttgttcccatcacacccaattgctgtcaatatctgacctcggtatttacctgtcataaaagttccatctatgcatagaacaggtcgacaatgcacaaaagcattgatgcaagcacccaatgagaaaaaggctctttgcagcacactctttgttcgatcatcaaccgatgtaaatgtatgtaggtcatagtacgtattattattcctctgagcaatggtggctaacaaacgaggcaaattatcataagaagcttcaaatgtgccatacctcatctcaatgattttttgtttggctctccaggcctttgcatagcttatggtgtacttgaatttgttctcgatgtgcctaataattgattttggttcaaagccaatgttaccaacaacactgctgtacatctcacttgccacaaaagctgaagtgatgtttcggtgatacttctccaccccttgtaagtagcacttgtgctcggtcacaatgctaactttccaataatcattccatttacccttatatgcatggacacgccacgaacaatcttccttcatgcacctcacttcatacacataatttgttgacttgaccaccctaaactctctctgcaaggaaactgcccaatgcttcaccgcctccttcatctcatccttatgagcataccttgcaccctcaattacctcgttctccttatactcncagggtacatgatcaccctctgatataacaagtccagagaagtcctcatttgcccaatcagtggccattacatcaccttcctcatcggatgatgcgtcgtcgtccacttcctcattatccgaatcttcccttttcattcatcaacaattataccgactctctccccctcatccgccatgcccatagcctgctcctcccttggttgattttcctcattttgcatcgatggtccaacaacatcccttgcattgataggacctctacatcttcggtttgcattgaaacatttatatctttctcttgtaccgacacaaatataacgaggggccatgaccgttcaaaagccatttccacataccgtctccaagcatcagtgctgtccatcggcattagttcccaaaaataaccttctgttgcacgactcactacaactgacactgacattgtgtagacttcttggtctattctaaatcctctcaacaaccaattataaattgactgaaatgttctctccgcaggcctatcgatgcccttagatgtcattacaaaatctgacagatcaacaccatctggaccaaatctaatatttccttcaccgtgaactatctgaaatgtgaccttacttgacattgtgcctgatgaaaacaataactgcgttaacctcgcatttctgtactacgccctaagttacattctctacaatattgttctctaaatttctaaaattacgttacattctccagatcaaactaaactacatcttacaattaacactactgtctatgtctcaattcatactattatattctatgctctggatctacacatatgtgc

SEQ ID NO: 24459 - DNA, 10183 bp, Oryza sativa
caagtgttcgatgaaatgccgcacaacggaagcccggtgtccgttactgtagtctgtacctatcatcaggtttttgagaaacatttccggggaaatacgtatgttgcaatcatccattgaatacattctgagccctatgagcccagctataatcctgcaggatactgctgcaacagggcagacagacagaggattctgctgcacagcagggagaaggtgtgggggaaaatacgaagaaagagtagtagcaggactagctgctaaggtgtcaagagaaaattcaaaacattcggggcctttatattttgttgatctttttttttctgtgctaatgggagcaaaaccagttaaaattcgtgcgtcttcaactatttcttacaccaatctacgtatcttcctcatactcctacctgcaaacagatgaacatgaagagattgggaggcacctagcttaataattgaattcagagcacaagctgagagcaaagggatccgggggttgttggttcagcacagctgcacaagtggacattaaaaatcagcaaaaaaagataaggttttgttcattgatcatatatgatcacaccaaattgtgtatgcgcgcagaagataacagaagcaacagccttaaatattacatgatgagaaatacattgcccagttcacataagatgtcttgggagcccaggctatgctacccgtcgcaacgggcgagttcgagcgccttctcgaggttggccacgacttccgaaatggctggccgctcctcccactgcagctgcaggcagcgagctgctatctgcgccaccagttccgccgcctccagctgcctcggcgttggctccggtgccggccgcctgtccagaaacttccacagctcccccgcctcgatcagtatcagcgccaaggacaccaagctttggtgaccaatcccgtcctgctctagccactcataccacctttgttttgttgttttcccatcttcttcactctcctccttgtcctcttctgtgttcttcctctcttgctgatcacattcttccctcttctcctcttccacacattcttctgtcttcttctccttccattcttcagagaaatatggtttcttccccgtcaatacctccagcatcacaacacccaaactgtagacatcgactgtcgggttcagagtgccatctataatgcactccggggccaagtatcccaaggtgccttgtacgagaagatcaaccacatggtccgggccttcccatgtgagtgccagctcgaagtccgttaagtgcggtgcccagcttatgtcgagcaggatattggacgtcttgatgtcacggtggatcaccggccgctcagcgtaggactgcaagtactcaatggccctcgacacacctagcagtatctcgatgtgcatcttccaggatgttatcactggcgacgacgaccgtgggccgtgcaggtggctgttaagggagccgttctccatatactcaaggacgagtaggatctcttccagctttttccgaaacggtggcaggagctggcgcttctccttcacacagctgccaaagacgcggacgatgtgctcgtgactaaaggaacggaggatgctgagctctcttatgaggtctattttccctatgcaaaagtaaatagtacggagcatgcgtttgatggccacctcgcgtccgtcgggaagcctacccacgtacaccgggaagtagccccttaaaccaatttttctgtcaggagaaaagttgttcgtcgccgttgcgagcttcttaaaagcagggttggaaatttcggccgtttcggtgggtcccgatagacatgagctccggtcaaaaatttcggcaaacactgttcatggtcaaaatccccaaattcacggtcaaaatccccaatttcccatcccctcctcacttaccaaaggcggctgctgcttcgctatcctcctgcagctcgcccagcaggcagcaggtcgccgtcctcccaagctagcgaacagcggcggcggcggtgaccggaaccgaaggcggcgggttggttggagtggccagcggcggcgctccacggcgcgacgacgacacaagccgcgtgggcctcgcgaggctggacttctggagtggccggcggcgtctctgcggctcttcagcaccacgacgacgacacaagccgcgggcctcgcatcctccgtttggctggagttgccgccggcggctccatcgctcttcggcagcacgacgacgaccggacgatgacacaagccgcactagccttgcatccttgcgtgtttcattctcttgttcctctgctttggatttaatagactcgatgcttatctatactctgatcttggtcaaatttctttcttttttattgtttaaattcaaattttgtttgagaatttcgtccgaaattaccgaaaatttcggaaatttcggaatttcggtgacccccgaaatttttccccttcccgataggttgaaccttggtcaaatttctttcttttttattgtttaaattcaaattttgtttgagaatttcgtccgaaatttcggaatttcggtgacccccgaaatttttccccttcccgataggttgaaccctgcttaaaagtgaattcttttactccatggatttctgtccgaacaaactttgtggcaacctagtatatcgatgaatacacatcggaaagaaaagaggaactgaataccaaatcaaaagagttgcagttggtagtagtacaagtacaaacaattgaatgcttgagtcttcccatttcaatgtatacctgagcggcagggactggatttgggggcacggggaaagcaggcgtagatggtccgggcgtgttggttggaagcaggatgttgtagatacgatcgagacgacgagtgatgtctatgtggctgatgaatgggaagacgaggaggtacgagtcgatcctgctctgaacatctctgaacctctcagcctgccgccctgccatcaccaacctgtacacggcgctcttgtcctggcacgacaacacaagctcgtgcgcctcccggagcgtgtcgtcgagcccggtcagcggccgccggatctcaggccgccgaagcacctccggatcctgcaggtgctgcagcagctcggcgatcgtgaagacgcggcgggcgagctgctcgcactccttcttgttctgttgagccgtcatcgcagcctgcatgatcatggagatgaggccgccgacgtccgccccgaccagctgcgccaccgtggccgcgtgccccgtcacgtcccacagtgcgatggcactaagatcaggattctgttctttgttcctaacaaacggatcgacaaattaaggtgaaatgcagaggacggctaccgcgtcttgaagacttgatcctcagcgtctctctgaccttgcttattttatgctctagttgcccccctttttttgtgagagagggggataaggacgttgcttgtttttgacacaaattatatgacggaatcatgcaactgcctctccgtctccggtaaataaaatatgtccaataagttcatgaagtggacgtgactacgacgtaaccgtacactggattgtcatgaccagcgacctcactctcagatcgggttgctactactacacccaacattgcatgtattttttttcttcttataaaattttctcttaaattactcatctgatttacgatctgttacaccgttgtgttcgtaacaattaagatcacacataatctgttacctaacccattgccatccctaggtgcaaaggtaaaaaaatagcccagagcagttacgtaatgctctcccctagtttagcaaatttaagcaacgtgccattgctctgaacttgcacaatcacaacagagcagagataaaaacggtatgaaattttccagctgtaccggtaccattttcgatgaaatagtaaaaaaataaaaatttagtttttctaatttgtatatgtgtcgtattgaagttattactaactagtttcataaatatagaaaaatcctgtctgcgccaataccattttcaaataaataatatcattatcgatagttgttatccctaaatgtttgttttgaacttgtaacaacagtacaacgcaatcaagaaaaacacatacaaagataaaatccatacccctatccctatgccagtttatttcgatcaatttgactttgagcaaacctgatgatagagctttagtgaaaatcacagcaagcccaagccatcaaagacggtccactacagacatatgcatctcaaattgggctgaaaaatgggcccacgtaaaaaacatatttatagggccggcccatactaccgcacgtcaaccgcgaccccgtttccgcccagcgattcgtctccactagaacagaatccctcgacgacgacgaggccgcggcggcggtgccaacagcggagcagtcgagcagatagtgcaagcagtctcgcgccacgccactcccgaccatggcatgctgtcgcctcgagcgctcttgaaagagagaaggagcgaaaagttcaactcgccggagaggctatggtatactactggtatgattggtctttgagctccaagtgttcgatgaaatgtcccgctaaggaagcccagtgtccgttactgttatcaggtttttgagaaacatttccgggaaaatacgtcagttgcaatcatccattgaatacattctgagctttatgaacccagctttagtcctgtaggatactgctgcaacaggccagacagacagaggattctgctgcacagacatgcatgagattcttagttttaagagcagggagaaggtgtggggaaaatacgaagaaagagcagtagcaagagctgacaaggtgtcaagagaaaattcggaacacattcagagcctttatattctcttgattgattttttttttgtgctactgggagcaaaactagttaaaattcgtgcgtcttcaactacttcttacaccaatcgtcgtatcttcctcatacgacaggaagagattaacagatgaacaggaagagattgggaggcacctatcttaacaattgaattcacagcacaagctgagagcaagggatccgggggttgttggttcagcacagctgcacaagtgggcattataaatcagcaaagaagataaggttttgttcgttgatcacatgatcacaccacattggtatgtttaattgtgtatgcgcacagaaaaggagaggagaagcaacagcgttaattattacatgatgagaaatacattgcccaattattcacataagatgtctcgggagcctaggctatgctacccatcgcatcgggcgagctcgagcgccgtctcgaggttggccacgacttccaaaatggccggccgctcctcccactgcagccgcaggcagcgggcagccgtgtgcgccaccagttccaccgcttgcagctgcctcggcgttggctctgctgatggccgcctgtccagcaccttccgtagattaccctcctcaatcagtggcagcgcgaaggacaccaagtccctcctctttttcaaatcctcgtggagtttttgcgtcgtgtcctctttctcccattcttctctcttctgcgcctcttcttcacactcttctctcttgtcttctctcttcttctcctccgactcttcttcaaagaaatgtggtttcttccccgtcaataactcaagcatcacaacaccgaaaccgtagatatcgactgacgggttcagaatgcctgtcataacgtactccggtgccgcgtatccgtacgtgccaacaaccgtatcctcatggcctgggccttcccaggtgagcgccaacccgaagtccgtcaagcgcggcacccagttgccatcgaggaggatgttggacggcttgatgtcacggtggataatcggctgctcaccgcagtactgcaggtactcgatggcctgcgacacacctagcagtatttccatgcgtgtcttccaggacgccatcactggcgacgacgacgacgacgacgttgggccgtgcaggtggtgatccagcgagccgttctccatgtactcatagacaagcagatgctctttctccttttccttccggaacggtggcaggaggcgccgctgcttctcctcgaccaacacatcacagtagccatatagtggaacaatgtgcttgtagcggatgggggagaggattgtgatctctgccatgaactccttgtaaccctgaagtgagttccgactacggtgcttgatggcgaccacccgctcatcaggaagccttcccatgtacaccgagccgaagctaccttcaccgatctttctttcaggggcaaagttcttggtcgcctttgcgagctccttaaaattaaactcttggactctatggggttccttccagttccaacagatcttagcagtatcctagtatagagaaatgcacataatggaagaatggtaaaattagagctgagttctaacttctaagcttccctttgaagccaagtacaaagtgcaattgaaagtttgaggatatatatactccctccatcccattttaagtgcagccatgatttttccatgcccaactttcatcattcatcttatttaaaatttttttgaaaaaattttaaaacataagtcacgagtaaaatactattcatattttattatctcgtaacaacaaaaatactaattataaaattttttcaaataagacggacgatcaaagttgagcagagggagtattatatatgtatgcatttcaatgtgtacctgggaggctgggacagggatttggggcatggagacaggagacatagatggcccggccatgtcgttcggaagcaggatgttgtaaattcgatcgagacggcgagtgatgtccatgtggctaataactggaaagaggaggaggtaggagtcgatcctgctctgaacatccctgaacttttcagcctgcctcccggccatcaccaacctgtacacggcgctcttgtcctggcacgacaacacaagctcgtgcgcctcccggagcgtgtcgtcgagcccggtcagcggccgccggatctcaggccgccgcagcacctccggatcctgcaggtgctgcagcagctcggcgatggtgaagacgcggcgggcgagctgctcgcactccttcttgttctgctgagccgtcatcgccgcctgcatgatcatggtgatgaggccgccgatgtccgccccgaccagctgcgccaccgtcgccgcttgccccaacccaccccacagcgccatggcagtatctcaagttctcaactctcgggaggattgtgttcttgctaccaaattttcgcggaattatggatggacaaagggtcggtccagggaaggagatgactgacgcggtgagaggaattttcctggaagtgggttggtgtggactgtgaaatgattttttttttctttaaggccgacaaaagctttgggtttgtgtatatataagagagaaagcaacgagtggaatgaattatattttttttaacagtctcacacagccacagctcagagtttagacttcaaagtacgtccctgtccagttagaggggtaaaaagttttggcgtgttatataggatatacatacacatttaaaatattaaacgtagactaataattaaacggaatgtgaaggagatttattttacacatattatgatgtggatatactccctctcaatccccttcatttctccttgcttagggattaaacgaccaaggccttagttgtatatatggtgaaaatcaattatgaaatgagaagaaaaatcatccccaactgatctatcttcttctacttctgttcttcttcttcctcacgtgtcgttccaagtccacccgattcccgcgaaccacgccgccggcgattgggtcgtgacacgcacacgcctttagttagttggagtttaacgcggagacacttgaagttgaagaagcaaagcgcgtgtggctattttgattacttaattaggcaaatgattttatcgtctagtgctgagttactgacacagtgatccgaaagccagcgaagcaccagaatatattactcccaccatttcagaatgtttgacaccgttgactttctagcatatgcttaaccattcgtcttattaaaaaaattatgaaatatgtaaaactatatgtgtatatgaaaatatatttaacaatgaatcaaatgatatgaaaaaaataaatatgtaaaactatatgtgtatatgaaaatatatttaacaatgaatcaaatgatatgaaaaaaataaataaataattaattttttttataagacgaatggtcaagcatatgctagaaagtcaacggtgtcaaatattttgaaacggagggagtattatatcgacctgatgacctccatccctgatcaccttgtgtcaccaatattcttccgagttgcgagagatggcgatgtggggcgggctggggcaagcggcgacggtggcgcagctggtcggggcggacgtcggtggcctcatctccacgatcatccaggcggctggcacggctcggcagaacaagaaaaagtgcgagcagctggcacgccgcgtcttgaattcttgatgatcgccgagctgctgccacacctgcaggatccggaggtgatgcggcggccggaagtccggcggccactggccgggctcgaggacacgctccgggaggcgcacgagctcgtcgcgtcctgccaggagagcagcgcggcgtaccggctggtgatggccggacggcaggccgagaggttcagagatgttgagagcagcatcgattgttacctcctcgtcttccccttcatcagccacatcgaggtcacccgtcgactggatctcatccacaacatcctcgttccaaacgacacgacggtgccaccatctccatcagtaggctcctcgactcatgacctggtacgaattgttgctcgagtactgtacgaattgaatggcatatatccagtcatttgcagatcgagaagctttctttgttgaagagaagcttattagcaaactaactaccctctgtgacaggtatttgtagatgtcgttagaaaggtggcatcccatggaaagggaggcgaggtgttcaccctggtggagctggcggcggcgaccaacaacttcgccgctgacagagagattggttatggcagcttcggcactgtgtacaagggaacctttcccgacgggagaaaggtggccatcaagcacgaaggcgcggactcagtgcaggggcaccgggacgcgttcctatcagaggtcgacatcctccccacccttcgccacaggcacatcatacgcctcttgggctggtgcgtggccgagaaggagaactcgctcgtctacgagtacatgaagaacggctcgcttcacgaccatctgcacggtggtgctccatcgtcttcatcaccctctccggtgacaacttcgtggaggaagcacatggagatactgctgggcatttcgcgggccatagagtacctccactcgcacgccgtaacgccggtgatccaccgcgacgacaaggcgagcaacatcctactcgacgacacctgggcgccacgcttggcagatttcggtttgtcactcaaaatctcatgggacgatataaagtgtagaaatgcccccgtcatgggcacctctcgatatgccgacccggagtacattagcaccgggagattgacgttggccatggatgtctacagcttcggcgttgtgatgctggagatgttgacggggaagacggcggcggggcttgtttcgaacaacaagaacagcttggtgtcgtttgcgctgccaaagatcgaggccaagaaactcgaggaagtgctggataggcgcccggcgcagaagccgacagcgaggcagctccaggccacggacctcgtggcggcgacggcggcgcgatgcctgtgtcttcaggggaagaaacgaccggctatttcggaagtcgtggccgaacttacactggtggagaaaccatctttcgtcggtcggccgatttccacaatagtcccggatacaataaaaaccggggctaaagatgatctttagtcccggttcaaaagggtaacgggcatatttgatctttagtcccggtttgtgttaccaaccgggactaaagagggctgcagg

SEQ ID NO: 24460 - DNA, 2636 bp, Oryza sativa
acctttagtcccggttggtaacaccaaccgggactaaagatcccggtgatctttagccccggttggtgctaccaaccgggactaaagtcccacccctatatatatgtcttcttcctcctccagctgcccgagcaagcttcaaaatttcttcaaaaaagaggggaggtcatgccaaaatttctattgaatttattttattgaattacatacaaatcagaggtgcctaaaaggtttgcaacttcatcctccaaagtttttttttgtcatactacatttgcacctatgttttgcacactttttttgtctccaaaatttagttgtaagttgatgagagagaaaatgtgtgtggggaagaaagaatatatagaaatttagttcatttgctaaacaaggttttataaaatagttgagaaggaaaactctagtgaaagttaatcttaaataatagaaaacaaactaaaatgaaaattaaaagaagtaaaacacattaaaattagtttaaaactttacaaatagtttttaagaattatttggtgtaatattttatgatttttgtatgaataaagatatcttataattattgtatgactgtcattattgtaagaataatatttgtgtagggtttttttgactcatgtagatggatcggcaatggatgtacgctgaccgcgggtccaaagagattattgacggcgtgcattattttttgagagtggccgaagctaccaggcaaaggggttttatttgttgtccatgcaataagtgtaagaatcagaaggagtattctgcatccaggactattcatttccacttgtttgagtcggggttcatgccaagctataattgttggacatcccacggagagcaaggtgttgaaatggaagaagatgaagtggaagacgacaatattccggactttgctcagtatgttggatttgaaggaaatcaaacgggggaggaggaaatagctgctgatggtaacgacgttgcggatgatcttggtcagatgttgcagaacgccagggaggactgcgaaagtgaaaaggaggcccataaattggacaagatgttggaggaccacagaacttcgttgtacccaggttgcgagcaggggcacaaaaagttggataccactctggagttgttgcaatggaaggcaaaaaatggggttagtgacaaggcatttggcgatttattgaaactcgtcaagaacattcttccggggggaaacaaattgcccgagacaacgtacgaggctaagaagatagtctgcccgttaggactggaagttcataagattcacgcatgtccgaacgattgtatcctatatcgcggtgaggagtatgagaacctagaagcatgccctgtttgcaaagcactacgatacaagattagacgggacgatccaggagaagttgacgggcagctaacaaagaagagaattcctgctaaggtgatgtggtatttccctataataccacggctaaggcgtttgttcaggaacaaggggaatgctagaatgttgcgatggcacgctgaagagcgtcaacaggacgggatgctgaaacaccccgccgatggttcgcagtggcgaaacatcgacagaaaatttaaagaatttggaaaggacgcacgaaacatacggtttggtttgagtacggatggcatgaatccttttggagagatgagcagcggccatagcacttggcccgttacgatgtgtatctacaacctccccccccccggctatgcatgaagaggaagtacataatgatgccgattattattcaaggccccaagcaacctggtaacgacatcgacgtgtacctaagaccactggtcgaagatcttaaacagttgtggaagaaggaaggtgtccccgtgtgggacgaggacaaacaggaggagtttaacctacgagcgctgctgttcgtaaccatcaacgattggcctgcacttagcaacctatccggacagtccaacaaggggtacaaggcttgcactcactgtatggatgaaacagaaagtacgtatcttaagcactgtaggaaggttgtatacatgggtcatcgtcgattccttgcagcaaaccacccggtacggaagaaaggcaagcacttcgaacataaggccgaccaccgtacgaagcctaaacatcgcagcgggaaaatagtgtttgctatggttaaagatcttaaagtagtgttcggaaaggggcctggaagccagcatatagagagcgaagatggtcacgcggcgatgtggaaaaagaactctatattttgggagttaccatattgggaattcttggacgtacgccacgcaatcgacgtgatgcacctcactaagaacctttgcgtaaaccttcttggcttcctaggtgtatacggaaagtcgaaagatacactggaagcacgtaatgatctgaagcatatggaacaacgcggcgaccttcacccggaaccaaaggagaaaggaagccattacttgagtccagccagctacactcttagcaaggcagagaaggaaagtatgtttgaatgcttggggagcataaaggtaccgtctggatactccacgaatatcaagcgaataataagcacgaaggagaagaagttcacaaactaaagtctcat

SEQ ID NO: 24461 - DNA, 25672 bp, Oryza sativa
  unsure (1)..(25672): unsure at all n locations
gattaggttagatattgacgttgatttaggttatataggatatctaccactctatgaatttccagcggcttgattgtctagatattgttcttcttttcatactaaatgctgcatcagttgagtntgatctattaagtcgtgcttagaacttcaatctctagcttgtcttctggttgccgattagggtagtatcggagtttcagccaatcttacctgatttaactacttttatcctatatgcttgattgatatgttaaatctgccctttatgttaagatcttgttgcatttaagtatattaggcttctgcttgatgtattctgcttgctttaatatcttaatatagagtagtatcggagtattagccgatacatgctagatctatctgatcggctatgctataaatgtatctagtcccattattaatatatatttcgatctaagtgatttatactgtctcggcatggcgtccgatctatcccaatcacttgatttaagtatatatcgatatagggagtatatattgttaatatctacagccgatcgagtaggtttagtttctccttatctattcacaactgccgatcgatgtacatatgacatcggctcaaagataaatgatatgtcatcggcacttagccgatcggctatcgtttatagatttaattacggtttctttgttgttatttcttgttgattgcaggatcaaatcaactggcacgctcatacatccgaaggcgagttttggacctgcactggagttaagcagatctcccaggcctcgtgttttctgtcaacaattatacaataaagtgaaggagaaaatgcaccagcatgtaagtaaacacacctccagcgaatcacgtgaaagcacacggattgaagggcccacaagtcaaataaaaccgacataatttgggctaatccattgtgcaccatcctaggggcctacttgtcagcctcgagagagaaggtcggtggagaaaggcggttgccttggttcagctgaaccaagggtcagccgaaccaggctcagcccctctcacctccaccttccacgtggcagctcctggttggtccctgatagcggttatgggtgcaccgacctctacaaccgtcattggagactataaaaagattatacattctcacttcacaacacacactcaaggagcaattctctctagtattagtagagttaggcttagtcttcggtttcctagtcttctcggagattcggatatctttttagtattttactctatttgtaagactatgagcttaataaagaatgtatcttctttaattattaatgtttatagttctactactttattagttatgtattctatgactagtttatacttcgtttacatgcttcacttgattaggctagtcaatctatgccacggtatttgttaaatgatcttaatgtgttgcactagttctaacttgtctatccgaagggtgggagtcccagataaattagtgatattttttagcaatgtaagcatgatacttagattgattaaatactgttgggtgcggggtgtgccccacggaaaatagaggcaagcgacaggtgctaacagccctgtccgtctttcgtatttctccatgtttgggtatgacgtaagagttcgtaaaatgccataaccatgctagcagaccagtagggaatggtctctcggtggttcttgggcgcctagaactaaatcctagccttgtaagcatgtatatgttaagtatagtctaaagcattataaatattgaaatgcatatgaaacttagctctctttcgtccttttccacaatctagtgtattcttattacagttgaatcttttgtgtaccacaatacccatactagactatggtatattacccataccatgattatgaatatagtggctcaagtctttacaccgccaccttccctacgggaaaacagataacgatacccttggaatactctcgggtgaaaagctacagtggtattgttgatgcgaaaacacgcgcggcctgagagatctgcttagctccaatgcaggtccaaggcttacctcgagtgctaacggcgtgccagctgatttgatcctgcaatcaacaaggaaacaaaagaggggagattagtcaaccgatagccaatcggccggtacgccgacagcgtatcgttggtggtccccagccgattggatcggctatggacgggatatatcaaagaatatgcatgctctaagaatgccctctcggctaatgcactgtccgcagagataaaaacatatgagctcaagacaaagcttgcaaggacagccgataaagtaaatacagagcaaaaagataacgtaccagctcgtaccctggcacatacctatacaggcgagccaagctatagcaaggcgccgagattgaaccgatggtcgaattagcggccctagccgatacgatgcagtctcgatgccaagctatagcgaagcccatctatataggtggcggatacacatgtaacgatctaagaaacaagcatatcaggtaagatcggctgaaaccccgatactatctctaattatgaataattccatgttagtttccagggttctaaacacgactagggatgatgcatctcaaaatatgtaaataaacctaaagtctaaacaatcaaggaattaaacacttttcaagatggtagatgacttagctaatctaatctagtaagacgatttagccgataccggcagaaaccctaaagcgagagacagccgatagagctaaatcgagatactaagattagattaactaaggcatatgataatgatggtcatgataaaagaactaaaacatctaaagtgatgtaatagccccgatagcacaagccatcgagacgggttacctcttgcggagagaactcaccgaaaacaagaaaagtaaaaagggtggcgatgcgccaaagttgtattggattgtctcccgtattacagtgctagtgggttaatatttatacactgagtacaaggtaagtccgttatggacacgactcaaaccttctaaactctagatacaaacaagactatttacagcggtctctgaccaaaactgaccaaaccgacgtaactaacctaattaatatatacaactgccttcaatgagctctatctctatttggcaataacggttattccaaaattgggtccgtgccgagcccgagttgcattatgatggctggttcatttatcagccgactcggctggtcctggtcgctggcttctgttctcggccgatgcaatcccttgccgtcgcatagttaaactcgagtcccagcatatttcggtatcaaatctatcctgattttcttcttccttcctgagtttttgttgctaaatttcaccgttaacaggtatccgtgcacttgtggatttatctatgaccgtatcaaatatactctccgaaggttcaaaaggagaaacgaccgtcacttcttcgattggctcggattcggggagaggttccgtcaaagaatttttcaatcgtgagatcaggacgaaaaaaagtcactctctagttttatgtcgaggactcttgctgttggtgcatctagaagaagttttcctaattgatagccaatcagaagatcgaagtcatggacttcgaacatgtgaaagtctaggatggcctcgatattattgtgccttacaggcactccacatagaatcccacaaccttcaataatagaacctaaggcactccggaagattttatctatgcgtactaacggttcatcccctaagcaagtaaatgcaaaggttgcggatatgatgttggcaccgacaatgggattgtagagaactttcaccatatcctttttcacgagataatgcatagttgaggatgaggagctaatccgcatggcttcaggagaaagctcaacctcccttaaccactcatcgcttatgatagtaattaattctctcaccgtctctttgaggaaactttcctcgagcggattagagggactactcgggataggtggtctcttttgacacaaatagtccgaggtgtttccataatcttcaaaaagatcatcctcgaactagaaagggatttccgaaggctgaatttcttcttcctccaattcccgaggttcgggtgagggctcaaaggttgaatcttgcgatgtggagggtatatgctccgattcaaaggttgagggctcctcatgtgtatactcgatttcctagatggttttgcagtggacgaaaggggtgttcttcaggatgtgatccaagaacttcctttcttttgccatggtttttttgtgcgaatgaacctcctgcagaaatatcgagatacgaggcagactctttgtttagacccaaatagaagtgttgtaacaacacatgattgggtatagacaagtctgggccgaattgagttaataatgagaacctagcccaggctgctccaatggattccttctcactttgttgaaagccgagaacctccatacatagagagacaacacattgtaacggaaagaaagtaaggtagaacctgtttttgacttttgtccgttcactatgtgtctttcaaacggtatgggtgtaccattacttcgccccctctataagagagaagagaaataactcccactttaaggtttcttgtgtcagacacaagcacaattgctcgaactcacgctgatgatggtagaaattttcgttatcgcgtcccaagagggattgctcctaaaccatggctacaaagcgaggacagagttcatggccagatgagaagatggattttgaagagggtgatggctcacaaaactcgcccttagaagcgaaatttttttgaatagatagctactccatggtagagaagaatagaaatgaagaagataaaaaaatacgaggatgaaccaaattcgaagataatacatagcaaccgttccccgagaacggcgtcataaatacttattggtatttgatactatcacagataaatccgtaagcgcacggataccgctgtagcacttcacctcaaagtatttcaaaggtatcgaatcacatggaacatgtgtgtaaaatgtaagaaacaagattcaaccaagaacaacaactaatggaaggcttaggatagggatgatttctatgggttttaaagttcttaattaagttaaggtaaaacactatcagttgattcgggcaccggttcacccctggtctgccaagagactccggcctatagctccatgatatacccaaacatagaggattacaaaggatggacatggctgtcactacctatcacatacctctacaagcacacaacaatcgaaggtaacctctaacctagacaccacgtatatgttattgaggagtactactttagccttgcgcagaaactttcttctttatccagagtcttagtactagagcacccaatacaagtatcaagcgacgagcccgcaatgatgagaatatatcttacttaaataagaaaactaaatacgcgaaagaaattatgaatacttacttatataaaagcattagccgaggtacgatagtggagagagtgttgacaaccccggcactcctccagactcccctaaaaagaaagccaacatctccggcacttctccggaacatcctcggagagaatgccgacatctgaggtactccttccggagcttctcctcattctcttcctatattctaactctactagagagtaacctaaatatgaaagtaagttgtagtccactttgttgtgtgtctcttgagagtaaagtgagagctccttttataggcatcctatgatggtagttaagtcgattaacacccctaatcgccattgggagccaatcatgtagtgccacgtggaaggcggtggcgaggggtgcaacccctggttcggccgaaccagggaaactgcttttgttcaccgaccttccctgggagactatcaggtgggcccttatgacggtgcacggtggataggctcaattatgttggttttgctctaatttgtggtccctccaatccgtatactcgcgtctgattggccggaggtatatttcttcgcatgacgtgtggttttcgtccaaaatcacctgcatacaaatatttatcaaacttgtgagaatgattagtaatactccctccgggttgataatacttgtcgttttggataatggtaaagtcaaactttaaaatttttaactacaaataatttttaaaatatttatcttaaaaatatgaaaaccatatgtgtagattagtcttaaaaagtacttcaataaaatcatatattttttgatatttctatatatattataatagaaaatagtcatcaaagttacttttgggagaccgtgcccttgtccaaaacgacaagtattattaacccggagggagtaaccactactattaagtttgatgttttacttcatttgcttttatgtgggaattgactgttagatttggtatttaaggaccgtcaacactgatccagggattgatacagggaaacataataggttttggtttccgaaatcggggactgacacaggcgatgcgacgcacgaccctcatggaccggcgcaccgcagctccacttgtcacagccttcctctttggtggcatcttgttagtgtggagggcttgagagtttgcgttcgataccccacgaacggcgccaatgttagaacaaaatccaacagttatcgaacgagacaaagtgtgtatctaataccggtattatattctttcttctgccccctctctgaggggcaggctacatatttatgtgggccagtgtttcggggcaacccgggtggccgacaagtgacccccaccttcgggattaatcagtaaaatcctaggcaaccgggataggtgatccattaaagcttgagccagcccaatctcgtagatcccgggatcgccatcgtgtacatgctcccgtgatccatggccttgactgcagcccctccactacccgacccagagcaggtggctagggcagtggcggagccagcgacgaaaacctgtggggtcaaatctataaaattctttaagttttatattgttgcaatgtaaatatcagtagtttttagactattttgcaaaaacctgaccccacagattatacctagctccgccactgggctagggtaggtggggggtggctaattagcgcacgcatgctagcaacattgctggcgtgccctcctcccttgcgtgattttttattttttttgctatttttttttcacgctcgccagctggcgcaccctcctccctcgcgcgatttttttcttttttttcgtgatttttttcactttccttttttttaatcttcaacacacgtgttttcaaatgttttgagttgaaaattttaaatcttgacttgaaaattttcaaatcttaacttaaaaattttcaaatctccagttgaaagtttttaaatctgagttgaaagtttttaaatctaaaaaaagttttaaatctcgagttgaaagttttcaaatctcgaattgaaaattttcaaataccgagttaaaagttttcaaatctaggtcgaaagttttcaaattttgacttcaaaaaattcaaatttcgagttaaaagttttcaaatctggattgaaagttttcagaatttgacttcacgtataaatttcttttgtatctattactgaaaaaaatctttagaaaaaaaatcttattttaattatcatcattatcttaacggattagttagtataggtgtgggccggaaattacgctccggggggcgcatacgcccgagagaggaatctcgagagttggtgaggggtattaatgctcacgtccaatcatcataatcctcgcgtggaaggggcggcaacctccggaggctgggaaaccttacggaggctggccctccctctccatcctgcatcagactgtaacggaatattccttcaggcttactcagcagacgatgagacgagctcactataggaggacttgaagtcagtgggtcaatgggcttcggcgacgcggtgcttagctagtttggttgcttgcttcccacggttccgtgagaaaatttgcaaattgttgagagggacagacagggacgattgctgaactagacagtagacagacaggagggaggaagattattctacgacttaatcttaaccgtttctcttgtcaatttggatgatagcagcaatacatatcagagcttttatacctaattaaactagcaatgattaaggtcttaattgctaaatttcttagaccaccgtatacttagaccaccgtatagttaatcatgtgcttgtctatacctataccatcagtggcggatttagaaagaaatagcagtgggatctaaacaaattagatagagttatagtccccctcccatatacatatggtaaaaaatttcagtgggatcttcgtgtggattctcatagtcttcacgtcagaaatgagggctccagaccccgccggccccatgctagatctgcccctgtataccatgcttatacataagctgctatgattttggtggcgtaggcacacagcgcttaaccgctcaacggcatagatcatctcaattaaggtcaaccagggcatctgactgtaataaagataattgtatggtctactctctccattcgtttattataagataatttttaagtttgatcaaacttttaacaaaatataacaacatctgtaacaccaaatttgtgtcattaaatctaccatttaatataatttttataatatacttgttttattttgtaattgttgttatattttttctataaatatggttaaacttaaagaagtttaacttataacaaaatcaaaacgtcttattgtgaaatggagggactagtacgcaaaacatcccttagctgctacataaccgcacaaactcgatcacacggtcatgtgaggcctgagtaggatcgtaactgatagttgcgatcctgagggcttgttttgtgagatgatatgtgaggaggggagactctcctggacatacgcgaacgaggattggtgtgatcgaagcttccaaattatggtacgttctaaacaactaatagagttatagattatttgtggcacgcttctaaaaatatgatttcttccaaaacttttctacatattatccagttagaacgcgccctaagtgtgatgctgttttaacgaagcaatcatcacccatttacacggataatttagtttgagtaattagtatttggagaaacatctgtatttaagaaaaagtgagcaacacgaaagatctatttttttccccgtcttgggctaatgggatgccagcggttgaagtctctgagatatgcaggaacaatttagctctccagtttgttcgggttaaagaaaaaaaggaataggccatgctttcagagtttcagatgcaaaccatcaagtcaatgcagtgatgccaaattcagtagtgccgtatatgatgggcgtgggaccgtgggcgacgactaattaggtgcgtccgccgcgttcttgtcttgttcaggaggttggaattttttgctgcttgtcaaattcattgaccacaagtctccaactcaacatcatcctcagggtgtgtttagtttacgtcaaaattgaaagtttggttaaaattgtaacgatgtaacagaaaagttgaaagtttgtgtgtgtaggaaagttttgatgtgatggaaaagttggaagtttgaaaaaaaaaattgtaactaaactcggcctcagagttaaaacacaaattaaacatgatccaaaaacatcaagtaaacagaaatataattcgtctgataatatcgatcgggagcatataaacttcattcaaactttattattattactactcgctcatgcagagcgtctgaagatcatgcagaattacagaatgaagcaaacatgatggactcaactcgactacacagacatgcagaacacagcattacagtacacacagactcgatcacactgaaactgcttattattaagatgaagctaggaatgggcggatatatatccaatttgaattgaatccgatcatgaaattaaatgcagttcagatgatatccaacccaattccgttgcaacccgaatgcatgatgtggaaatccatgtgttatgtgtatcatcacgtagtccatggatttccggatacccaaatatgcgataaaatgaaagcttgacctgttcggggaatcatgcagtacccttggtacttgatctcgatcggtgctcgccgccgtggcgattctttgggtgtcgccgcggcggcggcgccgtcgtcgtcatcactggtggtgatggatcaagcacgagctgcgcctgcgcagctgccggagcttagatgcttgcatggcttcctccgtgcacgcgcgcgtggatcacatcacggagcaggaggtgggatcctcctccatggagtggacaaggtagtaagggaagacggcgccggtgggggtgcatggctgcggctgcggcggtggcccggccgccttcttgcctttcctccgtttgccgcccttccctccgttctgcttgtgctgctgcccgcccttgttacctttgttgccgctcttgccggcgttgatctccctctgctccgaagattggtcagctcaatcggctaaagaggaaaaaaaaaaaaacaaggagtaattttgatgagccatgtatcttactggattgtttgtgcggcggtgatcgcccccaccagcggcgacggcgaggtggcggtccatcttcttctgtaggtgggcaacgttgacggcctggagggcgatgaggcagttgttgatcctactgttgacgtcatcgagcttggcggcgagcccgtcgctggccacgaacctgtggagcctgaagagcagaccgtccctgctcctgccgcaggactcgacgagcttgagcgcgtcgtcgagggcgtccttgagacggcccagaatcttccgcgtcgtcgccgccgcgtctcccatggccaccttcttgtactccctcaggatgtcgtcgacttccttcacgcgctgggctagctcccggcacctggtcttgttccggcgagccgtcttcactgccttggcgatcgccgaagccaccttcggcaccgcgcccacgatgctgcccaccggctccatctttgaggttgttgatcacccggggctgcttgctttgctttctctaacgttgcggtactgctcttgcaagaagaggaagtgtggccactctacttatcgtggaggccattgacggctggccaaacggatctagtgctacgatgcgaacggtgagccgtactatcttatatcatattcacgtgaggacaatgctttgaaactatgggcctgtctagattccatcccagaattttataccctatcacattgaacatttgaacacctacataaagtattaaatatagactaaaaaaataactaattacacagattgcgactactttgcgagacgaatcttttaagtctaattgctccatgatttgataatgtggtgctacagtaaacatgtgctaatgacagattaattagtcttaataaattcgtctcgcgatttactgatgggtactgtaattaattttttattagtgccccaacaccctatgcgacatcctatataatatctgatgtgatacgtcaaaactttataccctaggtctaaacccgtgttcttggatcacaattgaacggatatgattcatgttcaaggagagcgtggtactatactgtaacggaatattcctctgtccactccgcgggtgagctttcacgacgcggtgattagtttggctagctgcttccctgcagtttcgtgagagcatcttcgtcagaattgccaaaccactccaagccaaaattgagcaaatgtgagaaaaaatactctccaactggctctataagtatgcgtttggttcatggaaggttggatgggatatcacagttcatattttattggatatggcgatctttttttttttaagtgaatatgacgatccagttttttttatttggttatagggatgaaggtagatctggtgatgcaattttttgtttggttggaggaagtagggtggatttgcaggtgtagtcacctctcacttgagacggtgaatatacccccatcaaattaatacataacacaaatcataaattctccaacaattttacaccactacctccattataaatacacatagaaaaaagaaaaaagaaaaagaaaaaaggaaaaaaagaaaagaaaaaagcagggtggatctaggggctcagcgccgccgcctactcctcctcccactagctgctgttgctcgcttcctcccgccgatgtggcactcgccgcccgcatcgtcgttgttgtcaccgggttcgcatcgtcaccgttcaccggccgggctcacatcgtcatcgtcgtcgccgcggtgctcatctcccgcgccggatctccgagctcaccgccactccctcctcccgccgacggggcgctcgccacccacaccggccgcagcgcatcatcgtcgccatcactaggcactcatcggcattgtcgtcatcagccggctcgcatcgtcatcgtcgtcgccccctctctctccatggaggtgacgcgaccgctcgccccactcgtccggtcgctcgggcggctgcatccgggtgatttggctagagccagccatccggcatgtgaggagaatattctcctccgggccgccatatcccgtctccgcccaccaaccaaacacctaaaaaaacgggctgccatgtcctatccacccaaatcctcccatccaaacacaccctaagccatccaactagccaaaatacacccaaacacaccctaagccatccaactagccaaaatacaccactggctggccaaatctggccagccgctggctagcccatcctagggttcaatattttttattgggggtaccaatatggtccaaaataatttgattttttcacaaaactatgatggtagcccgcgtattcgactcctctgacttcgcacgcgaacagtagaggcgcacagtaaaatgagtctagcgctacagtgtgaaacaccacctctatttaaacagtggaaaacagtaaaaaatcgctggtttgatgtactgttcactattactgtgctacactgtagcgattgatcttgatcgtcgattattcatcggacggctgagacccatgtgaagtcggtactgtgcttctctgacttcacatccgatttggtagcccgcacatatgcgtaggcaccttacttaatttgtgtgaaattttattatgaatgtctatgtacaggtagttttctatcaaaaatattatttttctttatcctaaactaaaactaaacttttttaacatgctttgaactttggtttgcacagtgcaatataagtcccatggcggtttgcacgtcggttttagctgacgtagcgcctatgtggctagtttgactcggtctttatcccacgtggtattgacatgtcgcttacatggcaatctaatcttaaaaaataataatcgtgggcccacatgtcagttacaatgaaaaaataattaaaaatagtggggcccacgtgtcattactccagtgacaggttgttgcaaagcaacctgtggaatagggcgaggcgtgagccttatcccagaactaaaacttgatacattagagttttgcagctaaattatttaaaggtcttgggtttttcaaatgaaaccctaccactccttgtttttagccttgcatgtcatatttttttcatggcttgctgagtacactgagtactcacccttacttatatttatatttatagagttagaggaagtataccttgacccttctgtcgaggcctactttcaggagcaagtcgagtacgatttctcggggtttcaagcctagttcccaaacatagcctgtggatttacggttgtcatcctgtttctagtgctttcctttccatgtttccctccactgcttttatgcttccacctatgtgtaccttatctttccagtgttcctaccagtctggggtttgtccacgacggtagtagtttgagacctccttgtaataaagctttgttatttctaaatttcactattattctatgagtaccagcttgtatattctgggactggtactgtaaacacagttaatgttgtgaccttcagcctatgccggtttgtattcttgattggcatagtttggggtgccacagagcccaagcaaagaagcacgggtgtcataaatttcggctcatctgagccgaacagggcagaccaaatggccgacagatatcccaaagtggttcggagtggaaaggtattttgtacaccccaggtgccatagcacctggtatatgcatatggtttaaatagttatatggaaaattcataaattttgacaagataaattacgttaatataagacactatacaatgcaagtcatttacacatgaagaaacaaaaatagcaaattttatctacgctttacatgtacaattcattgcctgattttattagttttgtttctctagttgtacatgaaattgagtcttttatgtttatctatagatttatatcatctatctattatattattaaaacagctttgaaaggaggcatcacgttcgctgtgaggctagaaattttcatattaattagagaaaaagagaaaactttacaccgttagatcgtagttgtctaaattttaagggctaagatttaatagaaatatacgtagaagttttaatatggcctttagaatcagatacggatacgtgtgttatagaaattggccagcatgcagctagctagacttttcttaccaaactagcactaggaaacaaaattgcaataggaatctagggaaaaaaactatgtccgtgtatgattttgtatccgattgctatggtggctagctaaaaaaaaagagatactacaaagcaatcaagtttctcatctgccgtctccaacaaaataacaaagaaataggagccagagaaagagaaggtatgacatagacgagagaaatagatatatttgatggctggtccatttgttcaattacctcggataactctttgtactctacttctgctataagcgatagaaatttccacattaaaccaaaaaaataattgttcaagtaaaaatacaatttaaaagtaactaaaattcggaattagaaataagcaatattgaaaggagagtctatataagaatccaatatgagattaattaaaatttcaaataaaaataaaataaaatcagaaatttaaaaaaacaaaagaagagttcaagtagtaaaaataactaaaatttggaattaaatataagcaatattaaaagaagagtccaaataagaacccaacacgagagtaattgaaatttaaaataaaaacatgaaaaatacaaaaataaaatgagagtggaatacattatataaataactaaaattcgtaataaaaaaaataaaaagtattgaaagaagacaccatctagagagattaattaaaaaacggaataagaaataaaataaattctaaaatataaaaataattataagaattcaagtaggaatcaatttataaataaaaaatatcggaatgaaaaatatggaattttcaaaaaaaaaggccatttagaacactgcgatgacaaatacaataaagaggagagaaaacaataagcctgtaaaggaatagagtggtggtggttgatgggacatcaaaaactataaaaaaaacccgaaatagaatcacaatgacaattaagaggagggacgacggcatgccattaagaaacatggttacggcagtcggcgagacttatagaaagtaaaaaataaaccccaatgataatcatgttcgattttaaaaatctttgtgggtgggccgtagatgagtacagtggcgaagccgctaacgttttggtgggacttagtaaaaaggaacacaaacaataattatgtttattttttaaatcccaatgataacaaagagaggatgcggcggacgggccgtagtggagtacattggcgacgtttgacgggacttctaaaaattataaaaacgaaacccaacgagacaatgaaatctgaaaactacaaggtctaattttcaaagttataaagaggataaataaaagtagtgatagatcgagcaatcaaatataggggtgacagaggagtaagggtggcgactgacgtgacttttaaaaacttcaaaattagaaacacgggaatgataaattttaaataaaatcatatgtaaaaaacaaataattttatactggtgctagccgcgtaattgcgcgggccacccaactagaaaaataattataagagttaaagcaggaatatattttataaataaaacaatatcggaaagaaaaatatggaatttccaaacaaagaaatttcatctagaaaacagatgacaaatgacaataaagatgggagaagcagcaggccagtaatggagtagagtggtaacggttgatggggcatctcaaaactattaagaaagccccaaatagaatcccaatgattattgaaagtaggaaaaacggacatgtcgttaagcaacacagtcaaggcggttggcgggacttctaaaaagtaaaaaataaagaggggaggcagcggcgaggcgtagaggagtacagtggcaaagccaatgataatttggcgggacttctagaaagtaaaaaatgaataccaacgataattatgtttgatttaaatctcaatgacaataaagagatgaggcaacggacgggttataaagaagtacagtagcagtgtttgatgggacttctaaaaattatagaagtgaaaccccaacgaagataataaactctaaaaattataaggtccaatttttaaaggttctaaagagaataaatagaagcagtggtaacggttgatgagacatctaaaaactattaacaaaaccccaaatataatccaatgacgattaaaagcaaggacgacggataggccgttaagcaacacagtcacgacataataaaaaataaacccaatgataattatgtttgattttgaaatcccatggacaataaagagggcagttagcgggtgagccgtagagaaatacaatagcaaagccagtgatggtttggcgggacttctagaaagtaaaagatgaatctaaacgataatcatatgtttgatttttaaaatcccagtgtaattaagagatgaggcaacggatgggtcgtagaggagtagaggaatacagttacagcgagtgacaacgtttgacgggacttcaaaaaattataaaaataaaacccaacgacgataataaactataaaaactacaatgtctaatttttaatttttaaaggttcaaagagagagaatagaagcagtaatagatcgagcaagtaaataaggaagggggtgaggaagaagtaaggagtaacaactggtatgactttcaactataaaattagaaatacggggatgataaggtttggtcttttaaagtcttaaaacaacgagatagctatttaataaattttaagtaaaatcattttaaaaaatagataattttaaatgggtactagccgcgcaattgcgcgggccacccagctagttccaattaatgttaccatttttttaaatttttctgtaactttttaaatcgcatgtatataacgggtgccatggccgaaattgctattgtgcggatatccacgcgccctccccccgcacggcgcaaccacgtgcacatgccgacacgcggagatgggggatggcgggagggcacgggaagagggggctcgtgttggtttttccggtttttacaaagtttgggcgcttaactaaacagacgtttagcgtgcatatttgcaaagcaatacttctgaaccgaagatttctgtgctcaagaggcttggagttttgtcagaaatgcatccctgacgaagacgccaccgccacgccatgtaagtaacaagattttgatactgaaatgttccgaaactcgtaactacatccctgaagaggacgccaacgccatgactgaacgtgtttcctttgcaagacaccattgtcttgtttcctgctggtgagaccatatcaatattttttcggctcatcttggccacacagccagatcgaaggaaccgagggggtcgcagttttaaactccgaaccctatttatcttctcagatggccgttactatagctcggcccattgagaggagcccgcgcaacccattaattaaggtgcaagttgggtgggggccatttagcctgagagaatttggtgaataaaaattgaaaatatatattatttttgaattttttttgcaattatacacgtgtctttaaaagatttacgaaaatatacgtgtcccgctgtctggccgcgcgccacccagtgcagccgactgatgtgattacatgcatgcgctgccttcatgcattcggtggcgcggccaagacgtgggaccgttggtcctgcgcgtacacgccgcgccaataaaccggtcacgcaggccacggcgtgatacacgaatattttcgtaaatttttcaaaaacacgtgtataattgcaaaaggttcaaaaataatgtatattttcatgcgtgcgccgcgaggacgacgacgacaaccagccccatcatttgatatattggaggaaaaaacggtatatttgtaaatgaaaaataatctattatctactaaaagttcattagacttcctataaacgctcttatgccaccacgtaacgctctaataaattagagaaaatcgtaaaatttctatgaaaaaagatctagtcattgatttttatttaaattggtggatccataatttaattttacaccgtcagattagattaatctccgggctctcggatacctctcctgccaaagccctctccacgcccctgccacctcccacacgcccctatttctgatttttttttccttttgattggtggttaagatatttaatggcctattttatatagaaatttaattaaattttcacttctcttttctaacgtgtaggctgagaactgactatgcaccgcttgcatccatgcacttcgcatgcattcgtggtttatacttattgagttggtccttttaaaaataaataaacaatattttaagtgatatagcttttatgttgtatataaacaatttgtgatcgatttgaaccattctatgcatttctttacttaaacgatttcaggcgtgaactatgcttcagagtaaaacacaaatattacatgttggacccaagaccactaaattaaagacgatcataaaaattctcactaaaatgcaaaatatccaggaaccttttattatggaattggtatatatcttttgatggaaaatcatgggggcaaaacatgcaaattttccaccattggatacgttttaagatgcatgcgtgggagagagaaaaaaaatcgaatggcgcatggataccaaggatcgaaccggcgatcaacgcacaaaacgctagagcatgtgttcactactgagctttgtaacttttctattttacaatgtaattacatatatctttcttgtatcacaattagatacgagttatttacactgctattgtattataattacatttacaagatttttaggggattttgtatcaaatgttagataggcggtctctatttttttaatctaaatgacaatgagaggccgttagaaatacatgcaacgcctttctatcattagaaatatacacaatgtctttctgccaactgtcccaccacccctatcctcacctcctcttgcctctcctttactccttttttcctatagtagttgagataatatttataacttattataataaatatcaaaaaactaacttttagattacccaaacaattattatttgttaacaccgttatatttcttacaattaaatctctatgttatctatattttaatttatgaaaaataaatattattttgggtaggaccctatgcatcatatctaaggggaaaagaacaacaacatatattgtaatatcatctatcgctttacaaacatgcataattaaattagctctacaatgttttaaattatactttagatcgtattttgaatctttgcatgaaatcccaacggacatgaaaattatgaaaaacatgacaatataaagtatgtcactatatacctttaaacagactaaattgaatttataatgtcagcaagtaacatatcctatctttatctttagatttataaatatgcttaacatggatggtccaatctattcggcccctatgcggggtaacctaaagtatcaaccctatttaccaccatgtataaattctacattttagagatcgactatattaactccctaaataataagcaaaagagcatgggggtacatgttttctctttgatttctattaaatatgtatggtatgaaggtatttcatactaactttggttaattacggaacacaaatcatactaaacttatattagtgccctaaactaataagagaatagtgagagtacatatcatgtcatttcctatttgatttccactaaatatttatggtatgtaatatatcctaaaatccataaagacaagtataatagtgaagaaaaaaatttagcaactccaaaaacaaaatatgataaatattttaaaaaaaacacgcaccatacaaccatagtttcataggaaccaactctattgttgtgccataatattttctcatgaattcaagattgtatggttttaagtaattttagtttagaatttatatgttgcaagagtaatcaaaagaaattcatagccaacattcaaagtaattgcatacaaattatttgccaaaatagacttagaatagagttaatgaatatttcaagaaaagtccacctacgtagaatcattattttaaattaaaataacaataaataaggtgcccacaaacattaaaacgataataaataagatgcgcgggctacctttctagtttgtgaataaaacttttatatatgtattcttaggctccgttcgttctccagttttggagagaaaattttgtggcacgcaaaacaagaaatctcattagcatttgattaattaaatattaactattataaatttaaaaaatgaatttatttacttttttaaaacaacttacatatagaaactttcttaagaaaacacactatttaacagtttagaaagcgtgctaacggaaaacgagaaagttgaagtttggagttgaagaattgaacaaggccttaatgatctaaaagcaaatgataaaaattaaactacgataaaaaaccccaaaatcaactccgagtttaagtttgaaaattcaaattttggataacaagcataaccataagcgatggcaacggcgaacatccggagaggagataaatggacaacgtgcagattagttgctgcttgatcgtgcgctgtgcgagagacggccggggccggggacgtgcttccgcggccaacttccaagcaaccgcggatccactctcggcgtaaccggagaagtacgtcggctctcgccgggatgagtgacggagcgcaaggttcgcctcgcaactcactggagagccctgacctgccactgccagcccaaaggacatgacctctctgacataggcaatgggctctcacgtgttcgatgaaatgccgtgctgagtagaccaagtgcctgtgcattctaagtatatattgcaaaatctgtccaagtttcacgaaaggtgcgtcaatttcaatcgtcctcttttgataccatccgatggtatgcattgtgctaagggctcgaacttgcaacctgcaggctgagcatgagcagcaactaagccagaggacagctgctgcagagaaacgctcgaacctgtaaccctttgggaaactatgtagttacctcgagaggatgacctctcgttgtttgcatatcactcaaataattataaaaaaataaaaaagatgtattaacatgtgatataacacttcacaaacatgcaagttcaaatttaacttctacatttcgtaacgaaaaaaacaaattaaactgcagctagttaacgtatattcacggtcaaatttgtttttttgattgcgagatgtagaggttgaatttgaacttgcatgtttgtgaagtgatatatcacatgttaatacatcttcttttttttaaattttttcataatcatttgagtgacatgcaaaaaaaacgagaggatatcccctcaatagattaaaatccacttttgtaacccttgtagtggctcagaggtaagtaattaacttctgttcgttgcctggctgttggttcctgcaacatgaaaaattgctagatttgaaggatcttaattctctcgatcccttggtttagccaatctaatcaacaagtcattgctctgatcaaagtggtaatccacttctatgtgcttagttcgcgcgtgaaagactggatttgctgataaagtggtcacaccaatattgtcacaccacaagcatgcagcctgcggcagagctatgcggcgttccttgacatgcatacataataaaacagaataccatctgttcagaacttgtaacaacaacaagcccttcccatgtaagaaaacagatcttctgtacttggaattaattacaaccgttggtcatcaataatccaatgcactaaacaagaaggtactaggaaaaaggtattaaaagggtgggccaggtataaaaggtgaaaggttaaaatggtaattgacttttatagttgatttgtgcagttaagggcaaatgcgtcttcttttcaatatttgggtctgtattctctgatccgttcgggacagcaagctcgcggcgaccgtggcggtcgctgccgctgtcaaccgcgcctccccgatccgttctaggcgaaggtggaattggaggtggtggtggctgtggtgcaggcgcacgggctccccttccttcggagtgtgccgtcgatgaccgcgagctcacggcgactgcggccaccacggaccgtcgctgtcgctgatttcgagtgtgccacccgctctgcgtggacatgaattcaccggaatggattatctngtgggcatctatccacacaacatcacatgacctgagaggatcagagtagaatcactgtagcatctcgcgtgattgtctgcacagcaagacctgtcgagcacttcatttgtcgccgtcgtgcgagtactcacgctcatgtaggtgggacgaagaaccatagcggcaagctggtagccgaaacatttccatagtccaaactgcaaccttttgacaagtccaaactgcaaacatttccatatgtcatatcctttatcgtggaaggctacatatctatatatcagatcgacaagactatcgtggaagagataattgattggcatcaccggcgccagccgtgctacccatcgcaccgggcgagctcaagcgctgcctcaaggctggtgtcacaccccaatctgataccgccgtacaacggcacctgacaggagcgtgtcgtagggaaaacggcgcgaaccgcttcctacgaaaccgcgatctcggtaccagtcccaggacatagtgctggtacccacggtgacaaatatgaatcatagcaatccttaaaataaatagaggacttatttaccttaacttaggttgcagctcagacagcccgagaatacaaccgacgacacggacgaggcgaacaccaacaacagcagcagcagcggaaccaacggtctaacacccaacaccacaggcgacggctgggaaccaggacaaaaccctaatcttcacttcactttatcttctcttcagggcggaggaactatatatatttatatagagcaagggtgagtactttcgtactcagcaagtcacgggaacttaggtgtttaatgcaagcttggaagagaggcaaggttgttttgcaaatcttttgtttgaaatcattttggaatcactaagtgatttatttctttctatgtttgggcgaaaagagacttgcgtctcgattcaactttaagagatgcttttcaacagctcatttagtaatgtatcgacctcccgggtcagatcattacttctcggctcccagagccattccacttgattagtcggctcccagagcctttttcattttctcggactcccagagtccagttgcccagcagcacaacaatccgcttccactcgggaagcctagtctatgatgcccgcagacatcccgaatcacacagattcgtttctgaccactcaggtcgtccatctgccacataggctgattctggttacgattcccacaccacaacaacttttcacaaagcacaggcaaacaaatctacgcaacgggaaccacctcacatccgcccatgaccgtgggcacggctgttcgaacagttagttaacctctgcagaggggtacactttacccacaagatacgaacttattccgaacacccgtcggtatcggaggttcgcaacaaagccttttcccagccgactcagggttacctcatgccacatagaaggatcaaatcctcacataaacataggcctttttaggcgtgcacaaatcaaactccaaccaccttgatcggtaagtgagcaagcttctcgttcttgccttaccaggaacccggtttgtccgaccccaccccggcgttcccaactattggcatgcgaggtttccctgaaccgtctagttacttagccagggtgtcccattccaccttgtggttgcactttgattatgttcgatgagtttcccacaggaatcggtccttatatgcgaatacgggacagtgccacataggcacaacccccgcatcgcgagttttcacaattcattttattttcaaacacaccgacaccacatgtcgggttttggaggctttacaaacccatttcccaagttttcgacaagcaacggtgtatgtgggatatttggtatacgcgctcagagagcacgaataccgaggtaccacaagggtggagcgacaaggattcagggtagtacgacctacagaaattggtgcgactactgggtaggtccgtcggtttagcacgcaaaccgaggccaagcatgttaagtgtgtgaatctaataatgcaagttgcaaacaaaataataatgacttttcaattataggagcaattgatcaaagggtgacttgccttgctcaaggtcttcacgaagcttcacgaatcttcgagaaaacccgcgatcgacgaaaatccgataaccgcaactatacgcaaacaatcgaaaacctaaacaaaagaccaaaagaaagatcctatttagactaattattagtgccattaaatagatctcaattttacggaattactggaagtggaacggagtcaatcggatgagcggttgagaagatatgaattttggaagtttaattggagtttctggaataggagaaatggtttatggaattttatagaaataatattctcaagaatattattgacagtcactgacgtgcgggaccaaaggaaatgattcatggaattttggaataaggaattgatttatggaacaagggaaaaggatttattaaatccctgggggctgcagg

SEQ ID NO: 24462 - DNA, 9371 bp, Oryza sativa
ttttggaataaggaattgatttatggaacaagggaaaaggatttattaaatccctgggaaaagaaaatggatgagggacgtgaattagacttcctcaggtggcattggtgcggcccaagggttgaagggggcttggccgagccatttgggccggcgcggtcgcgggaaaggcggcccattagggcgcgcgggagggagagggggcggtccggtggaccgggtgcacctcgcggggtcccgggtggggcccacatgtcggcggcaaggctcacggtggggagagcgcacgcgggtgcggtgctagggtttggtgggtgcggtgtgcgggcggtgcgccgggtggattggatggcagcgggcccacatgcagccggttggcgcaccgtggaccgcgcgcacgggagggggggaggaaggaggcggctgaccggctcggctcggtcaaagccgaggtggcgccgacgtggcgcctacgtggcagccacgcgggccggcgggaggaggaagaaggggcggccgagatggacggtggacggcagccgagttcaccggagctcgtcgcgacgattcgagagagagggagtacaccggaacgatgggacggacgagaggaagtgagccaccggaccggattcgccggaaagaggccagaggcggcggattgcggcgacgcatgctggcggcgagaaaaaggggaaacggcggaggggcgacaaggattaaattcaaggtggtgggagtatctccggggttcaaggagttcatctccggcgtcggatggggcagagcgacgccgtggagatctggcgacgagcggcggcctccgggagcgagcggcgatggcggcaagcctatggcgggtggtggcgaggctaggggctttgtctacgcgcgttcgggaggactaccgagctaccgcgcgagctataggagggagagggcaagcgagaggggagaacggagggaggcactaccgagccgagacgggcgctgtgacgagcggccgacagcgcgggagcgagctctccggcctcgggccggggtaggggaagaagatgggcggccggagccctcttcggctccgcgcgcacgccggcttcccagcacacgcgagggcggaggaaggcgaggacggcggcagcaaggcggcgatggcactgcagcggtggagactgaagtgggagggatttgagagaagggagtcggctttatagtggaggcgaggtcggttcgcgcgggaggtcggttcaaaccgaccttagggcggtcagggcggcagctggcggtcgtgctcggagctagcggccaagcggcggcagaggcggtcacgggtgtgacgccaatcggggaaaaagcaaaaaggggagggagaaaggagctcggctccttgccgattttggacgagctgagggaggagagagcgcgtgggagagagaggtgctgcctccgcgtcttggacacacgcgcgctgcggcgcagaggtgggggcagcggcagagtgggcgcgggcggctgcgcggcgcaggcgggccagggcggacggtgaccgagggctgtcggccaccacggcgggagcgcgcgcgggaacgagcgaaggcggtggcgggttttgggcggcgacggcgggaaccggcgtcggcgcgcgagagagaaaacgagagagagagagagggagaaacagcgagagcgagagagctctttctctccgctcggcttggcacgtgcgagaggagggtggaggacggcagagggaggaaatgggccgaggggagggggaggagcggctgagaggagatgggccgaggagaaaacggcccacaaaaatccgagggaggcaaaatagactttttcagaggagattgatttggagagaaatggagagatttagggtttggattcgaattcaaatttgatattcaaactcgagggtttagggatgtatcaaggggaattcaaggagaagtcatgggaaagattcaaaaggaatacttgggtatttgttctcgggaacataggggagtcaaggaaggaaacaaaacgggggtttggacattttgggatttggaaatgtgtttggcgaggattcaaaggaagggattgactttcggatttagatttcggagacttgaattgggagaggagatttgaggcggaggattttgatttcgatgagagggaataacgggattaaattgagatcttggcacaacttagactcgcacacaaagaacgaaaattttcgcaattaggattttgccgaattagtttttaacgcctcacgaaaagcggagcgttacagctggccacgacttcggaaatggccggccggtcctccccctgcagccgcatgcagcgcgctgccgtctgcgccaccagctccgccgcctccagctgcctcgccgttggctccggcgtcggccgcctgtccaacaccttccacacgaccacacctcccctacctcgatgaacggcggtgtgacttcagccaagacggcggggattgcgttccgatcctcctccgaacagtcgaacaccttgtgcacgtcctcctcttggtaaaagagtgccctcatccccgtcaacacctccagcatcacgacgccgaagctgtacacgtcgatcgttggcttcgcgatcgctgtcgtggcgtactccaggtcgatgtatccgaacttgccatagaaagcatcggccggaacacttctcgtcgagtgatcgcagcggaccgacgcgccgaagtcagccaagcgccaaagcgtggcgcccaagtggcgtcgaacagcatgtttgacgagttgatgtcgcggtggatgatcaccggtcgctcgttgtagcactacaggtattcgatggctcgcgacacgcccagcagtgtctcgatgcgcatcttccagttcaatgacgtcctcaccggcgacgacgaggacgacggcggcggcgttgtaccgtgcaggtggtcgtgaagcgagccgttgttggtgtactcgtagacgatcaggcgctcctccaccttcttcatcttccggaacggtggaagaagctggcgcttctcctgttccagcacgcagctgccatagaagcagatgatgtgcttgtggcgaagggaggggaggatggtcacctctgccatgaattccttagctgttgtcccgtacgtctcgtccttgtgcgtgcgcttgatggccacctcgtctcgcccgtccggaagaagatatccaatgtacactgtgccgaagccgcctttaccgatctctctgtcagctgcaaagttgttggtggccgtcgcgagctccgcaaaggtgaatttctcaccttcgtctccatggagcaccacattttcttgcaactcctaggacgaagtaattgagtttctctctttagcaaagcaagcaagctagcacgaaaggtaaacaatttcagaaaagctcgatcgagtaacacagttttgtattgtacgtaccacctgatgagagtgggaggctgaagatggagacggcatagtggacatgtcgtttggaagaaggatgttgtagattcgatcgagacgacgagtgatgtagatgtggctgacgaaggggaagacgaggaggtacgatcgagtcgatcctgctctgaacttctctgaacttgtcagcttgccgcccggttgtcaccaaccatggtcatgccctgacaggacatcacaagctcgtgcgcctcccggagcgtgtcgccgagcccggccagcggccgccggacctccggcctccgcatcacctccggatcctgcaggtgcggcagcagctcggcaatcatgaacacgcggcgggcgagctgctcgcactccttgttctgctgagccgtcagcgccgccagcatgatcatggagattgttagatagatctccctccccttgagcccaacggcacaaggggccttgacacgcgccctgatcgggggcgcccagcccaatagctggtgggctcccgtcaccctgcgccatataaaagagaggtggaggccggggcggcacaagacacgaggttcgctgccaccgctaactccacccacaaaaccctaatccgatcgagagggggcgtagccagtgacgcaaagcttcaccgccgcgccacgcctcatagacgccgccgacggtcgtccacgccacgaccaccgacgccatcacgaccaccgtcgtcaccatccacgacaagcccgcgacgacaacgacgatggccggcacttcttcatcctccaacacctcaaccggtcggtctctaaaccctctcgtttcatctctatattgttgttcatccacccgatagaaccacctggctagatctaaacctaggcgatcctagagagaatcctaacagtggtatcagagcgagaaccctagtgtttatatcggttcggggaaagaaatccaaagaagacaagaaaagaaaagcaatgatccgaatggatcgaaaagaacgaaaccctaaccctaatcccttaccacgtcgccggtcattgtcaacgccagcaaaggggggagggcaaagggcaccgccttggggcccctcgatggctgtgcatgcacccacgggtgcacgcgcgtgccggcgagggggccgtggcggcgccgccatctccttcgtcgccgcctactctctctcactcggtggggctggtggcgcgttgggggagaagagaaaagaaggcgcggcggcgcgagggccgccggcatcggctgggccgaaatgagcccaagagggcgcgcgcgcaggagcgctttgccggcccaggcctaggttgcggttgcgcgcgcgcgcgcactcggccgtgggccagctttcctccgatgggccaaaatggcatcatgaacagtagcatttttcctttaaattttgtctattttcatgcaaatttcaacacaattttgaagcgattttgcatgctttacctctgtttaaaatttgatccaaaggagtaattttttacagagtgtaaataacagaattgctactgttcatatgtattttataaagttattccgctacaaatagataaaattgatgaaaattagtgtttctaaaattaaatttcgaaccaacgggagaatttaattttaggaacattaattctgtgctatgatgttgtaattttctgaccaacgttgataattgcaatgttatagttatagctttatatgttatgtctatttttacccaacggtgatgtaggcttaatgcataatatttttaatgttaattttgctctcaccgtacatgattatttcaggtggctactgcttgatgggttgcattaaagatattccgaccctgaagggagataactacgcagaatggaaaagaaaactcgacattgctttcatcttgggagaggtggactgggtgttgactaccccatgtcctatagaacctgctgcacttgtcagagttgaaaatgagtcagatgctgactggcaaagaagacagagggacaatgctcccctcataatgtcgtattacattgagcaaaagaaatggtccttagtcaacaagaaatgtttggctgtggtaaagaacacgattgagccaaccttattgggctcaatcccagagtgtgacaccatctctaagtaccttgaaagaataaagagccaatttactggttcttcaaagacttatgctacacagctaataaagcagcttgtgacagaaaggtaccatggaggtggtgtaagagaccacattcttaggatgagcaacatggcttccaagttgaagccaatggatttgggcatctcagatgactttcttgtccatttggttatggcctcattgccaaagcactttgacaactttgttgtcaactacaatataagtccagagaaatggaactttgaaaagctcatcgctaattgtgtgcaagaggaggaaagaatcaaagagtccaatggagactctattaactatgttaaagataacaagaaaaagaactacaagtcaccctcctcaaaagcaaaacagcctcagcatctgccttagcaacaacagttcactgttgaaaaggatcagtgtctccactgcaagaagacagggcattacaagaatgattgtcctgacttcctgaaaataatcatggcaaagaaaggtgagaacattattacatttgtaaatgaatctcattatgttggttattccagatccacatggtggattgattctggagcaactattcatgtgtctaattgtttaaagggattccgttcgacgagaactacgtaaagaagcgaaagctccattagagtcgccaatggagttgaagcaaaagttgaagctgttggagatcttcgcctagagctcgcgaatggcttcacacttttacttagagatgatttttatgttccttctttgcaaagaaatttaataagtgtatcgaaattggatttcggtggataggattgccattttggaaatggaaaatgtaaactatggtataataatgcatgtattggtcttgctgtgttgcaagacgagctttatttgttatctcttcctgagaatgtgaatgttgtgtcctcgttgacaaaagaaaacaagaaaagaaagagaactcctgatgtctcatcgaaattatggcactgtcgtttaggccatatttcaagggggagaattgagagactagttaagaatgaaattcttcctccattagagttatcagatttagaacaatgcattgaatgcattaaaagaaaatttgtaaagagcataaaaaagtgtgcaaaacgaagcgtaggaattttcgagatcattcacacagatatttgtggtccatttcctgtgaaaagtgtagatggctatgactcgttcataacattcacagatgattactcccgatatggttatatttattcaattaaagaaagatcagaagcattggataaatttaagatattcaaagctgaagttgaaaatcagcatgacataaagattaaagtagtaagatctgaccgtggggggagtactatggtcggcatacgccttatgggcaattccatggaccttttgcaaggttcttgctagagaatggtatagtagcccagtattcaacaccaggtgaacctcaacagaatggggtagtgaaaggtgtaaccgtacccttatggatatggtgcgcagcatgatgagctactccaccttaccattgggtttatggatggaggcattaaaaacctcaattcatatcctcaacatagttccaagcaaattggtgcccaaaacaccgtatgagctatggacaggaagagtaccctcgctagctcacctccatgtgtgggggagtcctgcagaggctaaaatatttaacccaaaccttgggaaattggatcccaaaacagtaagctgtcattttattggctatcctgaaagatcgaagggttatcgtttctactgtccaaacagttatacaaagtttgtagaaatgagacacgccgtcttcttggaagacgaaatgattaggaggagctcggtagttcgagaaattgatcttgaggagaggcaggtgtctgtaccggctccgtcgactcaagagccttttttctctctacctgctgatgttgtgcctgcaatgcatgacgttgcggtactagcacctattgttacccctcctgtggcaacattgaatgaaagtgaggaacctgttctacaggattcaacaaaaattattgccatacaagaggaggaggtgcaacagcctcaaacagagaatgtgccaaatgtggaggcccctagaaggtctgaaagagtcagaagatcggctatctgtgatgactatgaagtttataatatagatagtcgcatatggaggatgatcccacctcatatgaagaggccatgagaagcgttcgctcatctgaatgattggaagccatgaaagatgaaatgaaatcaatgaaactaaacgatgtctgggatttagaagaaattcctaaaggagccaagacagtaggctgtaaatgggtctataaaaccaaatatgagtccagagggaatatagaaaagtttaagacgcggcttgtggcaaaagttttcacgcaaagagaagaaattgattacaatgagacattttctccagtctcttgtaaagattccttcaggattataatggctttggtggcacattatgatttggaattacatcagatggatataaaaacggtatttctaaatggagatttgaaggaaaaagtatacatggcacaaccgaaaggttttgtcgtgaaaggaaacgaaaatatgggatgtcgtctaaagagatccatttatggattaaaacaagcttcgagacagtggtacttgaagtttgatgggacaataaagaaatttgggtttcgagagaatattgaggacaactgtatttatacaaagtttaagaatgggagattcattttcctagttctgtatgtaaatgacattctactggctagtagtgatgtcagtgtactgcaggaaacaaagaaattcttgtcctcaaactttgacatgaaagacctcggtgaggcttcatatgttttgggcatagagattcaccgagacaaaacaaagtatgtattgggactttctcaaaagacatatatagaaaaggtgttgaagaaattcaacatgtacagatgcagtgccacacctgctcctatagtcaagggtgaaaagtatgggacatggcgatgtcccaaaaatcagtatgagctcaacgaaatgaaaacaaagccatatgcgtcagctgtgggaagcctacagtatgcgtaagtgtgcacacgtcctgacttggcatttatcaccgggttacttggcagatttcagagtaatccaggcccagagcactggaaattggtaaagaaagtcttgcgttatttgcaaggtacaaaaggcctcatgttgtcttatagaagatcagagccgctccggatagtggggtattcaggttctgattttgcaaaagataatacaaagtcaacatcaggatacgtgttcacccttgcagggggagctatttcatggaaaagctccaaacagactatcactgcagggtctactatgtatgccgagtttatagcatgctatgaggccacggggcaggtaaactagcgaaagaagttcatacccggtttaaaggtggttgacagtattgagaaaccactaaagttatgctgcgacaacgaacccacagtaatgtacgctcacaacaatcagtcaagtggtgctgccaaacacattgacataaagtactattttgtgaaggacaaagtccgggattaaacaatcagtctcgagcacattagaacagaaaggatgctcgtggatccgctcacgaaaggcctaccacccaacgtgttcaaggaacat

SEQ ID NO: 24463 - DNA, 1936 bp, Oryza sativa
  unsure (1)..(1936): unsure at all n locations
gacggtagacaacaatttattccgtaaagcccatttcactgttctgcaacactcttcattggtagctccttacatcgaggagcacttgactctagttcgcgccaggaacattggtaagtccgatgcatggattacacggcatcacattgatactttccccgcgtggctacgacaacatctcatgggtaacgagtcgatcaaccaacaacttgccttcctggcgaggggaccgtctgggttcggatttcgggccggaaaccaatttttttttcccccaaaaacgatatgaacaatgggtcacatttacacgagagcccaagacatgaagagcacgaaccaaaacagcgatgttcgtgtcaatgccntggnacncnnannnnncaagtagggnaggttgcngtgccatcgaggacatatgggaacttgactatggtcctctcaaggttcctctgttccggtgccaatgggttaggttgactggtggaggcgtaatgattgatgacagtggatgacaactgttgaccttaacaaggttggatactcggacgaaccttttgtccttaccaatgatgtaacgcaagtctttttcgtgaaggacatgtctagcaaaggaaagaagggcagagggcctgatgagcctaagcgtcaagtggttctcccaggcaaaagaaaaatcgtcggagttgaggacaagactgacgaggattacgatcagttggatgggcaaccccctttcacggtgacgattgaccctagcatcctcctatcaaatgaagacaccccttactcacgcagcgatcacaaggagggaacaatagtgaggagaaagtacgtgcggtcaaccgtcaccgccgatgtaatgccgtaattattgtgtacacgatgtaaactattttggatgtattgattatccatataaatcaattgatgtatggcatatgttaattacgcacgattattagaggtttcaacaagtttaaatcatgtatatgctagttatatgtgatacttacaatttttaaaagttttaaatcacacaggtggcaatttcatatgtatgttaattagagtttttaacatttaatttactagcatttatatgctaattataattgactagaggatttttaaaagttttaaatcacgcaagtggcaatttcatatgttaattagagtttttaacatttaatttactatcattcatatgctaattataattgactggagaatttttaaaagtattaaatttaatatatttttaaaactatcattcatatatttaatttactatctttcatatgctacttatatatgactattccaatttttaaaaggtttaaatcatgcatgtggcatttacatatgttaattaaagtttttagcatttaatttaatataattcctacgctaagtatatatgatgattacaatttttattaattttaaatcatgcagtatgtacatacatatctttattagagtttttaccaatataataatatcattcatatatatgctaagtatatatatatattggaatttttattaattataagtcatatatttgcttattacgatttatccacttaatttattacagacaaaaataattttttgaagtaattgtcattaatctttgtactttaaataatgttaatgcattaacttctattttataaacacatatgtaagcgaaaatcatatgcagtgctataatctttagtcccggttcttaaccctaaccgggtttaaaaagaatttcgaaatagcgggaaaagatatttactcccggttggtaagaccaaccgggactaaagatcatctttagtcccggttgttctcaacaaccgggagtaaatatcttttctttactcccggttgttctcaacaaccgggactaaagatatcttagtcccggttgttctcaacaaccggg

SEQ ID NO: 24464 - DNA, 1368 bp, Oryza sativa
cgattgaacgtgaacgagctagggaacatgaacgagcgaacgaacgaggacgaacgttaacgtgaaatgcaatatatatatatatatatatatatatatatatatatatatatatatatatatatatatatgttacttcgctataatcctaatacatctttttgtatcttgcagaaaagacgtgttgtcggagtcgtccgtcaagcctgagtggaagagctagccctagaaggaattggagcaggcaagtgatgtaataatataaatgattgttatatttgtaatgcaattaattaagattattagacctgtaattggacttatcatataagattgtgtagtgttctaatattatttgagttttaatataagattactttatttgtaattagacttagtatgtataattattgactacggaattggggcgacaagtagcaattgactattgtagtcttaattagacttagcatatacgcacgaaacacttagcatagatgactattttagtcttagcatgtaatattattggagttttaatataagattactttatttgtaattagacttagtatgtaattattgactatggaattggtgcgacaagtagcaattgactattgtagtcttaattatacttagcatatacgcacgaaacacttagcatatacatgactattttagtcttagcatgtaatattacttgagttttaatataagattactttatttgtaattagacttagtatgtaattattgactacggaattggtgcgacaagtagctattgactattgtagtcttaattagacttagcatatacgcacgaaacacttagcatatacatgactattttagtcttagcatgtaatattatttgagttttaatataagattattttatttgtaattagacttagtatataattatttactagctagggttgtacaatatacgtcacctagacttagcttatatcacgatttgtaattagacttagcacgtaaggttgtgtagggttctaatgtacgacatttacacttagcatacatgacttagattgttaaaacataaatgtctcgtgacttagcagatgtttcttgtatcaacagatggctgaccgcgatgaggaacagatattgtacgatacaatcgcggagggaagcagccagtactggaatgaagaagaggggaatgaggatccaaaccagtacttgaacgaggaaggaaacgtggagagggatgcggaggggaaccagcaggggcacgtggaaagggatgtggaggggaaccaggaggaggaggctagtggtagtcaaccctccgttggacagaagagggcacgcgggcaatgaggtgcagcgaag

SEQ ID NO: 24465 - DNA, 1091 bp, Oryza sativa
atttacaattgtacaggtacgatatgtggagtgttggtgttgtcatgctggagttgatagtaggttctccacatgttttccagataagtgaccgtacacgtgctctaatggatcatcgccttgaagggtggagtgagcaaacaaaggaacttgcatacaagtgagacattattttgatattcctgtctgaaaattgtgaaggacgttttctatttctggatcagtgaaaactgttggtgctgcattttgattatttcatcaggcttaagaatatcaaagttgtttcactgtaaatgaaaagagtataagctcctgtcagattgtcaaccacatggttctcaggatatcccaaaatattcagaaaattaccagacccttctttttagccaatcaaagaattcatgaccttttctgaagtgcatgattaacagtacaatccattattgctggaaattcgatccaccctactgcaagctacataattttggttttctaactatctgtaagcaatttaccaaaatgacctttctattgatatgatgtagtaggtagtagcatgatttaatttgtctggtttgtttccctgccaaacctttgaagatgctctatttattggaagggataattgcttatttgaccctgtttggaaagctaactaccaatctgaccctagtttttctagtttgcttattggaattacgaatttaactatttccaaattaatttttcatatggaaagatatagtcctgaagagtatattgtttgactaactatttcttctgttcctgttgtaatgttaggttgaggtcctacatggaattgtgcattttagtcccaggaatttcctcgcagcatcagggcagtggtgactctgaacatgtcagtatctcaactccactttatgttcatttaacatgtaatgattttttacaatatatatgttcatattcttccaaaatgtgatttaaatggttatttcctttatttacacattgttcattatggaccaaaacaatctgtatttttttaaaaaaaaaggaaatgtaagaaatgtactccctccgtttcaggttataagacgttttgactt

SEQ ID NO: 24466 - DNA, 5719 bp, Oryza sativa
tatacggccggaagtgccgcacacctctcttctgggatcagacaggcgagcgtcaactgtttggaacagaggtattagcggaagcagaagagaaagtcaggatcatcagggaaaggttgagaattgcccagtctcgacagaagagctacgcggataaccgtcgaagggagctcacttttgaggcaggagattacgtgtatcttcgtgtcactccgctccggggagtacaccggtttcagacgaaaggcaagttggtaccacgcttcgtgggaccatacaaaatcctggaacgcaggggggaagttgcttatcagttagaacttccatccaacatgatcggcatccatgacgtgttccacgtgtcccaactaaagaagtgcttaagggtacctgaagaacaggctgattcggaacacattgatatccaggaggacctaacatatgtggagaagccggttcgtatacttgataccagcgaaaggagaaccagaaacaaggtcacccggttttgccgagttcagtggagtcatcattcagaagaggaagcaacctgggaaagggaagatgagttgaaagccgcccatccgcacctcttcaccagcacctccgaatctcggggccgagattccgtttaaggggggtaggtttgtcacaccccgaagttttcctcccaagccaaaattgtaatttttataaatgaccctaagaaaatgctggtgaaatcagaagaaaaccctaagaaagtaatgcaaataataatcggatatgacatgtggaatttttcttgagttctacatgtcgcaattcattaacaggatttttagtggaattttcagagctctagaaataattttaaccaattaaaattgagcaagcaatattttaattccagggaaaatcctttttcctttttctttttctttttcctctctttttcctcctttttctttcgaatgggccgccggcccattccctccttcctccccctcctccttgctgggccggccgcaggccgaggcccagccaggccgccccgccgcctcctctctcggggtcgccgacaggtggggcccacctgtcgggtccttcccccacctcccgccgatctcgctcgcgccgtcgcgcccgcaaccgccgccgcgccctcgtctccgcctcctccgggccacgtcgaccacacccgcgcgtgcgccgcgtctcccgcgcccactcccctctctctcccgctcgcgcccgcgcccgagatggccgggattcgattttcgaatcccgcctctctctcctcccccactccccacgtcggccggcgattcccgcctctcccggccacgtccggttccctctccccctatttaagcatcgccgtcgtcccctctcactttttccccatttcgccgcactctctcgagcctcccatcgctcccgcgccgtgcaaccccttgccgccgccttttccgctactccggccgccgctagccgccgttagggtcgccgccaggccgcgccgtcgccgccgtcgggttcgcgtggccgagatccaccccgtccacccctcctccgtcgaggttcgtcgccggagccctcgttccctcgcactcgggtgagcaccacctccatcgccgccttcggccatggtttccgatcgccgtggtccatctccctctctctaatccctctcttctccgtccttagggcaccccgaagctcgtccgcccgccgacgtcgtcctcccgtggcttgccgtcgccgttcgccatcgtcctcctccgcgccggccaccctcggtgaggcatccctcccctcttttccccttcctctcctcctagtgccgcgccgccgcttcgagtcgcgcgccgtcgccttcggccgccgccgcctcccgtgccgccggtcgccgccgtcgtcggccgcatgccgtcgctgctagacctggccggccggtcggctttgatgccgagccgagccggcgaccgcctttatcgccgcccgttcccttcccttcctagccgccgcttagcgcagccgccttcgcgtcgccttttgcgctgtcgccttcgccgccggccgccgtcttgcgccgctgccgcaagcgcgccgcgccgtcgcgcgccatggccgccaggccggtttgcgccgtgcccgcgcgccccggccgcgagctcccgccgccgtccgatctacccttgggtagatcggggccatcggttcggccgccacgtggtgcgccgctcctccccggtccgtggacccgatccgccgtggaccgccctctcccgagtcactgccatgcgggtcccgcttgccggcgccccttcctccctctcccgagccgctgaccggtgggccccgcatgtcggcgccgcaccccctccgtgctgacgtcagccctggaatatattgcgcaataaatgatttagggtttttcttttatagtaataaacacagtgaatcttctaaaattcataactaattcatccgagctccgtttaagctcattcaagtctcagtaaatcaagaaaaatgtgtagaatccattaaaaatggttttgttccctgtttcagtagtcttatagcctgtttgcaatgtttgctttgtatgtcgctagattccgattcctccgacgctccggtgtactttgagatagtcgccgaggttcctccagcagcagagcaaggcaagttatgcttgtcacttgaacatgttgatcctatattgcaaatgctctattgttttctttcaaatattgcattgttttataatattactatgggatggttacctattgttacagccatgtttttggatatcatgctcctttgttagcttggggttataacatgattagagtttggactaggaattgcttagccatgcttagttcaactagttcacaatggggaaaaccatattaatgtttagactattggttctaatgataatgttggattagtaccaccgctctggtgttggttaattaaaatgaatcacatggtgggctgtgggtgcatggttttgctggtcgcacccatggcagttaaggaccggttcgcgggatgccctggaagaacttatcgtacttaccacaagccagcgtgggcaacggctgggcttgtagtgtagctttcctctagccgacgcatccaggcaagggtgggcgtgatggagtttggatgggccctgcgacggcctatgcggcttccggattcacctaggcacgagaggggactgcccgctgccttgcgaggagtgggggtgaaacctgaggtgtggtgtgcttggttagagggggttatgcgaatggtcctgtcacggcctctttccggtatgtcgtggtgacatgtcggcgcacggaaacgtgtcgtggggctgtgtcttgtgggtacagttgtacacctctgatcagagtaaaactattcgaatagccgtgcccgcggttatgggcggtcaaccagattcaccgtgattagtctcaccttagtgtaatcctttaatttggatagtttaggtggatggttgggcctgtcgcaacgtgggttagcgttggacagtggatagttaatattaattaattattacaactgtttaaatctttcaatctctgtttataaatgctcgctttatgcaaatgaaccacttcagctcttctttgttaattccctgcatcatacccctattccggtatgacttgctgagtacagtgggtagtactcagtcttgctctacttttcccaaccccagagttcgagttcgggtcagatgaaggtttctctgaggagtaggcttcgtccgtgccgtcgaggatgcctgtggagtggtgttcccgctgcagtttagtcaaggcttagctcctgttatctttcttttcttccgctgcatttatgtaagactttatgatgtttgtaagacgtggatctgtatgtcaacattgtcgtttgtgtaccccggctggtcctggacggggattttaatgcacattctgcttggaattctattcgggaatttctgggcgtgacaagcattccccttgttcctgaacaaacgccttagccgtggtattataaggaaataccacatcaccttagcaggaattctcttctttgttagctgcccgtcaacttctcctggatcgtcccgtctaatcttgtatcgtagtgctttgcaaacagggcatgcttctaggttctcatactcctcaccgcgatataggatacaatcgttcggacatgcgtgaatcttatgaacttccagtcctaacgggcagactatcttcttagcctcgtacattgtctcgggcaatttgtttccccccggaagaatgttcttgacgagtttcaataaatcgccaaattccttgtcactaaccctattttttgccttccattgcaacaactccagagtggtatccaactttttgtgcccctgctcgcaacctgggtacaacgaagttctgtggtcctccaacatcttgtccaatttataggcctccttttcactttcgcagtcctccctggcgtcctgcaacatctgaccaagatcatccgcaacgtcgttaccatcagcagctatttcctcctcgcccgtttgatttccttcaaatccaacatactgagcaaagtccggaatattgtcgtcttccacttcatcttcttccatttcaacaccttgctctccgtgggatgtccaacaattatagcttggcatgaaccccgactcaaacaagtggaaatgaatagtcctggatgcagaatactccttctgattcttacacttattgcatggacaacaaataaaacccctttgcctgttagcttcggccactctcaaaaaatagtgcacgccgtcaataaactctttggaccgccggtcagcgtacatccattgccgatccatctacatgagtcaaaaaaaccgtacacaaataattattcttacaataatgacagtcatacaataattataagatatctttattcatacaaaaatcataaaatattacaccaaataattcttaaaaactatttgtaaagttttaaactaattttaatgtgttttacttcttttaattttcattttagtttgttttctattatttaagattaactttcactagagttttccttctcaactattttataaaaccttgtttagcaaatgaactaaatttctatatattctttcttccccacacacattttctctctcatcaacttacaactaaattttggagacaaaaaaagtgtgcaaaacataggtgcaaatgtagtatgacaaaaaaaacattggaggatgaagttgcaaaccttttaggcacctccgatttgtatgtaatcaccaaaataaattcaatagaaattttggcatgacctcccctcttttttgaagaaattttgaagcttgctcgggcagctggaggaggaaaaagacatatatatataggggtgggactttagtcccggttggtagcaccaaccggggctaaagatcaccgggatctttagccccggttggtgctaccaaccgggactaaagtcccacccctatatatatatatctttttcctcctccagctgcccgagcaagcttcaaaatttcttcaaaaaagagaaaaaatcataccaaaatttctattaaatttattttaataattacatacaaatcaaaaatacctaaaaaatttacaacttcatcctccaatattttttttatcatactacatgt

SEQ ID NO: 24467 - DNA, 20591 bp, Oryza sativa
atcaataacttgtttaaaccgggcgaatttaccccctgagccaatttaaaaggggttttcatctaaggtggacacgtgccagttgggacgggtttttgttctatatggcactttttgggtaaaaaaaacgctattcatcactatttaattttattttattcatcactatttatttttacaaaaaacctattcatcactatttaatttaattttattcatcactaataatttttacccctgaactattgcgtcgatcgaattacccccataaacttgaataccagatatttcacatcataaacttttaaaaccggacgaattacccctgactcaatttagagtggttttcatcctacgtgtacacgtggcagttcggaacggttttgttctatatggcactttttgggtaaaaaaacgctattcatcactatttaattttattttattcatcactatttatttttacaaaaaacctattcatcactatttaatttaattttattcatcactaataatttttacccctgaactattgcgtcgatcgaattacccccataaactcgaataccagatatttcacatcataaacttttaaaaccggacgaattacccctgactcaatttagagtggttttcatcctacatgtacacgtggcagatcggaacggttttgttctatatggcatacatgtgatgctaacgtggcaatccaatcccaaaaaaaagttaacaaggccccacatgtcatatagagtagtactaaactctctctctctctctccttccctccgacgtcgtgggcgcggcgtggagcggagccaaacgcgatggaaacaacaggaatggcaggtggagccgaggagccgtgctcaccggtgaagaccaaggatctgtgcgccggcggatccagaggaggagccatgcgctagaggcggaatcgaggactcgtcgccacatcgccatcgcccctagccttggcagcgtccgccgcttccactatcctctgcgcggcccaccggccaccgcgccctcaccacgtttccgcctcccgccacctccactatcctcctcggcgccccaccgcccaccgcgccctcccagcgacgctgccgcccaccgcccgtgccgtcccctcctcctcctccccccccccccctctcccccgcgccccggcgtttgaccagtgcaaagaagaatgatcgtgcacacgtacacgcgccacccatacgaaagctatactccaaccaaacgtcaggccacaactgttggacggactcccccgcgcgtgtcagagatgtcgggtttcgggtctagggggtattttgtactcacacaatagtttaggaagttgatttggactttttcggaaaaaaatatgacagtgggtctagacactatttctctctttttcaaacacaaataaatattttgatttgtagagtgtctagtaataaataatcatactttgaggatttatttctccaaggatcgatttttctcatgtccatgaactatgaccactaattcgtgtcctaccttttttatgtcctctaccaaattacaaacttaagtatcatgaaccaaaatttaccttattaataacgtcaacaattaggaaaaatagagttttttttaatgttttatgacaagttaaacatgtataatgaaatttttcatgatgaattagtaaggacttcaaatgaaattcattctaaactaataatatcaacatttctaaaatacaacggggtttttaattgtcttagtaaattaacgtaaagaatttaattaatctataatttaattgccaaatatccgtagatgtaagtaactgcgtagcaaattaagcaagccttttgatttataaaaagggaacatttataaaaaggacagcaacggcggagcaccccctgtcgaatagagcgcaagtgccttgcgtgctgcagctgaggcgcgctaaggacgctgatggccgggtgggcgcgccaccgcagctgcctcgccacggggtgcacgtatgttgcatggttgtatcgtccatgctacgtgcccttgagttgaggcacacgcctagaggtgcatgtggccgtggccgacaaaggtgcatggctgattatcgacgagcgtgtgtggcattcgcacactccactcaactggggaagctcgtctctactgagttcatagaggtggttgtcttcgtttgtgccggttgggaaactcttcctctggcacaggagaagtaacccattaacacataattaatcaagtactccctccgtattttaatgtatgatgccgttgacttttcgaccaacgtttgactattcgttttattcgaaatttttgtgcaaatatgaaaatatttatgtcatgcttaaagaacatttgatgacgaatcaagtcataataaaataaataataattacataaattttttgaataagaagaatggtcaaacgttggacaaaaagtaaacggcgttgcacattaaaatatggaggtagtattagttaaaactaacatgaaaaataaattagtataatctattataacaagttttctataatattttttttgtaaaaattatatcgtttagcagtttaaaaagtttacatgcataaaacaagagtgagcagttgggaacgtagcctcccgaacacaacttaaagtccttttagcttgtcttcctgtatttttggggaaaaaaagtaatatgaagttatctatttattcatcactatatttcaagaagaaaattaaatttatttttaactattctttattaatatttttttaattctaggccttttatctacttttttttgtgattatatatactatatgatattatcgacatgatgtggtcttttgtgggcaaccagaatcgatactaggctagtaaacagatgtgtggaagaaatcaccttatggcttaagggattgagggggtgttgatcgaggggtgtaaaattttagtgtgttacattgggtattatattgagtgtcgcatggggtgtttggacactaataaaaaaactaattacagaatccgttagtaaaccgtgagacaaatttattaagcctaattaatccgtcattagcaaatatttattgtagcaccacattatcaaatcatggagcatttaggtttaaaatatttgtctcgcaaagtagtcgcaatctgtgcaattagttatttttttctctatatttaatacttcatacaggtgtccaaacgttcgatgtgacagggtgtaaaatttttatgtgggaactaacagggcctaaaatgcgctgacaagattgtggtatcttcctgaaggaaaccttatcatccatgttaccttgtcatttgacttctaaattccaatcaaaattttggtgggaaacccctcctcctcctcccccccccccctcccccgcgccccggcgtttgaccagtgcaaagaagaatgatcgtgcacacgtacacgcgccacccatacgaaagctatactccaaccaaacgtcaggccataactgttggacggactcccccgcgtgtgtcagagatgtcgggtttcgggtctagggggtatttcgtactcacacaatagtttaggaagttgattcggactttttcggaaaaaatatgacagtgggtctagacactatttctctcttttgcaaacacaaataaatattttgatttgtagagtgtccagtaataaataatcatactttgaggatttttttttccaaggatcgatttttctcatgtccatgaactatgaccacgaattcgtgtcctaccttttttatgtcctctaccaaattacaaacttaagtatcatgcaccaaaatttaccttattaataacgtcaacaattaggaaaaatagagttttttttaatgttttatgacaagttaaacatgtacaatgaaatttttcatgatgaattagtaaggacttcaaatgaaattcattctaagttaataatatcaacattttaaaaatacaacagggtttttaattgtcttagtaaattaacgtaaagaatttaattaatctataatttaattgccaaatatctgtagatgtaagtaactgcctagcaaattaagcaagccttttgatttataaaaagggaacattttaaattgccagaacaaagtaaagcatctataaaaatgataagctcctcaaaagcccttccacatgaattagtttcagaaagcttgcaatagttccacacgaatacagttcaaatggatatttattacaggatcaaatatatagtgccaagcaggtctgatgatagtttacgtgtcaagcaaacagaacaggagacgaagataaaggccacagttttacaaagtcaatccaacataagattccagtgaccaattcaaatcctaatcttgatttctaactcttctgctcacagcttcccggacatgtacgttccacctacatgcatgattcaaaagcattcacgtcaaacccaaagtaaaatctctctaccagtttctatcatataaggtgtaatatggtgctaatcgattcattccatttcgcattagggaacaaacatttatatgtacctctctcagcaatctattccatttgtacaaaaaaaatcctccgaccgtcagcctctacaaaatctctgtgactcccctatccgcctctacaaaatctcgacaactgctgtaactccgggtgttcctgagttatttacaaattcgattaacagttgatatacataattgcgcgcactaattacaaattggattaacagttaatatacgtaattgcgcgcactaaataaggtatattaaaaatctctcacctcgaggagttcttgacagttctgaacgtgtaataaacgatgctcctccgtacggaatcgcacagcacatccgttctcagggcaggcagcaccataaagtccatgattttcgtaaacatgtttgattacctgcatagagagaaagacaaatttgtaaatttactttgttcataaataagtttatttctatcctctcacttttcttttagtaggaaggggtaaattaattaaataaaacatacatctttgcgacggatgactccatcccaaggaaatctgggtgctccttcgaagaagcacaaatgacataactcgaacttttctgagaattttgccctggcatcattgaattccttgtatttcttctttttctggtaaggattatccaaaacctaaaataatatggcaaaaataaatggtcaatttcatctaggggtggataaagaaaaggtttagggagtaacacatatcttctttctataaagctaatgatcactaatggccattcccaacccaagacactagacatagttttgacaaaccacacatcatcaagaaactagtactaggcactacgttttcaatgcaaacaccactattacatacttaaatttaatgctgcttagtatctcacgtgatgttttggatggtgtagaaaccaatggttccggccttctccttcctcatttattcacttgccacatcatttttcatactaagtgacagcttatttaatgatatggacactatcctagtcatttggttgggaatagcctaaacatctagagctcaacatgcaagcatagtatttattagcactcctaaaatctctaaacatatgcatggagcattaaatataaataaaatgaaaaactaattgcacggtttgcatgaaaatcgcgagatgaatcttttgagtctatttagtccatgattagccataagtgttacagtaaccctacatgtgccaatgacagattaattaggcttaataaattcgtctcgcggtttccatgcgaattatgaaatcaattttttttattcgtgtccgaaaaccccttccgatatccggtcaaacgtccgatgtgacaaaaaaaatttattttcgtgaactaaacaaggcctaagataaaaacacagggacagcgatgtttgcaacacatgtcccaattatttgagtggaacatcaacagaaccatccaaggacgtccccacgaacagaatgtatgataatccaagaggaccttaattagtacctggtcatctttcagatcgccgtcctgcggctgatcgtctccctcttcctcatccggctcctctttctttcttgccgtggcgagttggtacttccatgcatggttacctgtcgcgatgaaagcggcggcgcgcttgggtggtgctggtcctggctcggcggcgacgcgcggtgcagtcgaagtggtgcgccgccgaaacgcccatctcttcaacgcctcccaaacgcaatgcaggcaccctccgacgcgtcctcgtccatctggtgatgtgtcggatgtggacgacgacgccggcggtggcggtggcggtggcggtggcggacccggcacttctcggaggcgtgcaagatttcttgcccttcttcttgccatcgacgcggggcgcgaacggcggacggcggagagcactgcaggacgtgcccgccgcgcgtggcgaagaagggacggcggcgagcgcgcggatgaggcacgcctcctgtcgaacaggtagcgggcgcgcgccggcgaggatggctcgcttcggccggagcgtcacggcgaaggcgttgcaggacggagtcaccgccggggcgacaagcgacggcggcggaggtcgtttcttgggcgcggtggtggggaagtgcgcggcggcgagaggaggcggcgtcacggtgggaagcggcgatcggcgcggtggagggcgatttcttggagctcaagacccagaacacgaggttgttattataaccgccttctgcacggccgcctcgccgccgggaatccgtcctcattcggacgccagcttcggcgtctgggttcatccgccgctgctcagccgctcggtcggtcggtcgcacctggtgcgcgtgcggctcaaacgaagcaagccacagcaatggcgccgccgcggctgcgctccaagcttcgagaaggggcctgaggccctgagctcggtggaggccaagccaagctcatcctgttaaaattggttgctctttcaactagtacaagtcgtacttcattgcttggctggtgtacccgaatagctttcaatccgtatgtcctgtgttcgactcccgctctgtttaattttttttgtttttgatttagattttttttctgtcccctctattgtttttataataaataaaaacttccaaaatgctactagcaaattattctttttccttcatattttctactgtctgatacattattacactataatagggttcttttttttttcttctccttcctataatagggttctttccttctttttttttccatgccccatctaattcagttcaagctccgcaactaaggttgtgtgactattcattggtgcctctagctatatttcttgctcgtcggggtatttcgccgaacacaacgaaactcagcatatggtaggcctacgcttccaccaagcttgtagttcagcgccatacatgctcccatccacggcgcgtccacacgtatgtatgtacatggcacgaagatatatccattttcactggcggtcccttaggtgggccgccagcgaagattgattattttcgtaagcctttttttaagaaatccgcttgcaaaaatatccatatttttgctggcagatctcttaaacaatcgcgagcgaaattgaatttttgctggcgtgctgggggcagctaaaaccaacacacgaaaccccgcgcatcattttaaaacaagccacccctcccaccaacccccgcaccctcttttcttctcctctacgcccttctctccggccattctccggcgccatcaccgtcgcctccctccacgacgaagccgcctttgccgaggtccacctctgcatcggtcaacttcgaggcccgggccactggccagatctagcgatcccgggctctccgcggcgggactcaagacctccagatctgacgtcggtgatgctcgggaccgcctgatctgggggagggggtggtggcgacagtccttggcttcggcgagagctctggcaacgataaagtggcggctgcgtccggcggcctacaggctcccgccagccgcacgcgcccagctgtggcgcccggcggcgcagctgtcttcgtgcgccgcgccggcgcccgcgcagccgcgtcctctccgtgactccgcgtctccggctctcctcccctggccgcgccctctccgtcccgcgtccggctgtcgcctactcgcccggcagcctcccgggctcctggcgtcccgcccgacgccgccagcacccagccgcctaggccagcaggccccatccaccgtccgcccgtccggccaatgctagtgcgccacagcgccagtgcatcactccctcttcggatctaaacacatgcatccctctaattatagatgtaagcacgcaaatccatcatttaaatttgtaggcatattctcacatgtgtactaattgttccatcaaattgttcgtccaacaaactaatataattccctggtgaattgtcctttcttgctcatctatctactaatgcagcaaaaaatttgcttgagttcagatggtgttttttattttggaaattggaactgtatcggacatttagtcaacctagttatttttgttgggcatcaggccatcagctcaaccggattgacatggtgacatgtgcatgttgcttagaaacagaattctaaaccttaggtgctcacatatagaattaggcagctgcatgtgcttagatgaaaaaattttggaaagttgcaccttgtgatctaccaattccacatatggatgaagggtcatctgttcctgttgtagatgatgctccaattgatgaagacaccgttgttgaagaagggtcatgtgaagaacaaggaccacctccacctccagatgttgttgctcatttaggtaagattcaaacttatttgtcattttgtacttgtactgaaccatttagagttatataccgtatcgtttaccacattttatatcgaatcatattgtattgcattcggtttttttgctaggcctaccctgagttcaagtcctgggtccgccactgctcagatgcccgacctgcacggctgcacgtatacgacatgtataccgacatgtatagttctagaaccatattatactaaataattgtgtacccaatacatataagcatcatctctctaattaatggcaatatgcaacaataaagtgcatggaaaaaaatgcgtaccataatgaaagataccaactgataataatatttataaagttgataatgtgtcaaccatagacaaaatacctccatcctcaaaacatatgagtatatatatgtatatcaagcaatacaacgacgacacgagacaggatggacgtgcatggccttaatgaattggcgtgtgggctgcgggcctttagctttgtggaacctaattagaggcccatacggtgcagctagctactgtgctagtgcgggtttaatttagtcccacctcactcaccgaatgaacattgcactgccttataaacggaggcatggatactgctagcaagaaaaacataaactgagagctgcagctgatctggagtgtatcgtactgcatatgttaatcaagcatatgtgcttgagaattcacggatattcttgtgatgtgctgccggcctgattgaactttgattcaatcacatttttttatttcattactatttaatttaaggtaaagtatgaactaatcactcttttttattcattactatttaatttaaggaaaaaaaaacgaattacccccttacccccataaactcgaataccagatatttcacaccctaaacttctaaaatcgaacgaattatccccctgacttaatctagagtggtttttatttcattactatttaatttaaggtaaagtatgaattaatcactcttttttattcattactatttaatttaagggaaaaaatatgaattacccccttacccccataaactcgaataccagatatttcacaccctaaacttctaaaatcgaacgaattatccccctgacttaatctagagtggtttttatttcattactatttaatttaaggtaaagtatgaattaatcactcttttttattcattactatttaatttaaggaaaaaatacgaattacccccttaccccataaactcgaataccagatatttcacaccctaaacttctaaaatcggacgaattatccccctgacttaatctagagtggttttctactatgtgtacacgtggcagtccaatcagcatttttttttaaaaaaaacattgggacccacctatcagcttctgccccctttgagcgtgaattttaaacacggagaattaagggttcaaatgaacttatcctgatacaatcaaattatattgctccttaagcacagcgagtactgatacaatcactttttttttcaccttcttataatagagttctttcctctcttttttttcccatgccccatccaattcagttcaagatccgtaactaaggttgtgtgactgttcattggtgtccctagctagatgtcttgctcatcggggtatttcaccaaacacaacgaaactcagcatatggtatgcctacgctaccaccagccttgtagttcagcgtcgtacgtgctaccatacgcggtgtgtccacacgtatgtacgtacatagcacacccctgccatcttataagaacatgcatgtgggggtgcaaaagatgaagcgaccatatcctacacgcttacacggtgtgtatcgctcacatacgcctcagtcaccatccgaaacacacagacgccggcagcgctcgcacttgcaatcactaagctcctagtgcacgacgcaataattcgatcgatagtatatatattactctagatatccacttttgcggtcttcagctaaatagcaccctcgtcataactcatgtatttatttaatttaaacattcagaaatatacatgagtggtttacagtactttgaaccggactaactgtcatacatccagtttacaaatgaaccccttaagactgggcaaataacacattcgagcagcattttgtggaaaagggctaaaaagaaaactaaaaagcaatcaagtccttgtcccatggcctgccttgaacgtcgacagcaaggtgatgaagctggatgccggcggaggaagaatccaggtgagctgcataaggtgaagccaccgcacaatccctaaaaagcctcatagttatggaggttcaggcgatggcgagcaatgcaacgaatcagcaccaccccaaaagatttccatcggagatttgagatgaagtcgatgtagaggcagcccaaccaaaggcaacaacttgatcttttcatccaccggcgagaaaaacctagaaagcatggcaagctgcaaatggaaccaagtacgtagcttacccaaatagggcctccacatcacggaggttgaaggcacctcggcatagctaaaatatatacttcagccgctacgagatgattcttcgccagagatcaagaagatgcatggctacccccttggaaagacctcactggagatcaaacaaaaggccgacacaatatgtttttgtcccagtttggaagtaccccagctgtcccagtttggaagtaccccagctgtcggttaggagtagaggtttgacggcgtggagatccacttctagaaagtctagcgataactactgctgcttcctagagatgaaagccacctccgaccacctcgtgcaaaagggaaatatcaatggaattgacctgactaaacaggagaagctgacaaagaagacaacgattactactacttctactagacaagcaaggacgcacgacccctctcacaccctccgttagtggtgagccaccaacgagaagggatgagaggattcggcatagctagaatactttagttgttgcgagatgattcttcgccggagacgaagatttccccacagggtaatcatcgacgtaccaactatcgatcgattgaaatggagtgtatatcctactgtgactgcgtggcagattgtcgatgagggtgagcagccgcatgtacggctcagcctcagccaacgatctcgtccttgccggcgcacaaaaatgggctgcggacctttcgctttgcggaattaattcgaggcccatactgtgcagctatgctagggggagaaagtacaccgaaggtccctcagcttgtcatcgagttcccccaaccgcaaaaccggatatcccgtgtcccttaactaatcaaaaccggtcataatagatcattgggtggttttgaccccggttttatcctacgtgacggctgagtcagcgtgggacctatataaaccccacatgtcagcatggccacgtcagcctactctctctctctcttcccctcttctctcccttcctcatctctctctgtctctcccttctctgcgaggctgccagtgcgagccgggagaggagggcgtcggcggccggcgatgggcgatgcggcggcggtgggggaggagctgcgggcggggagccgcacctagtgaagctgcagccgtcgacgaggagttccttgccgtcgcggtggagcgccgacgccgggcagcgtcctgggtgggcgtcgggctcgccaccgaccagtgctgccttctccctttacaacctcaagccggcacccaccagtgctgcctccccgctggccgtcgtgctcgttgacgagtcggcgagaccggcgtcgccgtctgcaaagtcgcggctgttcccggccaaggtcaaggggagggtgggacccgtttctgcggcggtggcgagcgcggctcgtccgcctcgccgccgtcttcgtcgctgcggccctcatcctgacaggtatccgcacaacccagttccccatccccatctcctctcatatatagctcagccaacttgtaaagatttgttgtttttctattcttcttgttcttgatatgtttggcttatgcatcgtttgctcgatttggcttttagcttcggccaagaagtccggagatgtcacggagcttcagatcggtgtgaaggtaaccgatttttctggttgctcttgcgattattgcttcggggtgtagtggatctgatactgctgagttcgtcgatttgatacatatctgctaatccgttcagacaagctcgatttgtaccaggtgtctccgccaccacatcgccgccgccgcatccccggccggccgtcggacctcctcaccccagcgacctcctgcccaccgtcggcctgcctgcccaatcagagaagggcgagagagagagagagagagagagagagggggaggaggaaaggagaggaagggagagccggagaggcgcttgctgacttggcatcctgatatgtgggtctcacgctgatttagccgccacgttatataaaaccaggcttaaaaccgccgagggacctagtttgcactggttttataagttggaggatgtgttgtatccggttttgtggttgggggatgattctgtaacttgatgataaattgagggaccttcagtgtactttttccatgctagggcgtattttggtggtgtttggatccataagtcctagggacttattttagttctaggactaatcactttagtctatggctgtttggttatagagactaaaagggactaaagttcattaaatgcgctacacaatgaccatgttacccttaaaactatgtaaagataaatgcaccatgcctatgcatgagggtagcaggtggaaaagagctactttagtcccaataagctcgtcccttagggacttatggactaaagcactttaatccctttttagtccctcctgtttaggactctacagacttaaagtgaagagacttattttttagaccctcaaataaacagggcctttgtcccacctcgctcaccgaacaaacattgcacaaccttattaactgaggcatggatgccgtatgcgagaagcacgtgaacttgagctgagcaatatttgtgttagtgattgcaggagagcctatactcttgtcatttgcctttctgggctttgtatttgctcggcctgatgttctgtttgtcttctcagtccggtcacttttttggaaaaaaaccactcgtcactcttaatttcgaagatatttattttattcatcatcaatattttaaacccattatgttatgacttttattttactcatcaccattttagcatagcgataagtcaaacatttttaacttttactattaatagcaaaaaaatataaaatattaatcctgtataattgatgttactaaatttatcattaaacatttaaacatttgtcttctcagtccggtcacttttttgggaaaaaaaactactcatcactcttaatttcgaagatatttattttattcatcatcaatattttaaacccattatgttatgacttttattttactcatcaccattttagcatagcgataagtcaaacatttttaacttttactattaatagcaaaaaaatataaaatattaatcatgtataattgatgttactaaatttatcattaaacatttaaacatttgtcttctcagtccggtcacttttttgggaaaaaaactactcgtcactcttaatttcgaagatatttattttattcatcatcaatattttaaacccattatgttatgacttttattttactcatcaccattttagcatagtgataattcaaacatttttaactttgactattaatagcaaaaaaatataaaatattaatcatgtataattgatgttactaaatttatcattaaacaaactatcataatatgctactctttttatttaaaatattttattatattttcttggttaaaataacatctcagagactatgtcagagttcaaaagttgttatattttgggacagagggagtaaaggataatttcatttgacacctggtgagaggtgtcgccgaggcagggaaggcccgcggggcagcaacggcagagcacgcctcctgccgaataggtgtgctcgggaaagcgcgcagcgacgaggatggctcgccgcgggcgaaacagatacaacgtacttgatctgagacgaggagcaatgacgagcacgtggttggcaagtgcatacttgccgaggaccatgagaaacaatctgcgccacctagaacagttgtcgatggcgagatcgtgggtgaccggcacgagggccttcacattgaggacggtaacggcctagccatggagagtggcgatggcgtcgtcgtcgagggtgggaggaggcggctcctggggcccgacatgtagagggtgcgctcccagcgcaccatgaaccacgagacaggcgagcagtgctgtgaactcaggcgggaagggcaccggaacagaggagcgctaatgcacaagcgctaaaatctcactcactcgcagttattggcaagccccttctaacttagttgtagcttttttagcaaagaccaagattactattccattatttgaaaaaaaaaacccttctaactagcggtgagctctacctagccccatggtgtcatcgcctcctccttgacgagctcgccatagtaccagatccagaccaccctccactgtaactgcatggcagattgtcgacgaggggtgaacggctgcatatgcactgctaagccggtgatctcgtccttactggcgcgcgacagtaaggacgagatctggaatccactgtcgcccactgccacgattagacctctcacagtgcagtgagctggatcggtgctccaccatgccaactgggattttcgcgtgcgtggcagaagggtgcgcgccctagcagaggagctcgccccctaggagggaagcgcgcttcctcacgtactcgagcccacgcgcggcgaggaaaaggaggatgtgctacgctgtggaggagtaaatccccaaatcgccctccaaaatccccaaatcgtgacatgcttgcagatcatccatctcaaaagaacaatcaagaacagaaacagattgaatcacaatcaagaaagcacaaaattctttctctttcccagcccttccatgccagcaccgaagaacccattctgcaaaatctggggattttttttcaggtggatttcaatgagaactactaccaagctcagatcttgggatgattgatgaggcaagctaaagaaaccagcaaaaagggggattttgggatcaatgaacacaagagcaaagctccaagaaacgaaggcggcgtcctcctcgcctctccccatggatgatggaggtggcgtcctcctcgcctcccaccgccaagaacagccagcgagccgacgccaagatcgagggagaggaggcaccggcgagcctctggaagaccaccgaagtcgccgccgccgaccgctcccgaaggcgcgcgtgaggccgtccgctcccgccggatgaggggagagccgaagatggggggggagagccagcgaagggaggaggggagagcctccgctgagtcttcgccgcgcgctgccaagaaccaccggccgccgacgcaccggcgagccgccgccaacaacgccgcagaccgcgccatcgaaggccgcgccgcagaagccgccgtcgcggaagccgccgccgccgaccgtcgcagactgccccacctcctgctgctgctgctgctgctgctgcttgggatgagaggagaaggaggcgcggcggcgtgggaggcggggaggcgcgggcggaggagaagacgaggggatggcggcgcgggaggagaggcaggcgatggcaatagagtggaggaggagaagacgagtcgctagctggaagggtagttggggaataaatttcgtctattggcttggggtaacgcgtttggggtaacaggcactgtgggctgagtttgcttcaacagtatcttcatcccattaaagccacacaaaataggatgcttgttttgtcgggtgggtgtctttcggccaactttttaggctaggggtatgagccccatagcttgcactgtgagtggccttaggccttagggcatctcctttctttgtacaccccacgacataacgtgccctcacgcccgaatcgcataacttccactaaggtcagccgccccatcacccccagtggactgaggaagaaacaagagaagggggctcgagagagggagaacaacaatgagctgaggcaaacagtagaagcaattagaaaattcaaacaataatttgaaaatgtaacgggtccgctggctcaagaaacattgttcggatggacatcaatgttggcccgtccacgtagaataaaggcattgcccatggctagctaggattgaggcccatcaaaagggccccggaaagcccaagttttaatgcaaaatcccaaattgccaatccacctggtatgtgtttgttttcgggactaggtggaataggatggaaccatccttgattttagggttgggatgattccactcatatttttggtttgtaggataggatgatcccaattttttgtttggttgaaggggtgagagagagatgggatggacgtcgtttgcaaccaccgtcaatgaccgggcggccgtgcgggcgagcaagccggcagagttcacaagatggactatggctgagttcacaagcggcgagcaagaggaaaagtggcgaggacgggctcacaagatggacgacggcggacggagatgcgtgacgagcggcctcgacgacagccggacgagtggaggagcgtgcacagtggatccggcgccaccgagtcccccgccttaggatctgccgccgcagccctccccatcgctggtttcgccgctaccgccctccccaccactagatccgtcgtcgccaagccccccaccgccgccgtcgccgagcccaccgttgtcgtcaccgcaggcgcttccgagggcgaccagggcggtgagcagggtgtcgtcacgacgttcgctcgtcctaggtgggacgagttcgtccgcgaggtttggccggatcgattggtcccagatctgaaaggaatattcgtctccagggaccaacccatcccactcacccctaaaactacgtttgtcccatcccataccattcttgcaaccaaacactaccctactgaatgggcctggattgtgtcctccctaaaaaggccaaagttcacttttggtcccttatttgaccccgagtctgaaattcaccgctaaacccaactaacatatataacatgtccttcaactctaaaaccagtacaaacttgttcatggtttgtacagtggttatggctaacgtgacgtctacatggctagtttgattaggtccacgtcccacatagtattgatgtggcacttgcaataattaaaaaagatgggacccacatgttagtgagtcttcgattaaaaataaaaaaaattacagtggaacccacttcatcacattcttcctccctcctctctctccctctcctcatcgtcgtcgtcaccagggcacgccacagctacgaccgaccctgccgatgagtgttgcctactcgcttcccaccatcggttgtctcatcctctcctgcgtaccgacgagagggaagaaggcagttcatggcgacgacactagagcgacgtcttcctcgagagtgatggccactggatgaagagcaccaggcagtagacctcctcagctcccgacagtgatgggcggctagccatcagatctgggtgccatgggggtggcatcttcccctagagcaaggacaaccagaaggacagcactaggcaacgggccccccttggttcccgatggcagcgggcgaccagctgccagatctctcgagcaaggacctcggcgctacgaacatcaacatgctcggcctcgttagtggtggcacggtctgcggcgacgccgatgaggagctcgatttcgaagtaggcccattcctatggctggcgagccgcatagtggtgtgggcatggaatttggccaggacaccaacaagaagtgggcgcgcgaatacagagactggcatggggagtagtttgccgactccttgttagtgtaaaaacacggcggcctgggagatctaaattccgttgttaacacacctctctgctgttcaagccggccacacgagcatgactccgatcttgctgccatcaccacggtgtaacctcccgccagtggctgccgcccccttccctcgtacctcttgtcacgcccctccacaccgcccgctgcgccaccctgaaggagatgggaagagagaggaagaaagaggaagagaggtggagaaagaaggaagtaaaaaaattggttactaacatgtgcagcacacgtgagtccatgttgactcggctcaccacgtcagctaaaactgagtataatacaatctggtaccttgagtaattcggtattatgagttaggggatatgctatatctattttttttagagatgaatttcagactcggcgataagttgcaataaattaaagaacttgaacccacctccttcctgtggaataagttcatatgaggtcccttaacttgtcaacgaatccgattttcgtccttcaaccggaaaaccagatacaagaggtccctcaactatcaaaaccggtgcactcaaggtccctcggtggtttagatggcggttttggctgacgtggcgcctacgtggctagtttgactcggtcttcatctgacgtggcattgacatggcgcttacatggcaattcgatctgaaaaaataataaaacccgtaggacccacatgtcagtttcacatacaaaataataataaaaaatggtgggacctacatgggccccatatgtcatcctctccttccgtcttcccactatcctctctctctctctcttcttccctacggggcgacgggcggagtagagcgacggcggccgaagcggcggagcgcgaagccagcagggcggcggcgggaatcggcatcaccttggacgtcttctcgtcggagaccaacgaatgggcgaagcgcgatgtggtgttcggcaacgttgaggccttgttgctgtcccccagtcccctaccatgcactatcgcggcggcgtcctccacgtgctcgtgtacccccgaccgcgtcgtgcttacggacctcggtgccagcctcctctctatctccttcttcctttcactcccaaagtcccaatgaggaggcatggtttcagagcttgcaccatcgacagtagagttgtccgcgcacggcgcatccttgtgcagctctatgacacaccctggtcgaaattgcataacgaattgatcaccaacaccgtcaatatactgctggcctatccttgtccatttcagcaacctcattcatcactcctttgaaccactcaaacgacaacggctcccgggtaacccaggaaaattgtgcgcggcttgttctgtatgccctcttcttgttgttacttcttgttgacacactgaagctgttggcgacgaccgacagcgcccggcaagaaagggaggagcggcgggaggtggccggcgatcgaggagg

SEQ ID NO: 24468 - DNA, 14121 bp, Oryza sativa
  unsure (1)..(14121): unsure at all n locations
agcgaggagccggaggaggaggaggaggcccccaccccgaggcggaggaagcgatgagcccttccattgagtcatcggaggaaccatccgccgccgccgccgccatctccctggccgcggccaccgtcagcgagggccccgtgggaactcccggccctggggccgccgaggaggaggaggagagtggcgctagcgccatgtagcatatggttgcctccccgccgctgtgtctccttgttgccgcggctccctcctcgccgggcgccgtcgccgctactccggcgaggcagcgaccccttcccgtgccgctgctccccaccgccactgggaacaacctatcaatgcgagggtcccactatttttttattattttgtgtgtgaaattgacatgtgggtcccatgggtattattattatttttggatcgaattgccacataagcgccacgtcaatgtcacgtcagatgaagaccgagtcaaactagccacgtaggtgccacatcagccaaaaccgccatctaaaccaccgagggaccttgagtgcaccggttttgatagttgagggacctcttgtatctggtgttgaaggacgcaaatcggattcgttgacaagttaagggacctcagatgaacttattccccttcctgtccacacaaacctgcctcttccgacccattccaagaggctcatccagcccacgaacgagctctctcctctctgggccgacccaaaactgccgcttccacccactccaaccggcccatccagcccacggcccccgcgtggcgccgccactaccacggccgcattggaggaggagaggagaaaaacatattcagcacatcgccggctcgcctctccgccgccgccgccgccgccgtcgccgccgcctgcctctcctcgccgccgtccgatgcgggccctcctgcgcgccgcgtcggtgctccgccgcgcggcggctccggccctcggcggcggccgcgccgcgccgcttccccccaaggtttctactcggggctcctcctcccccccccccctcccttacatctcgttctcctccctcgcctcggttcccgtcgcccgtccggtcgtcggtgcggcggcgggtgtgatatagcgcgtccgaatacgacgcctcctccggctgcttcgtttctcgtcggtcgctgtgttcggggtagggtttaggggctaggagggatttaggagatactgctcccttgtggccgctgtgccaattacttggttgttttcatgacgagaatttgtggttgggtttgatgccgtggagtgcggaatgattgggagtgtaagaaatggggggcactggatcgcggtggggttttggagcaggtttgcacgaccacttagatccaagttatgtgcagtttgagcttgggtgatttggtcaggagacatatcatgaactagtattgcaggattctaggctaggctagctaacatgttaaagtcttgaagaactgttacaatctatcttccatagtgtagaaaatgttccagctacacatgaactagtatgaataattccccattgtagaaaaaggtttaagtggcaataaaagactgtgtaagactgttccagaggttgcgcataatccaactagtagaacaagagtggagaatggatattggttgttttcacatttggattgagatattttcatctgcactcgtattctgtcctgtgtgaatttcgattcagttgggacttattccagttgccttccacctacattcttggcttgtcaaaattctaatcattcaaatttgtgttatgctttgtgctgttgatggccaaattttggtgtctccttagtccatggttttgaatgctatttgggttgaaaactcggctttttgtgtttttttgctcaaataatgctccttaggtatgtatcatggaagtttgatcctgcattgtaattcaggcacttgttttatttgcagaacttgcctgctgtctgtttgaatgggtattctactcttttggctccagcaaatgaagtgctgattccacaagaacttctatccagcaagactgtttggactccagatcgtgagcttggtatctttctactactatatcctttttgcatgtttacgttttgcatgcttccttcttaaaatgctattttctcaagatttacctgctcatgtttctttctagctagcatgaatttgttacatgatacttttgcattgttaaattgacaaatctgacttttatctaatcgaatagaattgtacataattcaaaattcgaaattcgacttcacttttaatagtatgattgtattgcaattggctgatgcctgactggaggatatatgtttcctgaacttggctgagttataaagtaatctgaaattctgtattgcagggcagtatgaagacctagtagcccgagtaacaaacttccacaatgaggataagggcttcatggttttagatggtgatgtttttgatgttccaatcaggaaggatattgttcatagagtagtaaggtggcaactcgctaaaagacagcaggtgcaacctgatatctcattttctttgcttggctccaattctcgtctcccacactattgcgatctactttacgagattttctgaactattgtggaccttcctgcttcacagggaacacactcaactaaaactatcagtgaagtgagcggcacaggaagaaaaccttacaatcaaaaaggaactggcagagcacgacatggtacactgcgcggccctcaggttatgttactatttcgaatattgtctggcataaaagttgtttatggcctgtagaggtatccacatctggtttggatttcattttatctaaagttagaccaaaactgaaacagtttcgcggtggtgcaaccatgcatgggcctaaaccacgaagtcatgcgattaagttgcagaagaaagtacggcgtctgggacttaagatagcattatctgctcgaaccgctgagggaaaggtaactgcagctttactgaaattactgcattccttctttgatgttctcaattgtagttagcgtttgcctcatgcctacaaaacaattgtgctctagatgaattgtttgtattgaatcttcactctgtattatgttcaaggtatttgctaactgcatgcatgactgtctgctttagttcacaaaattttttgacatgacagtttgtcacctgaaagacttccttctcttttttttttgtttatgatggagtgttctgtgcgatctcagttgtagttagcttccccctcatgcccacaaaacatttgtgctctaaatgaattgtttgtactgaatcctagttcagtattattgtccagaaataatttgctgatagtatgcaagactggctgcttcagttcacaaaaattggtggcacggcattttgtcacctgaaagacttccttttttttttgtttgtaatggagtgttttttggggggagtggtgtttgcctgtgtgggatcctttgctgtgaagtttaggaagatggtctgatcacttacatttctatcaatcctcagttgcatcctgttcctctatgtttatattcaaccaatgttatctgcacgccttactgaagataactgtatttatgggattactcgctcctataagctctcctgcatataagctatcttgacattttctggccttcttacaaatgcctatttgacaaatatttggagtcatgagttcattcttcaccattaaagtttgcttctgtcattttttggtagctcttggtctttgatgacctcgaagttcctagccacaagacaaaaaacattgtgcagtacattggccagatggaaggcacaaagaaggttttgttggtagatggaggtgacattgataagaagttaaagctggctacccagaatcttcactatgtgaatgttcttccatccattgtgagtgtctctgaatctcatcacttgattggagtaatgaagatggcatagttttccaggcagattatttcactgatgcttaaatatcatcaaatgcagggcctaaatgtatacagcatccttcaacatgacactcttgtaatgacgcggaatgctatcaatagaattgttgagcgtatgcacacccccatcagccgctagcatgttgagattcgacgtgaacaccactgttttgtagcagatgtacttcgaccccctaaagcttcatgcatgccagttttcactttgctggtgtaaggcattagcaacaacacaattttccttttcctttttgaaaatgatctatttgcttctgctagtgatttcagtgaaccatgttgcgtcagatccaatacatcaaagtaggaagtgaattggtcatcatggtgtgcgctcatgactccagatttctaataaagacagttctgataaacttgacatgttattcctaagatttgctattcattacgaatttgtctgtcaatcatcattttgccctagttcttttttttttgttctgcaagtatgcagtttcgcgtttgattgtggaacacactttggagacatgaacaaaatgtagaatcaacatatgcaagcaagcaactttctgtacttcaaatcatggtcaagcaattccattgtttatgtctgtgtgttaggtggcatataaaacctgggttttagtgtgccatttcttaagttcatattcccttttgttttgtcccagttcataaaatgtaagacatcagagtttaaactatatgttgtgtcatttacaagtcacaagttgccccagataagctttcggatcttgtcatgatttaaattccgcattgacaaagccatattatatggatgtaagaaagatatcaataaaaacgattaaactccacggtgttgttgtacttgcttcattaaatttcatcacaaattttcagcagttgaggctgctccactccaacatggacgtgacagcaggagtgagtgagcaagaacagctttgtacggtagcctttcccatcacaggtacgcaacgcaagaatccctaatcatgtcgtgagctgcttaatcacgccatgcgtgtacgtgatcctaggggattaagtgaattgaaagcaggttaccaagggcaatatactctaaccacaccctctgtccatgcccatctcattggtgccaattgtaattaacagagtgattaggagatattaggatgagataaacaaacataattatgttagctaagctaaaccatgttatttttttgtgccaactgtaatgaagagagaaacttgggaggatttatgttagcttagctaagcacatgttttttagggtgccaattgtaattaagggagaatttatgagagattgggatgagataaattaacactattatgttagctaattaagctaagcacatgcttttgtgagggttaggttggtcaaatggtacgagcgtgcttgctttgggggacaagaacatccttcgtgtactcagaaggcacaagacaaagaaaggggtttttgtacgaaaaggtgaagcttttgtgcctgcttaagggagtaagtaggaggagcacttcacacccgtgccaatgcatgtacactaacactacagtgttaattaatcccctttctaggcaggtggtgatgatgatgcacattgcactacgtgtccttttttatttgtcacgtacattgatctctttaaaaaaattgtcgatttctcttggtgtgaattggagacctgctatggtgctagatagggcctagggacaaagttgctcaacatctccacctccactcaccaaggtttatgatctcgattgatttttctttgctaatttcaaaggaaaattggcacatttagaatgagttttgataatttttccgttgagatgcatagttcgagccttgagacgattggaatcgtaaaagttgatagaaattagtcgagattgtgaagcctgctacttacttggaatcaaatcatggggttgataatctttatgtagcggatgtaggatttatgatattttttttatttttcaatgagccatattttgtaagatgagtttacgaaaattcattggtgagattaggcatgaaagactattagtttagccatttgttaatattctcctctttttggctacgggattggctcaaatgtccaaaaatctcgtcaaactagaccactcatgaaaaaacctataatgagaaaatgatggatgaaagtattaaaatttggcagcaacaaaggcatatgccctttcaaattattattccccgttattttgtcaactctgtaaaatcatgaaaatttatcaatcaaatgaccctatctctcacacagagacacgctagatgacgtcgtgaaccgatggcaccgcgtaaaaaaaatatagtttaagttgtaatcatcctaacataccatgatttaggtccatctttgatcacctgataacaacttagtaatatattcaaacgccaaaaattcaattaggatcacatgatctataaagattagttggtcaatccatcagaagaagtcaaagctgaaagcagcccccatccatccttttttttcctcctcacggttcagacttgagacacaccacaccagtcctctcgtagaccaggtctacagacagagcagcacggttgccagctggccccgtgggccccaccggcccatagccgttgttggctcgggtttggttaagcgcgcggccgcctctctcacctaattaacccgcgtccaccatgggccaggtccacggtgcaccgccgcggcggctcacccgcacgcggctcggccgaccacatcgatccagcgatggccgggtcgggtcgggtcgggtcggttgggcgtgcgacgcaacacgagccgttatccgcgcccggtttccctcctcacggctccacctccactcctgctgctgctgggttgtctgctgaattgggtacttagtagtagtagtatttttctttatacatggtttatttggtgtttggtttctcggctaaaaatattaccatgattgaaaagtactaaggggatgttggttgctatcttcaatgtaccacatgcctatcttagttatgccataatttttttcaatcatttagttcattaccacaaatatggctcgccgcacttttcagtcatatggtctcacgtgtcattgacctatttttttttaactaagcttgtctaaggtttggctgagaatttgtgagccacaactaattgcctcaattgtggtttggcagtgttagctactagccaaacaatcctaagtctaatgtggttttggtgtgtaaaaggatgaagttatttaggttcgttttgggtcctcgagacgcggtacgttacgtctaatttagtacgattacgatgcaaaaaatagacgtgggtaataaaatacgagtaaaagctcgacgcggtgaaataaacgtaggggaataaaataggagaataagcaaatgaactcttggctcaggggcagcgcttggcaatggccacgttggcacgctacctatctgcatcggaccgggggatttttcccatatggcctctaggttaagtcccaaatggttagggtacccacacgcgtgcgcgttcagtggtatgtcatgttccccgtgcatggaagctttagcttctccaagtctttagcttaaagtatttgttggacacgcgtgtgcgtgcatgtgaagttgcatgggtggtgtgatgtgtgtacgtcctttgtatcctctcagaagaaatatgagaagaaagtctttgtgtaaaactaactcagcaatggaattaaatttgttagatggttgttatgcctatatgccatgatatgagaatagtctaaactgagacttaggtcatgtttggtgggcttggattttgaaaaaaaaaaactttccatttctaatttattttctgtattttataactatggatttttagaaaaaaaaatgaattttatattctatattgtttggacgagtggaaaattatgaaaaaaatgaatctgtcaaaaactcttccaaacaaacagctaatttgataggattttttctatataaagtaatacttagtattacatcatttttagtattttatacagtacctacgtattcttagtgttacaccttttgtaaattaacttaatgattcatggctagcatgggtttataaattaatgtttctctaaatgaaacgagggggacaatgccgtacattttaagggggaggaaagagatagaaattcaccagggttttaaaagagaattttgttagggtggcgttttgcttgtgaaaaaaagggtcattttctcgaaatccaaacaaaatcaatgtcaacaatgtatcattgtaacatccgacggcaacgtatcagttactcattctcattgtatagtcctgtaacatggaattgcaatttccttctctttttttttgttgttttctactttttctacctagaagtgtactaaaagtagatagatgtatagtgacgtatgcggctggtctccagctgcattcaggttctttaattctgactttgtgaggcaggttggtgggaccaagtttgacttcccccaaaaaaagagatgattagagcaaatgcagtaaagatcatcaaagagtaaagttaaaaagttaaggcgaatgtgcctcacttaacaaagctgttaccaccaagagaaacttaacaaagctgttaattaattaattactcctacccctggtacgtaattgccattaacttaatgtagcattaccttcctgattttttttctaccatttctatggataagttttcagcataatttaacacataaaattttaattgcatggacatgggagaatcgtataagtaaattaataaccatgacgaaatgaatttatttgcatggacatatatagaagaatcttgcaaataaacaaacaagtcggatgaaatggcacagcgagtgtgacctgttgcatgttggcaaccatgcaacgtacgcgcaactcctagtttattgcttggggaaagaagattagtgcacatgcatgatgatgcaatagaacaccaagaaaaataaatatggccaagacataagacaggtttagaccaggggagcaaggcacagattacttaattaatcggcgttggcaatacttaaatcatttggatagctagattcttggattttgcctagcttagctagtgcatgaatattagaaaatcaggacagcttgaacaaccgatttagggaaaagaaaacaccaaggtctaatttgtataggatccttgaggttgaaaccatttatacaatgaaaaatctgtatggataaacatgaccacaatttgccatagatttaggcttagtttaaaatagtctaaacagatgaatggatgatagattatttaatttttatgatattcaatagtacaaacagataaaataaacaaagctgaaaatttgttttaaaaatattctaagcaatttatatatatataaagcttttgaaaaaagaaatcagaccatttaggggagcttaaaaagcgtgcccgtaaagaggggaaaaaaataagccttagtctttgtccatcgttaaaatctacagtatatgacatccagcttattttatcactgtttcaaaataaaaaggagagcttattttaatttatcacacaaagatatgaccaaacatagcttctcttctaaaggaagatggttacaaccagtggaatttcaccactttagggaattatactgcaaacacaaactgttaataatagaaaaaaaataacaccatagtttattttcttgtcactatctgagtgatgattgatattgattgtatataaaaccaaacaaggctgtaaatatgggtaaatcaagccgttgggagcattgatatacccccggggaagacgatgatccgatcgagagtagctgagccgactctctctctcactctcgtctcttggcagatcagatcaagatcaccatttaattcctacatactcaccgtgaccaaatacgtacgttgaccataaatggccatccatccacaatccatccatctgcatatgcttctctcccaaccccaaaccgcgtcttcttctacctcccgctaagtacacgcacagtacgacacattagtagtcgtagtcctcctcctcaccgccgccgcttctcctcctcctcttcctcctcgtcaccatcgccatattccgaccaatgccattgccgctgtcgcacgaatataacgtatccaaaaagacacacagcagcgacgatgtcctgtatgtgtagtcgagcacgtccggacgatgtacaaaattttaaatttaaagcttaagtttaaaacttaaatttaaacccgtgaaattttatttcttttcatcataatttatttctcgatattgactttaaactcgttaaaaatatatatttaaatattttttaaaaatatattattccttctttaataagtgttatggaaatatatatctaaatatgtttttaaaaatattatttttttgttaataagcattaaataaatatatactccctccgttctattttaagtgcaaccatgattttttcatgcacaactttgatcgtccgacttatttaatgtttttctaaaaaagattaaaaacataagtcatgtataaagtactatttatgttttatcatctcataacaataaaaaaatataaattataaaaaaattcaaataagacggacgatcaaagttgagcacgaaaaattatggttgtatttaaaatgggatggatggagtatttaaagatttttaaagagaaaatcagtggtagccaaaaaaccatgggagccacagcgctgacgcgcagcacagtggccaggtggacacgatggggttaggcttgtcctcgatggatggccgacttaacccccgcaattaacgcggattaatctcgccgcgaccacaacaacttcctctctgtttcactaccctctctctctctctctctctctctctacacgctttgcaattttgcatcgtgccatcgtcctgtctctctctcttcctcgagaaagaaaggaggagaggggataaagcgcacaaagagcagccgctttgtgccaatctctctctctctctctctctctctctcttctctctctctctctctcatcttctcctccccaaaaagaagagatcaccaattctgtggctgcttgtttcagctgcttaggattcccaagaattccattccaaagcagcagctgctcctcctccttgaatcttgggattcagtgcacgcctccctgcttcttccttcctcctcctgccttgcaaatcttggagctttttttttttttcccctcttctcttgtaggagtaggagagtaggaggggttggagtggaggagattggatttggtggtggtgttttgtgcggcggttgggggtagaggaaaggggagtttgtggggggagtggttagttcttggcttcttcttcttcttcagcgagagctactacagctacagctcgtgctcgtgcgccattaaagtcctcgcctttgcgtctcccccctctttctaccagcccacctcctcctcttcttctttggattagggcttcgaaggcggctgctttctctgcggagggggttgaattcttgcgattcttggaggggggatttgtcctgagtgatttggtatgtgggcagcatgaggaagctcttcttctccgagttgacctcctgcaaggagaccaagctccactccgcgccccactcatggcttcccctcgagaaagggaagctctccaagttcgccggccactccacctcctccatgtaagttctctctctctctcttgctgttacatgatgcgtttggcttgttctgaatcctgctactttagttagttacctggtctttgttagtagtactttgtgtagagagagattcacaaaattcagattttactggtatagttctgaagagctttgctggctggttggttggttggttgtgatgttcatcaatttgattcttggtgggttgtggttgtggtgcagagaatcgctgatgaaaatgccggagccggtggttcttccccacttcaagcctgcggattatgtggacatattggcccagattcatgaggagctggagtcttgccctcctgatgagaagtcgtgcctgtacctgctccagttccaggttttccgcggcctcggcgaggtgaagctgtcgcggaggagcctccagtccgcgtgggagaaggcgagcacgatacacgagaagctgatattcggggcatggctcaagtatgagaagaaaggggaggagccgatatccgacctcctcagctcgtgtggcaagtgctctcaggagttcaagctgctggatttcgtgtcgcagatctccaccgggtcgcatgagataagctatgatgatgagtcggatgtgttttggggctctccggtggtacatttccggataagagatgatatgattgcatgcgatcggcgaaagcttgctgctttgtcgactccgctgtatgcaatgcttaacggtggctttcgggaatcacatcttgaggttattgatatgtctcggaatggcatctcctcgattggtatgcgagcaatcagtaaattcagcttgacaggaaggttaccgtatttatcagcagatgctattttggaaatgcttgattttgctaataagttttgctgcaatggcctcaaggatgcttgtgagcgaaagcttgcttctttcatttgctcgaggcaggatgctatagacttcatggagtgtgctcttgagctgggttgttccatccttgctgctgcatgcttgcaggggctcctgaatgagcttccagagtgcttgaatgatgaacaagtggttaggatattctcctgtgcaagtaagcagcagcgatccacaatggctggaaatgcttctttctccctatattgccttcttagtgaagtctccatgagcatcaacgcgacatcggatgtcacggtgaccttcttggaaaaattggtggattcagcatcagattctagacagaagcagttggccttgcatcagctggcgtgcacaagacttctaaggaaagattatgctgaagccgagcgcctgttcaatgccgcctttaccgctggacatctctattcagtagtgggtttggctagactggcctctatgaggggtaataagcatttttctctcaagttgcttgattctgtcatgtcatctcgctggccacttggatggatgtaccaagagagagcactatatttggagggtgataacaagttggaaaatcttaacaaggccactgagttggatcctacccttacatacccctacatgtttcgagctgcatctttgatgaaaagacaaagcgttgaagctgcccttatggagattaaccggatcctgggatttaagcttgttctggaatgcttagagctaaggttctgttgctatcttgcacttgaggaccatagagctgctttatgtgatgtccaggcaatcctcactcttgctccagattatcgtatgattggtggtcgggtgtctgcaaagcagctgcgtatgcttgtgatggagaatgttgagcagtggacaactgctgactgttggatgcagctttatgatcgttggtcatctgtggatgatataggatccctctcggtcatatatcaaatgctggagtcagatgctgctaaaggagttctctactttaggcaatctttgcttcttctcaggtaacttaattaacttattttattgcacagaataagagttagcatgattaaaaaatgatacagcacatcagtgattagcattgtagatgtatagcacatggtttgcattgcctggcatgtcttacaccttntagtgtgtggattcatttggaatgccaaactaccagatggtttatcagcatagttgcacatgcctcctgaccaacttacatcatggtctaattcttgtgctagaatctcagggatgttgtgattaatactattttaacctctttttttcagattaaattgtcctgaggctgcaatgcgcagtttgcagctagctcgtgaacatgctg

SEQ ID NO: 24469 - DNA, 2021 bp, Oryza sativa
cattctgaagtagtcaaacaaaggtttcaaattgggttcttggtacatgaagtgtaattttaccttgttgagttatcttttaataccttcgtacttgaggcataatggcataatatgcatttgttcattttccaaattcgttggttgttatttagatcaggtgttgttgctccacctatgttaggaagttaagatgtcctattcattattgaattattaatgcaaatggcgctctcactattaaaattggctgtcctggtgctcataacatgccaaccatcaattcttctcataggtgcactgcaagcgtgatttgatttcctatcaagtatctaacatgtttctaagttatgagttatgacatctgataccattgatgctactgataattgccaaccatatggatgagtggactgacttaaatgaaactttgctctcttttttttcatcagtttagctaaatggaccgaccagccacaatcagtacttttttctatcagcttaagctgacagtgtacattttatttctgtaacattggttgacccaatctgcagcattgtatttgatttgagatgttcgcgaatggtacatcttattcatcgtaatgtgtgacatcttgtaggctctgaacaaccttgggagtgtttatgtggattgcgggaagcttgacctggcagctgaatgctacatcaatgccctaaagattggtcataccagagctcatcaaggccttgccagggtccatttcctcagaaacagcagaactggtgcatatgaggaaatgaccaagctaatagagaaggccaggagcaacgcatcagcttatgagaagaggtcggagtactgtgatcgtgagctaacaaaatcagacctgcagatggtgaccaaactagaccctctgcgtgtatacccctacagataccgtgctgctggtaagcaccgcttcctgcctagcaaatcttgtttgttatgatataggtatgactgagacaagatttgtcatgatagcaaaccaccagtttcaaagcaggttgaaacttggatataaaatcgtggtcacagtagtttaatttgttagtagatgtagctcatcggtgtccaactcccagaggtttgtgctattataactaaccaactactccttttcctatcataagctggtaagaagtcaatgttgtttggcaatattctatgctcaacttgatcagttggtgtaacaaccacatatttcactcagttcaaaaattagctcatctgtttgatattctcatgcatcttttttcgctgatctggaatcctcagtgctgatggacaaccacaaagagaaggaggccatcgcggagctgacaaaagcaatcgccttcaaggcggacctgaacctgctccacctgcgagccgccttccacgagcatgtcggcgacatctcgagtgcactccgggactgccgcgcagcgctctccgtggatcctaaccaccaggagatgctcgagcttcatcaccgggtgaacagccaagaaccctgagccccccattgttgtacatacaggagctctacatagccaaccataccccaagtgtatgttttgtaccatacacagcagatcaatgtaaggatagtagccaatttaggccctccacccccaaaaccaacccaattccttgtgtccttaattagaatatgttgctcatcatagagtcctttttttagtaaattattatatttttgtgattaagcccccctcctaattgtaccctccatgtgccctcccccaaccccatgttcccaacaagttttgactatctcatgtgtaaatgaaaaatggaagaaaaagaatggagaaggtttgtgtcggcgtctgcgcaaaactgtcaaagttgatgctaatcactgattgcacatgtgctttgtttctcttctgattataaacaaaatgaactgatgaaactatcagaaacaatgccatgtggattaagaagaacttggaattgtttctttgcttaatttgtttattaacagcag

SEQ ID NO: 24470 - DNA, 24903 bp, Oryza sativa
aggagtatgcagaaatatcaaaactctgaatttcaagaattgcgcataagaaaactttcaaggagtatatgcagaaatatcaaaactctgaatttcaagaattgcgcacaggaaaatgatgtgtgtatatcatcagagaatatgagaaaaaaaatggagcaacttgtagttgattgcgcacaaatttgatcttttatatttcagattggtagggaatacagacatggtttttttcagacatgtgagacataaataaacactgaagtggtagcagcagcagcagcaataacaaacacaacctgccagctccaacaaatccatggaaatacaggcgctatgggtcagcttgttgtggccttgccggcgactttctgagctatccagccgagcccgtcgtagaggccctcaccggtgatcgcgcatgaggcctgtatgtgccaatcgtggttctttatgctgtggagggagagagcgtcggtgatctcagctggcgacatggcgtccttgagatcctgcttgtttgcgaacacgaggactactgcgccctcgaggtccccatgctgaagcagccggaagagctcatccttgataatgttgatccgagcacggtctgtgctgtcaattacaacgatgacagcatgggttcctctgtagtatgttgcccacgaagtccgtagactctcttgtcctcctaaatcccacacctggttcaataagaatttcagtatcaataacactggcatggaaaaaatgtcccagaagattgacaatatggtaaataaattatgtggcatgaaaaaaatatttgtcgataagtaacatgatattagatatatggaatcaggattcaagcaagccacagaagattgttccaggaaagaagtgaatttcatgtctctgtgatttctgacaagtattgggtatttgggtgactaactgaaagtctgaaaacactaagcagctacctttccttttgagaaagcctacagtagcatgtgaggtattataagccttatcaagaaaacatggaaatgcaaacatcgtagcgcttgtatcagtatactgtgcaggactgcaggcaaataaaaatgttattatgtgattttgctgtacaaatacagcaacatgtacggtgaatctgtgatggaaactagactatggaagaacaagaatatacatgcaaacttacaaagccgaaaggtatcaacaatagcatgcaaactcttaaagcaaagggatacatttcgatagcttcctgtgttggttcactcaactggttactaaactacaccatcgattaattgcatacagagttctcttcttttctttaaagaaaggtatatctttgatctatctgattacacctacctggagccaggaataaaggcgacaacaaagactgaacccagaaaaaaaatgtgaatgcagcatgccattccttacaacaattattacaagaaagtaccaggcaacattttattgacaatgacgcatatcgatttttgtttaattgtttgttactttgccttagatggaccttgatagtgcttagctctttcttataggacaggaaagatggtttgtcccagtgtaagtttggaatccacaatggcttcactcctagtatacatgttacatttctcagagtgtatatgaaaagcccaattcttttattggtccaacagggtaattggcctgttgtccttaagaaatgacatgctgctacttgggtagtgtagagtactatgttgagccaatctctatatcctatgaggtaaaaggatgaacatttgctcattcataaacacccaaaatgatttaagtctaaaactagagatgaacatggtttttacagggtgaatccagtccttaacaataccggaaaaagagcaatgatgaaacagcaaaaaggaattacagtttatcttgatggaataccactagactagatgaagcaaaccgcggctaccggatatgccttacaacaacacacaattctcatctgctatgtacctcactcgctgtcctgaacaaattcagaggtggattgagcgacaaaagctatcttggggccaggctaatcaagtatatcaaaagaaactacggattattaagactcaatcatttttcttcctttccctctacctcttgagcttaattcttcttatcataaaaaaataatcatgttttgaccatgatgttcatatctcaaagcatatatgacaagcctaattttcctattggtccaaaagggttagtggccccattatcgaaaaaaaacagggttattggcctaggtttattggctgagcaatgcccaattccagaaagacatgctggcgtgctgctgcttgggcagttgggctagtgcagagacaatgttgagccgatttctatattctatattaaaggtaaaatgatgaatttttgctcattgataagtgataacactcaacatgattagatctaaaagtaaagatgaagtgatgaacacatttttttacagggtattgttacagtttgtgttgatggactactactagattagatggagaaaccaaaattatcggatagacactacaatagaagaactctcatctactctttacctcaccgaatctcctcaggaaatcgaaaggtgggaattgagaaacaaacgttgaaacatatcttgatctgaggcacccagcgtctctcaaaaaaaaaaaaaaaactacagattacatcaacaaagaatctttttcttcttccttcctctctctacctcttcttgagcctaattctttcttaccaacaaaaactacgttttgaccatgattaccgactacaactactactacatgattgtgccgcaaccaccaccaccaccgagcagcaaagcagcagatcggcgacagctaccctgtcattagttagatcaggcgggggcctgaacttggcaagagaggagaagaaagcaaagagaggggaggggaggagaggtgagacctcgaatcggatgttcttgaagacgacctcctcgacgttgctgccgatggtgggtgcggcggtgacggcctccccgaggtggagcttgtagagcgtggtggtcttgccggcgttgtcgagccccacgacgacgatcttgtactccttcgccgggaacatcaagaaccacacccgcgacatccacgcccccatcttgtccctcctcctcctcctcctcaaacaaccaagagaacgacgaatctgaatctcgcgccgcggcggctggcggctggtggtggatggatctccgcgggaggaagtggactgcgagtttgggggatcggatcggcgatgggggtggaggaggaagaacaagaggaggtcggatttggaggaggaaaggtgagaagggaattgggtgtggatattcgtgctcgtgtcgtgtgcgaagctttcctctcatagctggccgagggtgaaggcggcgagagggagttgggctgggccttccatgggcttgggctgtggaagtagacatggtgagtgagccgccactaaaagaaataagtctattttgcatccctcagctcttgcccttggtttaatcgcatccctcgaccacaaaaccgggtataatacatccccaaatttcaaaaactagtgcaaattgactccttgggtggtttgggaagtggtttttgttgacgcggcgagttgacttggtctaagtgtgctaacgtggcacctaatcatcaaaggagttgaaaacagaacagggtcctacatgtaagtgacaacagtaaaaaagtattaaaaaaggtgaggcccatttgtgatccccttctcttcttcctcccttctatttctctcgcatcgcccgtgacaactgacaacaagcatgggttgtgggtgcgggagaggatattagcgatgcggcggcaattctccttcctcgtggcggtgaggttctcggcgggataagggatgcccgtgttgtccgcagcggcaaagctgcagaggaaaagaaacgggggcagctgtgcatggggaggtggctgaggagcggcatggaaaggacggaggatagcgagcttgatgtcctctctgcggaatccgacctcgccgaagaccatgctgacgtcggggtcgttgaggacaagccagaagagctcgcgccgactagccgcatgaggtggcggtggcaggccaccatggccggggtggtagtagatcttgtactccccgaatgccgccaccgtcctgctcgctctgtgaggaggatctacgtgtttgagtcggtttttaagcccattcacttttgaaaatacatatccgtatttgattcggtttttaagttcgttcggttttaaaaatacagaaagagttttataagaaatctctttaaacaaactcacatgctaacttgagatgatcggactcctaattacagcttatgattttgtaaaaaaaaaatcattcacccgttgcaacgcacgggctttttttctagttattacaaacttgaaaaatggattaattttgttggagaaaaagaacgagacctaaatatcgaattttgggattgtgccgcaaccgcaaccgcaaccaccgagcagcaaagccgcagatcgacgacagctacctgttaacgaccaaatttggtaagatatgaaccaggttcggcattggagtcgaagcggattcggcaaagagatggattcgaagaacagagtatgaatcggctgcgaaggcatcggctggagtgtgcgtcggctgagatggattggatagaagacaaccgatacagccgatagagatgaagcagccgattccgacggtagtggcttcaaggctgtttctagaatcaatcgacgtgcttcacatggattgccatgatggagataaagctcttacataggcaattatatctattaattaggatatcttatgtaatttcctttgagatatgtttgggcaaaagtctgccgcaaagacttatggtatcttagagtttgttagagataagagtcgtgtccggcaaggacatattttgtatctcgggtataaatatgactcgaaccatgtaatcaaacaacacacgttcaataacaatttcggcgcatcgccacccttttattctatttcgacgagttcttgctttcggattgagctgcatcaattcgatcttcaacaggtaaacttgtcatggcggcttgcgttctcgggattagcgcttccatctttatgacactctaatcttgtttatgtaattcctcgagttatcatatatactatataatctttgttagtttcgttatataacttgtcatcggctggtttttactgttagaaagtagccgatagagttaaatctcgttattgatctagattatatcgtatatctaccatctctcagagattttcatcatcttgtttagatcttacagttattttatatgcttaatgttgcatcggttgagttcgatctattaagttctatctataattgtgatatctagcttgttttatgatcatttatagagatagtatcggagtttcagccgatcttacctgatttagctattctaatatcatatgcttaattgttatgctaaatctgccctttatattaagatcttattgctttaaagttatattaagttcttatttgatatatcttgcttgtttcgatatcttagtatagagtggtatcggagtactagccgatacatgctagatctatctgatcgactatgctataaatatccatacaatctttgctttaacgtatatttcgacttaagtgattcatactgtctcggcatgacgaccgatctatcccaatcacttagattaagtatacatcgaagtaaaaactgtatgttgttaatatctatagccgatcgagtagatttagttttattttatttattaatcattgccgatcgattccaacatgacatcggctcaaagataaatgatatgtcatcggcaactagccgatcggctatcgtttatggatttaaccgcaatttttcttgtctttattcttgttgattgcgggatcaaatcaactggcacgcttatgaacctaaaggtgagattttggacctgcacaggagttaaggagatcttccaggccagtatgtgtttttcgcatcaacactaccctgtacttagataacctgtccttagatagatcaggtggggcctgagcttgccaagagagaagaagaaagcaaagagaggggatgggaggagatgagacctcgaatcggatgttcttgaagatgacctcctcgacattgctgccgatggtggggcggtggtgacggcctccccgaggtggagcttgtagagcgtggtggtcttgccggcgttgtcgagccccatgacgacgatcttgtactccttacatccacgcccccatctcccccatcctcctctctgtctctcctcctcaaacaaccaagaaaacaccgaatctgaatcttgcgccacggcggctggtggctggtggtggatggatctccgcgggaggaagtggactgcgagtttgggggatcggatcggcaatgggggtgaaggaggaagaagaggaggaggaaagggagaagggaattgggtgtggatattcatgcgaagcttcctgtcatggccgaccgagggggatttggcctgggcctcctttgggcttgggttgtggaagtagagacatggtgagtgagccgccgtcactaaactaaaatggaataagtccactaatcgtccctaatctttacgtctagtttaatcacatccctaaaccgcaatacgaatcttcacctttcatctttttcaaaaccgttcgacttaggtccgataccagtatggataggtgtttttgttgatgttgtatcctagttaggaaaaaaacatgcgagactcacatgtagttgagtccatgtgttaatcgggctcacatgtcagggttttcttcttctctcctctattcccatctctcttcccagtctccacctatcccctctttccccatctctctctagggaggtgcaggcgacgaatgccctgggggcgggtgggggggtgttggagagctgcagcggcgaggagttgcgcacctggcatgcatcaccaccaacttatgcatgtgatgtggtttggttgcgccggcgaacttcgcggagcttccttcacctacttgcaaatggcctccccctaaccgaactggatagctacggagcacgccgataataacatttgggtttcatggcaagtggatgaaagtaggatatgatgcacaattcgcttcccagtcaccttccaaatactctggatattcatgacctaatgagcaattgtatgtgcagtgcaaggagctgagaactaactgcaacgcacaaatatatacacctgaatgaactctactattgcaggtgtttcacacacaattcttagaaatcgatagatatagattcttggtttcctcccagtgccaatgacgcctcttaataatctctgcaattttcgtgtcaagaagcagtactacaaccccaggtgcttgatccccgccgtctctctcctcctactcgtcgtcatcctcaccgtctctaatacatacttccccttcccgacaactaagtcgcgaacactgtcttactcttccttctcctcctcccacggtgggcagaaggccgccgacgaggcctgcaacatatttaggggagagtgggttccggatcctgatgcaccttactacaccaacgacacctgctcggtcatccacgagcactatgactgtatgaagtacggaaagccggaccttggcttcgtgcagtggcggtggcatcccgacagttgtgatctcccccgtctcgacccggcgcgcttcctctcctccatgaggggtaagaccttggccttcattggggattcccttgccaggaaccacatgaactccctcatctgtctactgaccagggtaaaaaagtgaaaaacgtgccggatttgctacagtactagcttcgatctgacccgtcgatcgcttgatcggacggtcagaaatgggccagcagcaacaagggtgtgacgttttgttggccggcctgcaggtcgccgagccgacgacgagctggccgagcagcgagcacacggtgtaccactacggcggcggctacaacttcaccgtcctcagcttctgggcgccgttcctggtccggaacgagctcatcgacaccgacaggccggcgcacacgggcctatggaacctctacctcgacgagcccgacgcagtgtgggcgtcgcacgtcccggcgttcgactacgccgtcgtgtcggcgtcgagctggttctaccggccgtcgatgctgtacgaggccggccggctcgtgggctgccaccactgcctcctccccaacgtcaccgacctcacgctgcggtacgcgctccgcatggccacccgcgccgcgctccgcgccgtggtgggcggcggcggcggcgtgaccgccgtgctgcggaccgtgtcgccgtcgcagtacgagggcggggagtggaacaaggacggcaactgcgtccgaacgcggccgtaccggcgcggcgagaagacgctgcagggcgtcgagctcgacttccacacgctgcaggtcaattttttgaatttcctccattgatctagtgatcaattatcttgttctttctaggaacgtgcgttctgagcttcgtaggtggaggagttcgaggcggcgaagagggcggtgaccgcgagcggtggcagcggcggcgcggtgaggatgatgctgatggacacgacggaggcgatgatagtgcgggcggacgcgcacccgagcaggtacagggggtggacgcggcgcaagggatggatgaaggagtacttcaccatctccaacgactgcgtgcactggtgcgtccccggcgccgtcgacgcctggaacgacatgctctcacacatgttgctcacatcgcaaagctagttaggttattgatcaaacgaatgtagcagccaaaaaaacagagaaaaaaacattcattcctgaattcagtctagaatttaaaaatcgtcgtccatgatccatgtgaatttctagcacgtttgcacaagctgaactcaaacattttggtcctgtttgctgcattcgcaaagggtaattgtgattccgtctgtatgggcctaaatcgacctgaggcccaatattgccaaaaatttcagaacaaacttcgtaatcgatttggatactatattgatattttgtgacaaatctggaagaattaggaataatctagccgattcaaaagcagtggttgaactcaagttggctgatctcgacatgcagtcaaaagattatcagacagaaagggagagctgctgctaggttagctcatacaggtggccagtgcccctggtctcaaacaatcacacctgtttagcattttgattctttccatttcgccaagacctagtaataaacaggtggttatctcgtactacacgcgtggaatccaccatcccaagtgtacacttcattttaatttcgtaatcaaatcaatattcgtgacgaaaattgcagaaaaaaattcgatgtatatacagcaatctcatttctcatctcatttcatatccatgagctaagctagctatagtgtggatgttgaccgcccaggtcgatgatgaagtttcacgaggtgatcaagctgccatccattgctcattacggcctacgctatgtgctccccgccgccgccgtcgccgcgtgcgttctggtgctcgccgccgtcagcctaccgggccgcgtgccgctgccgccgctgctggcgccggaggtgacgaagaacacggcggatggcgtgggcggcgaccggtctggttgtgatattttcaagggcgagtgggtgccggacatgtccggcgagccgccgccgtacaccggcgagagctgtccggtgatccatgggcactatgattgcatgcggtacggacggccggatcttgggtacgtccggtggcggtggcggccggacggcgggtgcgagatgcggcggttcgacgcggcgaggttcctcgccgcgatgaggggcaggtcggtggcgttcgtcggggactcgctggcgaggaaccagatgcactcgctggtgtgcctcctgtcgcgcgccgagcggccggcgccgtggacgaacggcagctacgcgtaccgcttcgagcgccacggcctcaccgtcgcggcgttctggtcgccgttcctcgtccgcgccgtcgagacggaccccgacggcccgacggggagcggcgccggcctgtggagcctccacctcgacgagcccgacgccgggtgggcggcgcacgtcggcgcgttcgaccacgtcgtcgtctccgccgggagctggttctaccggccgtcaatgttctacgaccgccgcggccgcctcgtcggctgcaacacctgcctgtccccgaacgtcaccgacctcaccctccgttactccctccggatggcgttccggagcgcgctccgggcggcggcgacggggggcgcgcgccgccgcggcgggcgcgccgcgaggaggacggtgatcgtgcggacgatctcgccgtcgcactacgagaacgggacgtggaacgggcacggggactgcgtccggacgaggccggcgcggcgcggcgagtgggagctgaacgccatggagaaggacatgcaccggatacaggtcgaggagttcgcggcggcggcgaggaagagggggaaaggggcggcgaggatgatgctgatggacgcgacggaggccatggcgcagcggccggacgcccacccgagcaagtacaggctgtggcagccggacaagttcaaggtgtcgcgggactgcgtgcactggtgccttcccggcgccatggacgcctgcaacgacatgctgttccacatgctcatcgggtgatggctgatgccgttcttctcattatggctggtcgatgattatgtgcggtttattcgcgccacgattttaaatgtacgattcgtttctttttcaaaaaaaaaacagcattgtttaaattgcttgggagcctactatatggatcggatgtcttatttttttttaaaaaaaaaatcgttggacagtattgcaccgcactgttgaaaaatgtttcatctctcgataaaattgtttcaatgaaaatgttctaaatgtttcagatatataagagaaaaatagttctacgcttgagcataattgtttcaactaagtactctattcaaacatatcaattgcaacactaagaaatcaatgtatgtaatgttgaatcaaaatggaatgaaacatcttaataaagtgtaacaaaaaaaacacaaataagctgcaacatcactaaaattcccaacaaaacccacctctgacttctattccagccaccagaaccaagttcccggatcgacggagtcgagaaaatacactacttgtaagatgattctataaggtggacaatgaaaatgacatgtgttttcctccttgtgaagtgtagatataccaggagaatttggggggccattgcggactgggtcgcttgccgcaatctaaaccccgtgcaatggaaccaagccactacagtggaggactggtgttagatgatcacaagcacgagagaggcgccaaagcaagctgcacataccctaactcttttgatcaactgagagaaaccaacatatctcctagcatagggagatgtcgtcaagcgggcttatctttaaaattaaggaggtacccaagacgtcgcgtgtcgacgccaactgcctccctagacagatatggggaaagaggggagaggtagatactggagagagatgggaatacatgagtggaggggggagataggaggtagaagaaagccaccaagaaaccaaggaatcagagcaaggcaagaaaaagacaccatcgacactagccatcgtcgccgcgacatcaaaggggggggtactcacaagggggcgccagagctgacgggcagcggtgggggcagtgttggcccctggttttatagcacaggagaccatatatatgtgtacataataacaattccatggaccgatagattgacatacacacaatacatatctggtgcatcacattctgcatagcataagtcttacaatatttaatattacatgggttactcgaatagaccgagtatggttgattacattaaccaagatccaaaagatacggtacggaagtggaagctgatctgcgagtgaatgaaattgaatttggtcgcataacatgtatattttcatcaaaaatctcctgcatacaaatatttaccaacacttgtgataatggttagcaataaacgcctatcgctaagtttggtttttcattttatttagttttttgcaggagttggtggtcaaatttagcacttaagaatcgtcaacaacgtcattgtcatgtaggtgccacatcagccgaaaccgtagtccaaaccgtcttaggatcttatttgcactagacgcgtcatatctagtattgcggctcagggacgaaattcggactcggcgacaaattgagggacctaaaattacttgctaagtttggggccagaaatatcccggcctagctagctatctgttgctcttctttcaatgatatcgcatgtttcatgtcttctcgatcttcatcgagaatgaccaagagagcacgacatcgttgaccgtgaagtctcggtacgagaacgagtactcattttgagttgaagtcgggggctactgtcatggttacggataaagcataccttctatcctacaacttatgaaatatacggatacgatataccttctatcctacgacttatggaatatacggatgcggcataccttcgtatgtacgatagacttccgtatacgataagaaaattgacaagagattatggaaataatcctcacgggcaagtacgtaacagagttctactcagagagggttaggattatactatatcgtgcagggtctggggtctccaagttctacttagagactaaggggattcacggtataaatacataccccccgagaggtccatgggatcgaatcatagcaccagccaacctgccaccacaggagcaatccagaggacttgaagcctactcgcttgtagatctcgtcgagactctctcaacaaggatctcgccggtaatctcggaatcagttgttctctattgtactatgtggatttctatatcaatctcatataagctggattagtgttattacctcacgaggggcctgaaccagtataatacttatctccttgtctgcttgatgtcgaatcgtgtagatcctcgtatcaacgttccccaatacccatattatccggtttacgggtatcccccgttgacaccttctgttgacagaaaatccatcccaaatcatataaattttggatcactggatgtgcttcgcaatttgtgctccagtgcttcttcttcaactctggcgagttcctattcttcttcaacgccggtgacaacctaaactcggttagaggaccaacagattagggtcctaggttggggtggggtgtgaggggtaggagagggagggggaagaagggaaatgttgttgggctaagtgagatggccgtgggaggcggcggcctggagtgggtagcaaggcggcaccggcactttcgaaggcacggggttggtagctggctataggccagtattggtggcaagggcaaagcgaagcaacaagttaggaggtaatgagcggtggaagcgaatccattgacggggagttgctggagacgaggaagacggcggggtagaggtacctcgcagccactgaattgagaacgagtagaagggggggaggggagggggggaagaaggaggaggaggccggccagggggagggtgggaccttgttggtgccactgacgccttctgggcagccggcgaggccaggtggtggtggaagtggtggagttgagaggcatcaagcatcaaacatgcggtgtttgaggggagaaagaaaaagagaaagaaggtaggcttaggtttctgcacggatcttaaagcgatccaacgatccaaaaattgcaagattttgatgggtgtttaatgtcgaatgtgtaacagatagtaaaaaaattaatgatcaaatttaaattttagctgcggttgataaggtaacgagtagtaaatggaacaaatattactcatctcccgtctttgcaacataaagtaatatctatcccgtcttgttagtagagatatgaatcaatgtttgaacttttggtttgaaattaatttccaatatttcatgaattttgaaccccctgcacgaaactatttcgtccaaaatttccaatttcttttgaatttattcaaactttgttaaatacagtcaaaattagttcaaatttaataaaacttttgctcaaaatttcctcccggcgtaagtatacaaaacgaaaattgcaaagcctgaaagaggtctaatcgagtggccgatggcatgcatggtgttggtaggattagtcccatatggagaattcaggtaagttgcgatcaatatttaaacacatatgtttttggactaattattttggtgtactgtagtaggaaaaaaagaatatatgcttttggactaattttttttggtgtactgtagtaggaaaaaaagaaggggaggaggaagggggagaagagggaggaggtattgcatattggggggaggggaatgcggggtgatcgcttggcgcgcattagcagtccccccttcccttccgctatttcaaagtatccgtcttcctccctgtccacatgagctaaacgcttcctcttccctgagtcaaagtcttccctatattactactttgtattatagctgggttcactatgttgcatcatctcacagctaacccgaacatcactaacatcgcaatattctccttccgcgcccttcacatcagctacttccaccacctcccatgtttcaaaggtaaattcgtcgtggtggtgagattatgccttccttccgcctcactaacatcagctactataaaagcccttccttgttgcatcatctcaaggagctgcaagcacttcctctctggcagcacttcctcatctcaaggagttgcaaatgttgcatcatctcaaggagctggcagccgtagccggtatacacatgatcctcatctacctctgccgctttctcctccgccgcagccgcaacgtattattcaccgtttccaacagcctccgttttcgcctcaaggtattaactgtattgttgtacatatgtctctcggtcatgctgttctacctgtttggctccatcatgccgctgccgccgtggggcctcgtggtcggttgggtcatggccctcatcgccgtcgagctcgcctacgccttcatctttccatatagctttcgctacatcgctgacaacgacgacgacaagatggttattctccctgtttaagccttcagggcctatatatatagtatatatataaagccttccatactgtctcttcaataaaggctagcttgtgttgtgagttgtatctgtgtacgtattttgtttggttggttatatattgtcacgtaggtatgccatatatatatgtattgctgtatttatatttgttactatcttttgtttttcagataataaaattcagccagctttgcttgcttcgtcgtacgtgtatgctcatcatatcctcatccatcagctgctcatagctagctgggccgtgttatatgtgtgtagtgaccagtcacaaccatgtatttcatcccatgtatgttagtttgtttttcatttttgaaagaaaacatgcatatatgttataactcaaagttttgagatgaatttgatcatctaatttatttctgttttgaattattctgctctgttgttgcaaacttttttttttatgttgggacactttctcctcggtttgattgttatattgaattcgtcgattccagctagtatatatttgctagtttcactcagacaatcatgcctatttgctgatcaggaacaattgaaaacaaccattacagagccagacgaaattaattaatttacactcaccaattattcatcatcacatctctaaacatcgaattctgggattccatcgttcgtccccttcccgcagccgtcggatcgcggatcgacggtgacagatcgcttcgttgaacgtttttgtaatataccatttcttgaggggggtttatgcaaaatatctctatcccttacctcctcctacctcgccggcgtgacgctctcctccctcactcccatccgccgccggcgaggccctcttcgccgccgtgtcctcctcgtcgtcgctgtatggggcgaggccgcggccagcgaggggctcggtggcggcgcggggggatgggggagcagctcggcgtacgtcggcgacgagattcgagtcaacgacgccgcgccgcctctcccctcaaatctcggtagacgagtatatatgaggattgagaggttccgatcacggcgacggaacgaacccctcccttgttcgccatcgatggcttcctcgacgacagacagggcctccggcctcccactctcccaggtttgcattattcccatccctctgccgtccgtacagaccgtgtgagttcgggttgaagctaagcttcctccaattctgcgtgctcttgcacgaatcctacgaattccagaacctctttgctcaaatccaaggcttaaggcctttttttgttagaattaaacctgtatttccttataatattagttctgtttattcctgtacagaggcaagaaagctcaccagagaagcaagcagacaagctaccaattctgaggtgagtacttactcatctgcgtgttcttaattgaactgaaaagtgcatctagatgtgggttttttttttctgaattcagttaatttaacaaggtttccatatctgacatgatgcaaattttgctcaatgctttccaggtataatttgtagattaatgacctgttggatccatttcagcataacctttaggtatattctaatcctgtatttggtgtttgctaatggattgcagtaaacttttccaactccattattatagataagagagaatgcttgcaatggtgtacatgttgagaacttgatcgatgagtatgtgtcaacggttgaggacgtcaatgaaatcttgatgaagctataattttgatctacaagagcagcagaaagaaattgtcctttctattttgcttttaaaactagggtttctttgcttttcattttcacctctgcatggatgaggatcacaaccaggacctctgcttgagctaccctgtagtcacaaagacctttgtcttgataacaagctgtatttttgttaagatcacatatattagttcttgtatcatgctctctcaatactagttgtttcatgttgtcctaataactgagtcactgccttctcctctaagagattaaaatctgaattgaagtctaccattgctccagcgttattgatagcttgtctaagcttgtttttctttacagggcctttcaaacagaaaagttggcaccaccagtatgaacttgaaaaggttgttctcatgtaatattcacttgtgtcattgaagaatggagcaaggtaaattaaacctcctatttcttctgttgtttggagacctcataaccagctatatttaacttctcgtattgcaataattatgtcagtattagagcatttaaaagatcaatatgctttttggtctattctattctattttttaagtttccactaactgatccgcaaatatacatgctgtcattatcttgtgaatttaccttgttcaaccaaattacagggttgctcatcaaatggcttcaacagctcacggactagcagaattacctttgttgatcttgctggtcctgataatgatgaacttgatggtggcagcaagcactgtacaagagaagaaagataagaagcccctgtcaaaagcttgggtatgtaaatttatacgatggcttgtttgggcagaaatttttatgatgtcatgaaaattcatcactaaaatatcttctatgtttatttttcatgttaatcgggttctctttcttaatatgttaacactacagttaactgctttctttagagaaatatattaaacatctagcaataagaataaaaatatgcagtaaagcagaaaactgacttccacattgttacttcaggaaactcatcaatattctatcagaagcaccagagaccaagaaagatgactccccacaagtaatcctgtttgacgcgtgagctgacgaatacactaggtgttgcattcttagagcatcttcagtaatagctcctattttacagtccctaaaagtacaataggggcttcccccatttcctgagtacctaaaaaatacctttaactccagcagcagtcccttttctcaccccttatttcatttcatcttctattttaacatatactttaaagtactaatatatagttctatactctacgctactcctagtatgaaaccataataatccaaccatatttaaattcacaattcaaaacatcacaattcaaattcgattttttttaaaaaaaataaaatggaaatacatatcctagtagcctgtattcatagctcgggtgaaacgagcttctgctgctatcgcgcttccatggagtttctcacatgtgttgatttttcctgtcttctcatccaccaatagacctgctacttctctcgcgaagcaacaaccaagcaaagcaacaaaaaagctgcatagcacatcgcatgtatcactttccccatctaaaaaaaatgtaaaattccattatctaaaaaaatgtatcactttccccattcttcttttgtcccacaatcgcagctgctagtgctaccctgctactactgtctcaatttcgcagcccgcagcagcacttgaaccatccagtgccttgacgccattgcatgactcggtcactaggccatgtttttcatcgagttcaggcggagggtgcaggctggaggagactccaggcacggcaaacgcgtcggccggggaggagcgtcgggcagaggagggcacctgaaggaggacacggtaggcagggaggagccgcaccggccggggatgagcactgggcaggggaagtgccggcggaccaagaccacgtcaggcggctcccgcgcttttccaaccgtggatgggggctgtgcagtagagcccctgggactgtgggggcttggaaaggttatttgggtgcccacctaatttaggatccttgataggggctctgctggattgaattttttagcctcaacactggggctatattcagggtccctgctggagatgctcttatgttccatttcttcagcaggtattttctgtttatgaccttatgtacttcattatgccatatacgacgacgaggagatgcatgcccctgtttaagctttgagggttggggcctataagtttgggggccccaaaatatcccggcctagttagtggcctgtcacggtagatgggctgggccgggaaattaaagcctcccatacttgtgagttggcttgtgattttttttttttgagaacttgcgagttgtatttgtgtatttgtttgtttggttaatattgtcacgtaggtatgccatatacatgtagcggtgtattcactggtggagaaagcgtttgtagtcccggttcgtaaccctcctttagtcccggtttccaaaccgggactaccaatccaggactaaagatcgctatctttagtcccaggtgaaataaccgggatctttagtcccgtttggtaacaccaaccgggagtaaagatggcttggtgttaccaaccgggactaaagatcaagctgacatttttttttttgcatggccctgttgctgcatggtttatatatatatataaaccatgcatatatatgtttcaatacatatgtacatgcataatatatatgtatttatacatatatatgttatgcaaatatatatatatatatatatatatatatatatatatatatatatatatatatatatatgaccaaaatatatttacattatagaaaatgtgtacacatgcatatagaaacatatgtagtcatgtattaattacaatccattatatgtcctagctagctacgatttcgacgtagtagtagtcgctagctcagaagctaaggacctatgaattgtatttccgtcgtagtagaattcacccttgggatcaaggatttgttcgttgatgaattccataagttgttcttgaaccgccgtgataaattccttgtgtgtggtcaggttatccctcatgcgaataaactatatgaatgtatgaaattgattagtaattaaacaacaaatcgatacgtaatgaaattttgaatttatttgtacgtacatcgagctctcttgtggtgatgatttggtctgcaaggcagtggcaatactcgcacacgtagtagccgcacaagttagttccctgcttttgctttgcgcactacaaataaatgacaaacgacgagagatctaattaatatacacttgtatgtatttgaatcggagaaatataaatgtagagcatgtgtactcacaggaaatttgaacttccgcctaagtctttctctccagttgccgcggaccaaatgacggaaccgataccaagccctacatggagtttaaagctatgattcgtagtagcaattaacataacaagattttcttaattaacagaggaacttatgacagtacctgtctataagttcgaaaaccttgtcaaacgtagactcttttttatccattgagtcatatacgttgacggtgtaggccgccaggtcgaagagtaaaagcacccagtggaatctgcaatgtgcgtgggatgcattacatatgaaactcttagcaagttcgtacgggaatgaaatttggtataggaagacagtaaaattaaactaactatgtgttgtacggcaacagtatgaacgtcttgtaatgctgcgccttcaggagatggacgagattgtccactgtggcttgcggatattggtcgagcattgcgacgtttactttccgagggtcgatgaatccagtatcgaaaaccccctgccgtcgggccctttgaatctccattctacaacgataaaagggagtatatattatatatagtctacttatatacaaggacctaattaattaaaggagacgtagtaagaaatctaactgaacgatatacttacaaaatccagcaactcataatagagacgtcgagggcatccagctggtatagttcgtagattcccttgaaattgatccagagaatgtcatctccttgcaagaagtccgtgtccctgatcctcgctccgatcatctctctaccaatggcgctcatctccatgtacagatgatggaacttgtacatttgtgtgggtagggactgcggcagctcaggcttgacaagcggtttaccgagttcgtacatgtatttcacttcctccttttcgattggtgcgactcctagcaattgatctgtagttaggccggtgtcattaataaattcttccattccaatatcttcaccggtcaccaacggctcgatctcctggtttggttgctctccaagctgagggactggtttggactttccagaagatgctttcttcagcgttcgctcatagtccgatagctttatggcctccttggcaggtgcagacatacccctgaagaagttcctgacactcgggtctataggaatcttcttttctggacttcgatgcttgaattgtctcttgacttctgatgccatgtaagcgtcaagctcctcttgcgtgcaatcgtaccccgggtccttgttcttggcggcatcaactttcgtcttcttcgttgcccttgtgtgggcaggcggtggagcttggggggccgttgactttgaaggtgccggaagaggagcctgaggaggagtcggtgcaggagcctgaggaggagtcggtgcaggagcctgaggtggagacggtgctggagcatgaggaggagacggtgcaggatcctgaggaggagatggcggagccggaggagatggtgcacgagacgccgcttgtcgcccagggaggatgatgtaccgcttgcgccatagaataatggcatggcttgtgtctcgtagatgcgtctcaccgtctcctccagggtaatccagctcgaggtcctcatacgcgccttcgaccaactcaactttgaccttggagtatcctgctggaatcggcctgcagtggtaagtatctgaagggtccgttgggatggatgcccgacgccaccttcatgtagtgagaggttatttattagtaatcaacatatataagcagcaactagcggaatggccaaatctaaaatatataaactacgagcttacctttattgataagttcttgaaaggaatatgcagctcacatggtgtccgctgagtgatgtcatcaacggggcaggtggattcgtcctgggtttgcatggcgtccatgctatgtgatcctacctgccccgttgaggcgcagctgctacagtttcctgacgggctcaccattgcaagaggaatggtcggctggggatcatgggaccgatgtgcggccatgcgttcatcaaccttccttgccacctcctcttgcatgctgagctcgtagctcgataccctgaactctagatctgcaatcttcgcctcggtatctctcttgctcctcatccgactcctgtacgtgtggatgtcctccttgaacccaatcttccaaggaatcacccctttccctcgtgttcgtcctggatgctctggagtctgcagggcgagtgacaaatcgtccctctctctgtctggtcggaacgtgccctgagaagaggcttccactgcgtctgttagtcgacgcgcagagcatatctgatcgccgaagaccagtgagccatcagctgggttgagcgttccaccgtgagcatagtaccagaacttcgatcgttccggccaattagcggtggccggttcgatacccctctcaagtaagctagcctccatctcctcccacttcggcatcgcgacgctatagccgcctaaccccaagtggtgatggtacttcttcttggcggcattttctttgtttctttccatcatcgcctgcccttgttcacctgtcttatatgcaacgaactcgtcccagtgatcccttagctttgggaatgtgtcgaagttcagtgtctgcccctttaggatatatttctggtacagatctcccttgaagctctgaaactgttctgccattttcttcagagtccaccttttcactttgtcctctgtacccgcgggaagggtgaatatctcgagcattgtggtccacagcatctctttctccgaatctgggacaaagctctcatgatctccgcgtgcccttgttctgcgccagtacaccatactgacaggcacgttatcccgcacaacccaaccgctgtgacgtacatagttcttggcggcttctgccggggcactaggtcgttcgtcttcgtccacttccgttatgatgtgccgaccctcaagcttcttcgcggcacctcgttgcccgcatgccctcttctgtccaacggagggttgacttccactagcctcctcctcctggttccactccacatccctttccacgtgcccctcctggttcccctccgcatccctctccacgttcccttcctcgttgaaatactggtttggatcctcgttcccctcttcttcgttccagtactggctgcttccctccgcaattgtatcatacaatatatgttcctcatcgcgatcagccatctgttcatacaggaaacatctgctaagtcatgagacatttatgttttaacaatcttatatgctaacaatcatatgctaagtctaggtgacgtatattataggaccctagctagtcaataattatatactaagtctaattacaaatataataatcttatagtaaaactcaaataatcttatatgctaagactaaaatagtcatgtatgctaagtgtaactgtcgtatattagaaccctaaacaatcttatatgctaagtctaattacaaatctaataatcttatactaaaactcaaatagtgatatatgctaagtctaggtgacgtatattataggaccctagctagtcaataattatatactaagtctaattacaaatataataatcttatattaaaactcaaataatcttatactaaaactcaaatagtcatgtatgctaagtgtaactgtcgtatattagaaccctacacaatcttatatgctaagtctaattacaaatctaataatcttatactaaaactcaaatagtgatatatgctaagtctaggtgacgtatattaaatctaatagtcttaattgcattacaaatataacaatcatatatataattacgtcacttgcatgcgcgaattccttcgagggctagctaccactccggcttgagggacgactccgacaacgtcttttctgcaagatacaaaaagatgtattaggataaatgcgaagtaacatatattgcacttgacgttcacgtttcgttcacgatatcgttcacgttcacgttcgttagttcacgttcgttcacgttcacgttcgttgacgttcgttcacgctcgttagttcacgttcgttcgttctttcacgttcaattctcgttcacgttcgttcgctcgttcacgttctcgttcacgttcgttcgctcggtctcattcacgttcgttcgctcgttctcgttacgttcgttcgctcgttcttgttctcggccacgttcgttcgctcgttcacgttctcggtcacgttctcgttcacggcggtgtggcgg

SEQ ID NO: 24471 - DNA, 2745 bp, Oryza sativa
tcgtcgtggcacggcgtcgtgtcgtgacgaggtcggcgtcggcgtctgcaacgagacagccggcagcaaccgagagggagagacagagatcgagatcggagagagatagctgattagatcgagggaggcggcggcggctctcaccccagagatgcggcagcggaggaggaggcggaggcggcggcgacgacgacgagcgcgagacgacggcgagatacggcagcggcgtcggcgcggggatgccctaggcagtggcggcgaaggagaagccgagagagatcgatcgggcaaaaacttctaagtgttggtggagaagacgagggcgcgcatcgggaatatatatatatacccctagatatctttactcccgttgttcttatcaaccgggactaaagatattttcccgttatttccaaattctttttaaacccggttagggttaagaaccgggactactgataagcgcactgaatattattttccattacatatgtgtttctaaaatagaagataatgcattaaaattatttaaagtacaaagagtaatgacaattacttcgaaaaattattgttgtctgtaataaattaagtggataaaacgtaataagcaaatatatgatttaaaattaataaaaattctaataatcatatatacttagcatatgaatgatattaaattggtaaaaactctaattaacatatgtatatacatacggcatgatttaaaattaataaaaattgtaatcatcatatatacttagcataggaattatattaaatttattgttaaaaactctaattaacatatgtaaatgccacatgcatgatttaaaaattttaaaaattcgaatagtcatatataattagcatatgaatgatagtaaattaattgttaaaaactctaattaacatatgtaaatgccacatgcatgatttaaaacttttaaaagttctctagtcaattataattagcatatgaatgatagtaaattaaatgttaaaaactctaattaacatatgaaattgccaccaacgtgatttaaaacttttaaaaattataagtatcgcatataaccagcatatacatgatttaaacttgttaaaacctctaataatcatgcgtaattaacatatgccatacatcaattgatttatatggataatcaatacatccaaaatagtttacatcgtgtacacaataattacggcaatacatcggcggtgacggttgaccgcacgtactttctcctcactattgttccctccttgtgatcgctacgtgagtaaggggtgtcttcatttgataggaggatgctagggtcaatcgtcaccgtgaaagggggttgcccatccaactgatcgtaattatcgtcagtcttgtcttcaactccgacgatttttcttttgcctgggagaaccacgtgacgcttaggctcgtcaggccctctgcccttctttcctttgctagacatgtccttcacgtaaaagacttgcgttacatcattggcaaggacaaaaggttcgtccgagtatccaaccttgttaaggtcaaccgttgtcatcccactgtcatcaatcattacgcctccaccagtcaacctaacccattggcaccggaacagagggaccttgagagaaccatagtcaagttcccatatgtcctcgatggcaccgtaatacgtaccagttgttccatcatgtcccatggcatcgacacgaacagcgctgttttggttcgtgctcttcatatcttgggctctcgtgtagaatgtgtacccattgatctcatattcctggaatgtcgcgatcgacccagatgatcccctcgccaggaaggcaagttgttagttgatcgactcgttacccatgagatgttgtcgtagccacgcgggaaaagtatcaatgtgatgtcgtgtaatccatgcataggacttaccgatgttcctggcgtgaactagagccaagtgctcttcgatgtaaggagctaccaatgaagattgttgcagaaccatgaaatgggctttacggaataaattgttgtctaccgtcattattgctttccttccgagagttccctttccccgtagtctcccttcatggcgtgattcaggtaccccgattgggcgaaggtcttcgataaattctacgcaaaattcgatgacctcctctgttccataacccttggcgatgcttgactctggacgagcacggttacgaacatacttcttcagaatgcccatgtatctctcgaaaggaaacatgttgtgtaggtacacaggcccgagaatactgatctctttgacaaggtgacaaagcagatgcgtcattatattgaaaaatgaaggtggaaatatcaactcaaaactgacgagacattgcaccacatcattctgaagggcttctaatctatccggatcgatgaccttctgcgaaattacgttcatgaatgcacatagctttgttattgttgcccggacattgtttggaaggataccccttattacaactggtagcagttgtgtcatcaacacgtgacagtcatgagactttaggtttgtgaacttcttctccttcgtgcttattattcgcttgatattcgtggagtatccagacggtacctttatgctttccaagcattccaacatactttccttctttgccttggtaagagtgtagctgggtagactcaagtaatgggttcctttttcctttggttccgggtgaaggtccccgcgttgttccata

SEQ ID NO: 24472 - DNA, 2141 bp, Oryza sativa
caatgggtaagatcatctcccatattttgcatgcgatccgccgatccccagccctgcagaacggcagaaccttcctggtattcaatcctgctgaccccccacctttgtcctggatttcttgagacagttaattaattctaacaggggctttagcagtttgcaacttgatctcgtctgcatccggcctgcaagttctaattcatatgaattcatgcaattagatttgtttaaaataaaagttcatctcttctagcaaattaaatgatcaaaatagttgcatggtcttactggtatatatatagatagtttcacgcacttccaggaactctgtaaaagatattattgtttttgtttatttcacaactatttaaagaaacctgatagattttcttatgtatttctaggtgaaatgagaattttaacctagctgattgaatatatatcttttcactgcttatgagtcgaaaaaatggcattacagttcaaccatttggcaaaaaatagatgataacataaatattgctgctcaggattactagaatgtcatattgtgataataatgctgaaatttcttacattaatgaagtaagtagtgcgcctattggttggctgcttttgcctgactttcctgaaaaatactgatacgaacttctggataattctgatattgatatcatgatatgtctgcactaccaaagtacctacttcaattcctgatgagagtgcacactaattttgaggaaacgattgcaggtccaactataactatctgattatttgttaaatgcattatcataactggttagtcttttgaatatttttttgacagttcaattcagatatccagatcaacttgattcagggttgggcatgcaatgatggtcctaggattacccgaaggtatttattgttagcaagttttgattgctcttggagaaatggataattttgattagtcatgaatctttactgatttgtattaaaaaaaaactttacaactgtatgacatacattacaatgtttttgtaccgatataatttagcaatcacattacatctcattttttttgttcaaattaaaatttagctatgtttggagttgtgttggatccagttttttttaactaaattatattgttgtaccaacatgcaggacggggataggcgtttgcttgctaagccaatcaagtacttttatgagatgcaagagcttttctcaggcagtaatgccaatggctctcttgccatagaccagcaaacatgctacaacattgatagaaaatttgatagcagtgaccatgaaggcttgaatgatatgtccacctatgcacatcctatcaacattgctaaagaagactctgacacgttaccgtcgccaacttgtcctgataatttttctccaggaacatctcgagttagtaaaaagagaccaagagatgtaaagtccccaagtaaaaggcagccaaagcctaagagtcgtttcacagatgtcactgagaaaattggcaatacaatggaccgtttggtgaaccagcttgctagtcctcctccacccccaatgccacaacttcgtgacccttatgctacaatgtggaagaggatggatgcattacccattggttccaaagataaggttgttgttggaaattatttgggacgccaggagaaagagggggtgcgaggatttcttgctgcttcttgtgacacaactttggagacaggtgtaccatttcatgtgcgaccgagatggtgtgtaggttaaatggatctaactgccagcattcgagtatgttgctgaccttttgctaagttgcaatagatgtactaatcagttatattggaaccttatgaaatatcttaggtccgaacaagtagttacttttgggaaaggattagattagatatgggcaaactaattagcttatattgaaatgatgcatgtgaatatgttaggttcaagctgggagctacgtttggttattagaacaactatcactatacagcaatgatgcaaaagtatggaccttatgctctgaatgtgttatgaaaatttctctagtgactgagtattcctcttcacctatgatatttttatttatgctaatgatgtggttttctatgtacatttgtgtctgagtattg

SEQ ID NO: 24473 - DNA, 14026 bp, Oryza sativa
ggggtggtaattctcaccatctaattgattgggggtaaccatattcaactttggcaccaaccaaacagctactattttgccacaaagttaggcatgtcatgtggtagtcatccaaacaatacccttaacaaatttgccacacttttgtttatcaagtatcaaccaaacaactctattttgccacaaagttaggcatgccacaatatcagcaaacatctaaccttaagcatggcaaccttagtcactaaccaaacaaccacaaaattagtatgctttctgtagcatcgtatcaaaccttattaaaactaggaaggtagcccgcgcatatgcgcgggcatcatatttaactgtgttagaaatttgattaggaatatttatgattactctattgtaaatatctttaatttttcaataatttgtgtggtgtttctctgaatgctagtaaccatcgccgacgtataaattgtaaactaaaattacttaaaacaatgcagttttggttttataagaaaaaatatatatgaaactatatatcatttgtacataatgtgtttcttttttaatattaagcataacttaattttgtactttctaaactctgagtaacaattttcttttgtataatatatatgtctttatgaattttaggatatattaattgaagatattttctattaaaaatatgcctaatacgactacatataattatgagctgaatatgttgaaatattgatttagttgtatgtatatagtattgcctacatataattatgagctgaatatgttgaaatattgatttagttgtatgtatatagtattgcctacatataattatgagctgaatatgttgaaatattgatttagttgtatgtatatagtattgcagtatgaaactaacagtttagcggtaaatgtttttctcaatgagaaaatatattagaaaataagacttttatcgctcccaagttgtagtttagggttgtatactttgaactgaaattatgttagattttgtttccaacataatacagaaaaattcaaattttctattatattttatttaaaattttagttattttctttatttcagtactccaaaaatattaaaacattgctatttaggatgggtatcaatttttttaaaaaaaatgttaaatttaggaaaaaaaattcagtcttcaattatttttatcatgttatttttttatagatttccattccatcaagcatctcttaaatattttgatctctgcaatctagaatggaaatataagtgggttaaggctatacaacttggcatgagataaaggtatcccttaaatgttttcaatgtgttgtatatgacaaatagatcctagacggggtacacgttatgacatgaaaaaatgatataattacaagctttttctctaatctattagtgacatcagatatcatatgtataatttagatattatgatcatattaggaacgtttatttatctctaaaaagatcatttatttataaaagtgcatctaattatgatcaagtataagtaaatagcccctatatgcatgttaagagaaattaactacttccactgttgaggaaaaatatatcaatatttactacaccaaattatttttattgaattcaaaattgaatatgtttttataatatgattgttttgtgttgaaaatattactgtgttttttataaactaattcaagtaatttcacattgacaaaatttaaaatgacttataatctgaaatagaaggagttggaagaaggtgattagatgtctagcatggtataaataatgggttaaccgtttatgaaaaacataaggtgatatattttaattttttaatgagaaagtttagtattctattttatttattggaggcttaaagatggatagatatggtccacaatgtaagtcaatacagatattaaattattgatttaattgaaaattacaatagtgtagaaatatcataaatgaatatatgatttaaaattttatgagtgttttaaagtctagtttacgttgtttctataagtgctagcttgaggagaaagagaagaaaagcacatgacacaggggaaactggttagacttgttaggcggaatccatttgtgggagttttttttatcacaaagataatgttggatttagtttctatggaggtaaagaaagaacagagaaggaatggtagggagagaggaatcggaggaatgggaggaacgggagggggttttgggattttcttttaaagatagatctaaccatataaaatagtggatccatccatttaagtggaaagcgatggttagatgttttattttcatttgtcatacttatagatttttctaatgtattagactgttacgtggcgagatcaacttagaagtgtttatgggcgtaccattaggccctgacatttgtagttagaacggcaacacgatctaattttttagataagaaaatatgagtaatatggattttgaattttatatttaattataaataacacaacaattgacaaaaactaagaataaaattataacttgagagtcgtgatcatttagatgtccgaattttttttgatatattgagtgttaatgagaaaataggataagttagctagaaaataggagaggatgggagattcggaggatggaaggagtacgtgctacctttttttaccttatgtacgtaaggtgttggtggtggggataccagatttattttctttgcattggagatctaattgttaaaattaacgggtccaccattttaaaagaaaatcgacggtgtgattatagaataccacgtggtgatttaagagcgtttgtagaaggtcatatggcggcttgagagtatttattggaagtttaattaacttttagtatataagtcccttaaattttttagaaacgctagtaagctgtcacgtgacactcatataaaagcttgtaggtcaccacatgtcatatctctcaattaaaagaattattaaaaaacataagaaaaagaaaaagaaatctaactgtgaattttcacttaaatcggtaagatgtggttttatatatctattaacactacctcctaagctcccctagtgtacgtacgatgtgcggagtagtagtactgttttcagaaggtgtaaaggaaaagtactgtttgcaaaaaaaaaaggaaaaaaaacaatactaacgtggagtacgtatgtatgccgccggaaaaaaaaaagaaaaaaataatagtaacgttccctgccgatccagacctcttgtctacggtgttatcctctttgtttttctatatattattagttagagcaaatatggcaattttttttaaaaaaaagtagggacgccagatttattttttttaatggagatctaatggttaaaattaatgggtccaccgatttaaaagaaaatcgacggtgagattatagaatgccacgtggcgacttaggagcgtttgtaggaagtttcatggatttttagtatataatagatagatattagggaaagcttaatggcactgggcacgctcgtggtggtgattaattgactgctgatgaggacgaatgaatgatgagggaggtgttgttataaagatagatacacaacaaagaaacaaaattttacccagaaaacccttatagaaagaaaaaaactacgtccgttgacatgcgattactattatggagttattacaaacacagagggtacaacggattgttgcacccttcctgtgctggttacataagtatataaagcgggaaaaatacaagagttataatagggaaagactcgaaatagtaataatagaaaacaatccaaatatatattgctagctgaaattcaaataatatatttaaccgccatagtggcctccgactacgtccatgtggaggagatagggagagaaagagagaggagagaggggagaggggagaggggatcttggaagagggaggaagaagatagctaggggatgacatgtggccatattcgcagtatccatggtggattcaatctgtctaggtccatggtggattcacatgcagcgtcctggagtggagaaaacagaaagggacactttcaatattctttacagatttcgtcgccatgtcgtcagctccaatattctctcttcgtggccctttacgtcggtcaaacacccttttctttcagcgcctttagaaaaagtgaagcgcatagatgcttttacgcctatatgaactcaccaaattgggcttgaagaatcattcggcatcgagaccgggctagctagctagcttagttttggcggcgagcttaattagctaggaactaaatggagctcatcaccgcgtgcgcgcttctcctcatcgccgtccatattgcgattgtcatctcctgcccggagccactcgcggccgttgcattagtcgacgtgcccctcctctacctctgccgctacctcctcatcatacgccgcggtgtgatcatcgtctccggcgccggcgccggcggcggcaggttgcgccgcttccgcctcggggcagccatggcgatcatctacatggccatgtcgaccctcttcttcctccgcattgctcctctcacgccatggtggggcgccctcgccgcctgggtcatgatcctgctcatcgtcgaggccatcttcgccttcttcttcccctaccgctgctgcttcaacgaaaccgaaggcgatgtccagaataatccccatgtctgagagagagagaggaaagcttttgaattatgatacgcatatcgtatgtcactctcgcgctcatcagatggtacatgcgatatcaaactcgatctactttctcaaataaacttacctagctagtagtagctgcgtcccgtgtatccgttcgtgtatgttagacttaatcttgttgtttagattttgtgtgtgtgctagttatatgcatgtacatgtgagtgcgttgagtcagtttgatatgcatgctagtgaatgcatgcaaaaggtcctagtttacaggtgcacgttggcctggagttgtggtagccgagtcaattagctggagctgtctcatggatggtggatggattagctccatgcatgtgtgttagttaccaggtgatgctctacatgcaaggagatgagggctgcatgcatggacagaagtggttaattagtggctaagtcaggtgagtggtggccggttagtgccgcaaaaacgtggctagtgagctgctgaacgtgtgtgctatttcaagcgtgtaatcagtgtgtgattaagtgtgtggagaatataaagtgaagtgtgtggtggttcgctggtgtgcagcgacaagaaactgtgtattgttcatcttctttgtgtgtgtttcatcgagtgaaagggagagagctgtgtgtgtgcaagtgagtggctgggccaacagtgtagcggtgtgtaagtgcagtaatcagctgttgggtacaatgtaagtttaagtttgcacgtctttcaattcattttgagatgaaaatgcatactaattcccattttggactacaatgttctgtgtgtttcgcacacatcccgcgggccgttaccccaccttgtctgccgctcacgaactggattttttactttgaaatcggttttaaaaacttattttacaataaatagatcctgaaaaatacttatttcagatatagactacttggcatcaatatcattgatgccgtggaccaatctgatgacgtcaatggcactgacgctgaggatctatttgtaacaaaaattaaaataaatctatttgtaataaaatatatatatttataaataggtccttgaagccaacaacacttacgccgaggaactatttctaaatattttattttgacaaataagttgtttttatttcttttaattacaaataggtcttttctagttttttttccaaaaaggttattggcgacgctgtcgccttttacatcagggacttagctttcgatgagagacgaggaggacgacgccaatgttattggtgctattagattggatcatgacgccaatgttattggtgctattagattggatcatgttgccaatgacaaattttcaatggcatggataggtttgccgtggtaagagatgcagaggagttggcctggacacggcggtcggacgccttcgtctcaatcaacgcaaaccacggaaatactctggcaagttcagttgaagtccgtggtctacacttgtaagtctggatccacgagcgctgcaccgcctacatggagcgggtgcagatgtggagctcctgttcactggcttggacaaccaatggcgtggcggccaaccgttaacagccaaccatccttgatgcggcgtcgatctacacgcttatcggtagggagttggccgtatgacgacgacgatggtgggagggaggcagctaactatagtgcgatgccctcctccctactcccgcccgcaccctgcctcctggcctagtgaggatggggaatagaggggagagggggagagagagaggaggaaagagttggttgttcacatgtggggccagtgtagatcccacgctgacttagcgcagctactgcagtcaaagcgtcacgtcggatgaaaccggaagctatactaccttgggatggaagctgatacagtcttgcaagttcggagacgagttatacctggtacggcggtgaagggatgagacaccaaaagtaaacttactctaaaattgatcaaacgggatggattccaggcccaagtacaggacggcccaaatcagtcggcccggcccacgtacggaaccaacggtctagaatcactcgaccgaaaaacgccaggtgtcagccccacgagctcccccacgttccactcgcgcgcctccacgtcagcacccactgtgggccccacaccccccacgctttccatctcctccacactcttcttcttcttctacctctccactccctccccccaacactcgcctccactccacctcgaaacccacaaaaatggcgtcgcccacccacgccgcctacctcgcccccaccgcccctccccgccatctccacctcctcctccgcctccgcctcggcggccgccccgccgtctcaacctgcgtccgcgccaccgcccgcgggggggatggcgggtcgtcgtacctggacatgtggaagaaggccgtggagagggagcgccgctcggcggagatcgcgcaccgcctccagcaatcctcctccgccgccgccgccgccgtgaaggaggaggagggagaggggaaggctgcggcggcggcgggggacgtggagaggaggacggcgcggttcgaggagatgctgcgggtgccgcgcgaggagcgggaccgcgtccagcggcggcaggtcatcgaccgcgccgccgcggcgctggcggcggcgcgcgccgtgctcaaggacccgccgcccccgcctcccccgtccccgccttccacgccgccgcaggagcgggaacagcagcagaagccggcggcgaccgcgatccaggccggatcagagagtggcctggtttcccgtacggctccgggggagtcggatcgggcatccccgccgccgccggtgacggagacggcgaccgaggcggcgaaaggtatggggtgattggtgcacgtgaggttgcttaaagatcacaagtactctttcttgtgaacgcattatcttttcgatttcttttttactagctttttgaccgtggctaacatgataattgagctaaaaaggacaactcctttttaatctgacagaatgtatgaaactaacaatccaaccataaatcccttcctgaggaatagttgaaaaactgggaatctatttttaatcttttttatgtgtataatagaagtgtttgatttatgtcaacaaaaaaaagtgtttgattcgattgataggtgaatggatttagggaacttgttagatatttatggaaaattttgattgtgtgcactgccatttttgtctcgccattggcaatagaaattgtagctgtgcagataacacacaggtgcctgcagtattggcatcttgttttgttatccatgcatatttcttcatttatctgggtatcaaacatgaatttattgtcgaagtgcgatgctgattccaccaaatgacttactcccgctgtccaataaatgtagctaaaagtagcataaatgcaccaaaataacacctgtagacattaagcatatagaaaaaaaattatcagcatttctattagttgcaagttgcatctgcatttttttttcagacatacatgtattcttatgcgggatacacaattaactgcagtattttagttagtaaggtattgtaaaaccatgctgttcttaatctgcaatctgacattagcaatcagtttcagtgccggactctggtgattcatctcctttcaagaagtcaagttccaagctcggtactccaggcccggacttctggtcgtggttaccacctgtggaaaatagcactaaactaggagaaatcgacactgggttaaaaccatctgagaaattagactccttcgccggtcagcctgatctgctgatggaaaaggaacagtcagaagacattttatcgctcccgttcgaaacctctttcttcaagaaggaagaccgatctcttcctcccttccagtcgtttgctgagcctgaaaatgtggaatccgagcccagtattactgctgatgcagaggagacattcgaagatcagttttcgaaaaacgcagctgaggcagctagagctcttagtgcaagcgacgagaagtcatcacatggggtgcgtccagatggttcattgtggtggaaggagacaggtgtagaacaaaggcctgatggtgtaacttgcaagtggaccgtgattaggggagttagtgctgatggagctgttgaatgggaggacaagtattgggaggcttcagaccggtttgatcacaaagagctaggttctgagaagtctggtcgtgatgctacagggaatgtttggcgggaatactggaaagagtctatgtggcaggtaaattgctgtctcatttggtacaatacaaccatttgttccttgttcatgaaacctacaggttacaatgttacatcataagcattaaattatggctattgtttctattgaaataagattatctggcttgagtgatgcagtcatgtgtagagagatgtgtctcactgtcatgcgttgatttactgaagtatttctgttccgacaatactgatttactaaacttcagatgtaatatgatttgtactgaatgatcgccccattactcgttagaacataactgagtactgcattttttttttaatatttgcaggatttcacatgtggtgttatgcacatggagaagacggcagacaagtggggacagaatggtaaaggggagcagtggcaagagcagtggtgggagcattacgattcaagcggtaaagctgagaaatgggctgataaatggtgcagcttggatccaaatacaccactagatgttggtcacgctcatgtttggcatgaaaggtaagagctgctaaaatagcttctttcagaatgctttctgtccgtactcttatcttgcttttgtccgtagtcatatcacattcaagaaccaacatttcctcttgttaaaagaaatgaaaagagcaaatatttcagcaatcagattgtttgcaacatacatcatttatgctagtactgttgtaacatacgacagcttagtcatatcaatcaactcaatacatttctggctcatcctctacaggtggggcgagaagtatgatggctgcggaggtagtgcaaaatacactgacaaatgggctgaacgatcagagggtgacgggtggtcaaagtggggcgataagtgggatgagcatttcgacccgaatggccatggagtgaagcaaggggagacctggtgggcaggcaagtacggggatcgctggaatcgcacctggggcgagcatcacaactgtactggttgggtgcacaagtatggcaggagcagcagcggtgagcactgggacacacacgttccccaggacacctggtatgagcgttttccgcactttggcttcgagcactgcttcaacaactcggtgcagctccggtctgtgaagaggcagactccaaaaaacactaagcctgaaaaagattagatatttagaatagaatctactcaattgctatcataaaaaatagttggctacatggccatctttcatttttgatcttgctgaagagcccatgcttgtaaaataagattgaatggctgatttcagttgtccggttttatgccaatacctgtaccgagctatgttatcaaaagttcatatgctactatgcaatagaaaggttccttcttttagtttcaggaattgctcccctttgagattgtttgaatagaaaggaattttacagggatttgaattcaaattttatttcaaatcctaacagccactgaacctaatgccaaatttgctcctgaaatgcaactgattaacagttttacatgtgccatcctgccacgcaagcgcgtaggacatcgtcagtgcaggtgacacagtcacgtttcttcatacaaaaatataattctggagaagtgcttccatgttcttcaaaattaaaaaatgagacgaccagaatccacaaagataatgggccaaacaaagagaagcttatgccactgtcagataggttattgtgcaatggaattgcaattagccgaacctataaaccagtcgacatccgacgcccgttgacattctgctcttcatggcaaaaaattggcaaacatgactttgcaatctggtgatctgtagcaaatgagcctaaaagaaaacagaagtgaaataaactaggtttgactaatgaaggttgagatataattaaaccccaatttagtacaaaacgaatatgcacatattctctcacccctgatccctcttctctgacgagaattcttcaagctcctccatgcctcacacttcatgccatcaaaaggcaaaaacaagcaagaaacatctcctgctactatatatctcctacacatctacgacaagaaagtttcacacataccatcgatcgaattcaaggcttgaattcgaaagttcatggagagccatctcaacgagcagcagatctccgatttccgagacgccttctcgctgttcgacaagaacaatgacggtatgtttttcatgtttcctcctctaattttgcattgcaatgcgtttttacatcctaaaattcaggtttctccgtgacaacactgaattccatggactctgcagctgaatgcctctgaatgtagcagcacaaccagtttatgtaatgtctgggtctggacttgattgcaaagtttttcttacttcatattgtgaatgcatgggcttgaatacttgatctgcagttaattgtacatatatttttggatatcattttgttctttttccacttagtctgactctgaagaatgatgaaatgatctgcactgaaaaatctgtaacctgaaacggttgtatgtctgatgttaggttgcataagtagggaggagctggccaccgtgctcacacgcctgggcatggcgccaagccaggaggatctgcaagacatgatcgtggccgtcgatgaggatggcaatggcacgatcgagttcgacgagttcctcgcaataatgaagaagaaactatatgtaaaatgcaactgaaacatgaagaattaaattacaagtatcttttttatgatcttgcctgtaaatagctgggaaaattgaagttcttcttttcattttaaattcaggagaatgacaagggtgatgatgaggaagaactgaggaaggctttcaggattttcgacaaggatgataatggattcatatcacgcaatgaggtatggtttttgcgcaattttatcagcttgcgaattggaatttgtagctaagaaattggtcgattcatgtccatagttaagcatggtgatggctagtcttggagaggagatgacagaagatgagattgatgatatgatgaaggcagctgatagcaacaacgacgggcaagttgattacgaagagttcaagcgagtcatgatgagcacgtaaacgatttttgattctcttcagccagaaattgtatctggaatcattttggatgccatttgatttcatgggagtgtgagaggcaaagttgtggtatgcctaatttttcatgtagtgtgtgcagtgtgctatttgtttgttgaattgggaaaattggttacatcatgccatgtttcatcagttttggtgcagtattatgctgtgtgactgatgactcttccatcatatcatgaacagatggaatatcacagaaatattcaaacctcatgtaacaatctggcgttacaagccatgattgaacaaggaataatgttgtattgcataattatattattacctccgtcccaaaataaatacagccgtagaaatccgtgtccaacgtttgaccgtccgttttatttgaaaattttatgaattttttttaaaaaaatagtcacacataaagttctattcatgttttatcatctaataacaataaaaatagtaatcataaaaaaaattcaaataagacgaacggtgaaacgttggatatgaatagtgtaaaattgcacttattttgggatgggatggagggagtagaaaaaaattatgtatacaatctttgttcttccaaagagactaagcacacaattcaacacagctgaaagttgtaacattcttcttcatttcggttgagcatataatctgtacagctgattctgatccttacatagcctgcatctacctatattgctgcgtacaactatttttcatgtggtattcacaacagctggtaagacaatcgggttggcatctacaaatgattcaccaattccttcgatcgaactcaccaagcaaatgtacactcagcagtaaaatttggaggacttgttataggtcacgagtacgttagatttttatcatgtgtcggttacggtggctcctgaaagtaaggatgagctaatacttcatcgacacttaggcggtcctcctacaagacaagggtaagtatatgttaagagatggaaccacatcaatgaataaagtggtcataaaatagaactgcaaggcatgggctggcctgatagtggcattaacataattattttcaagtttagcaggatgcaaataacagaaacagtaggcagtagcttgtgtgtagttctcatcggtgcattccgtgaaatgggtgctcttaattccattgtcatcttcatatttcaaggagaagcataataaatacaatgcattatgcccacagtttagtatctttatgtacaatgtttcaggtcatagttttatctagagatgcacaggaagagttgaactttcccgacagaaatgattcagaactgtggtggttttcacaattgtatctccactcttgtgtgcttctagaatgtaagatattattctgccgcacttgtacttataaattcttcaaaaaatatacagggtgcaagcataccatttttctttacagattggggttcaagaaacttacaggatgccatattagtaactggcgtgctagtcgcaatgcccatatattaggaaagctggagtgcaacagcaagcataaaaatattagatacaaagatgaaaataatctggactgtaaaagacgtggacaacaaacgacaatacccaccccattttaagaggatctctgatcttcacttgatgcgcaaatgattcttcagagcatttccaagaagccggccgaaactgaccctaaaacaaagagaaagaaatcattgttagcaacaatctcctggaagcttattctacattaaagaaataacaacggcatatccaatgagtttcctttcaagcctcaaagcaaggatgtatagttactatgtactacctccatttctggttataagacttttgactttggttaaagtcaaactactctaag

SEQ ID NO: 24474 - DNA, 6931 bp, Oryza sativa
caaatgaaactagagtcatgcaccaaatatcttgtttcagaacagcatattgaacaatgcagagtagacttttacatgcaacccatagattgtcactttgtcagacagtaagtaaattgaaagccccacactgcatccattacttaagctgggtttaaatccttcatcaagcagggggtagaaccctcttaaaacaatgttttctttccaccatcaaacatgtcaatcagagagggaaaccattgaagttgattaataaagatgttttctctccaccatcaaacatgcccaccagggagggaaaccgttgaaattggttaagaacctaattttacaatgaaagaaatggctttgtgcaaagtttttaaaatagtgaaccaaaaattgtatttaagtttaaatatctggaatattctacaattcacatgcttcagttttgaactagcattgctgtgcaagtagccaagaatccagcacagagtactactaaggctgtgttcgctgctgctcgttcccagcaggaacagtgcacatggaaaacggaacggtccattagcgcgtgattaattaagtattagctatttttttcaaaaatggatcaatatgattttttaagcaactttcgtatagaaacattttgcaaaaaacgcaccgtttagcagtttgaaaagcgtgcgcgcgagaaacgagggaggggttgggaacctggagatccgaacacagcctaaatcttaaaaatgaatttggtactaaaagaacttttagagacacagcagttcaccctaattagtaattggtcctctaggaggaaaactgaagactaaagaggcatcaaattcaaaatgcaggaaataagacagattctatattcaataattcgagcacaaaatacccaaaatgtatgctctaaccaaatggtaaaaggaagaaaaggaaggaatatgatcacacaccgagtaggccctgaatcataaagatgcttcaatgtgaaatcatcaaaggcactgccaaaagtcaataagacgcctgcatacacaacgaaacattttgagaagtgcaatgcaacatcattcttacattattaggtgggtaaacacgactacagcatgccaaacatgcttctgtaggtcacaaattcacctaacaagagcatgccactcaagtgtagcaagtcatgtactgatgtgtaatccaatttcccttttatgtatcagctctaaccatcattttggttaataaatgataataaagacaaaataaagaatttctaggaaatgttcttcactaaatgcattgaataatggagatcccaaggaaaagaattctatgctgagactgataaaattttagccagatgcatgagtgtgaaatttctctaaatagttggtcaaagagccattcagccaacagcaaacctagataaagtacatgtgaagtcaatttcctaaaactattgtactgcagattatatgtcaaacacctaggttcatttcgatatattataaggcactctgcaaacattctgtgggatcaatcaatcccacacctgcatatgcgcctctgccactgaggccaactatataaccataataaaattttgctaatcgaaccatttagaatcatgaaacctccaagtaaaataaacaacaaatagataaagtttttgcaacatctcagtaaaggaaaaatataattccttacatgttcagtttgttgtgttttgcttccgacggaatctctctcaaacactttcctgtctccagatcctcaaagcagattatcatgttctcttgcatggcatacaatgaattatgtcagcatgcctagttgacaaaagttatttctggaacaaatgaagacaagaaatgatttaactagtatgaatataactagagaatagaagtctatagcttttgtaccaggtttaatatccctgtgagtgatattacgatcatgacaagctttcagacccatcagctaaaagaagaaaggaaaaaaacagatgttagtatgtttaaccatgtaatataattaacaggttagccatctcacagattatttgtttcttttttttttgaatttgacaagagccacacacacaaaggtgggggagaaattagtatacacaggctaacaataaaataaagcgacaactttgatgtacttgagaagcatctagaatggtctatggaggcatggtgtttaatttacagtactataaagaatggtgtaaacataccagctgccataagagattttgcatttgcttttgcccagctttcgttgtccttaaccaataccaccactttgatggttgaagaacttgaatatgcctgaccctctcattattgttaccggtaactaactttgtttcttcagctgtatatatcagcttcgataatgagcggccttcattacggtacacaagccatagttccttcaattctgattcaaaagattctataaacctagcaatgtgctttagtggttcttcagtaaatgacatgttattttctgcaaagatatgaggattaagttgactgtccaccgaaaaggctgtggatgactctgcccttgacaaagcttcaagagttcttgaagcatttgaaaatagttccccaaaatatttttcccgcaatccactcaagtaagcagcacgtcctctctccacctgcagtttccaagattgaaataatcaagtcaaagataaggaaataacacttatgtgttgcttagaaaactcaagttacttttagatgtttaaaataacatgcatttaaattacattagaagtttagaaccatctaatcattgtagtagacaaactggagattgtcgatacatgatggagaaactgaccatagcaactatgtctgatgcaagttcaggagattagtgacagctaccatctgccacaatgtgaacccacagcccatggtagtttactagttcatagaatcataaattcatctggtagaacaaaacagttttacctctaatactaattacttggtgccaggaaaaaaatacaaagattgctacacgatggcaggtaattcatcaggaaaagatatttgacttaccattatgcgctttaatatgaataaatcaccatctattgtgtctgaatcatggttttcatcaggcaaagttgtgtttgagcttgtgcaattgtatgagtctggtttaagtatagtgttaaagtgtgaatgatctttatgtacgtctacatcctcagagcagttccaatgaaatgccaaccagacttcaccatatgacccacggtcaaatcttttcttcagcttgtacctgaatatggtcaacaatagcaaaacagtcaaatatgtgcatacatgtccatacataagtattcctttagccaatgcaatatatactactcgagttttgacgtagagaatacttacgcacattttaagaaaaatgatttcagaggaccaaatgaatcaaatcatggctcacctcaacttttcacggtctttgtacctaaccagactaataaaagtttgccatatgaagtcatcttcataaatggccttttaatttaggttgtgcttattcttcattttactcgaaaatagatctttaatgaaaagaaaccaaggtaaagttttgagctctgctcctttatctggataaagggttacagtaccattttttgttctgagaaggcatcattaggctagaattgtttttaagggaaaattgacacaagaaaaaaaatgaacagataacttcgaggggtgaaagtttgattggcgtgttaccaataaggtaggtattcaatcagtgtgaagtttggttggcaagttatcaacttaagttggtgcgagatctgttttgaaatgaattaagcataaaatctacaggcggatctacagatgatctgaaggtacaaagctacttgagatatgaatggtacctaaaatcagatatcttgtagccaaatgaatgtgaactatgcggtttgcttccattatgtgaaacagagtcaagcaatccaaagaaatttgcaaaagcttcaggactatgacaccgtcccatttcaccatcttgatgaccaaggtaccaacaaaaatctctgtccttgtatttatcaagatttcctgtatccatatgtaaaaagaagacaaaaattgatggcatgagcatgatagggaacactaacgaccactaagcattaaatcagaaatccacagctctctcaagtactaatatgacaatggaactcaaaaccatgggtaaacaacctaatgtataagatacatgcatagaaatgtgaatgatccttttctccaccatttcaatcagaggttaatatatactatcgaattttgaataccaaaagtttaagacaggatggtaagtcactgaaacaggattacacctaccaacaagctaacccctgaaggaaagaaacaatggcacttattattgaaaagatcccacccatgtagatgctaacagaaaatttaccatcagaaaataagacagtttcaactagcgagtgatcgaagtcattgactccttcatgctgataggcttctggtactctaaatatatagtccatatcttcatcaagactctcagataagtagaaacagcccagtctcttcatttttgcttcaacctaatttcagatgaagcaaagaaactttcacaacatggagtaacgaacaaggtaacttaatagaggaaagtaagaattctaaaaggaatcttctcgattacttcttcatacagaacatgttatatgccaactgaaacaaattaccagatgacacaatccatctgtttctgttggtctatctttcaggacaggcagtggcataacaagattctcacttaccaagaatcgatggaactttgctgatgaacgcttgtaataatccacgccaataagagctgaactaacaccatcatctgctagccacatgaatatacatatcaacaaaactaaggactagccaattaaggactttgcaggagaacttgaagtaaatgttgagtgtactaagtatagcaagaaagttgaatgggtcagccaagtgataacatatactccctccatcccaaaatgatcatcatatatgtttatgcaccaagaccaaggataatttaaatcgcatcaatcaatacatcatgcacacattctcccacaatgcatgcatcgattacaacaccatgccaattacatcctagcacgcacacattctcccatgtcgcattaattgtatttcgatgaaatccatattcatgcggttatatgatgatcaatttgagaaattttggatttcattatatgatgatcaatttgggaaggagggagtatgaactaaatagcattcaatttaacaggtcaaattcggttctctaatatttacataacatagaatctctcgactgtaacaaaatttggcagcaggatgttaaaataagaggatagcatcatcaaacaaaatgtgcagtttgctcttctgtgaagatttggtatgtctataggtgtccaatatattaacagtaggaaatggactaccatgtaaatttcaatgagcttcaaatttgaagacatacttgaagcaaatagataatataatacaatagcaaattattggagtaatttgttattgctcgaaactaataaaaagctcaatcttctaaataaaacaaaatgtacgaattgcccgagtggttgtgattacaaattgccaagtgaatgtgattaaaaaaaagttattgtacattgaacctaccagacttctgttggtatggaatggtctgtaatggtgaaatagatgtcttggaattttcttcaagcatataccaatcttctaatgtaactttagagctataatgagatcccaatggaacaatcacagcagctacattgtctgttgtccctttctctaaagcaagatcaactacataatctgccaaattccgttgcgttactgcaaaggatcctaattcttggttaacaccaagtttgacacgcaacatcagatcacaaacatcctgcatagtcattttctcaaatacaccatcagaggaggcaataagaaaggtatcatttgctgacagagattgccactctgtcagttcaggtgtcggtattacaccatacctacaaaaacaataagactggtcaattcaacctatccaagcaatttgtatatcaattgacagaagaataattcatatattgcaatatcacaggccaaaagttacaagcctaaatattgttcgcattgctaatgagtgtaatctgtatgtattgagaatctggtgtgttagacagttcttaattagagaaaatcaatgattagttattgtttacttatttgatttctgatttctgtacaatattgtgaggtatggaatggttggtcctcatctggctttttaacgattcctcaccatggcttacatattcatccagtgagggcgatgctaagtggatttgcaagggctagggattcctcaccatggcttccatattcatcccagtagcatgcaattctactgccatgaagtatctattcagatttctttgaacagtctaggcccaaaattcacttcttaggatatgcctgaacacagatagcaatttgcttgggccttcgtcctcacctccccaaaagaaccagaaatgctacatttgaaccccgcaagtactacattccaccacagcatactccaaatctccaatgtgagaccaccaccaattgggcaggtggtgtaacagttttgttttagtttcttaaaatgacattgttagacttaaaggtggtttctgaagaactagatccataagtcctattgcaaggcattgaatactccattagtggtatcataaataatttataactattggccagcaagtcacaacatccagccgatctgggctgcagga

SEQ ID NO: 24475 - DNA, 4888 bp, Oryza sativa
taatattcagttcctgaactcatgtcattctaacgatcggaatttcttccaaacaatgccattatatgacttcaagataaccttttacctgtttttcctactatactctctcctcttttaattatccatttctatttacaggtcatttatgccatgtatagagtaacacacaccatctcaagcataatagaaacataatggaggctttttgagtgaggtaagcatggtcatttttaggtatagcttggtttatgtgagtacaacaaataaatttctgaaaccggtaaatgaaagacataggtagaaattacagaatgtgtactaaccgtttgtaaggcacatcaccaatagctcttgatagtgctagctcaccattaacacgatgcacaccagcccactcaagaacataaccaccagcagcctccacacggcttctctcatcttctctatcaggatgatgatccttggtcaactccttcacattatagaacggtccatcataatttgctaatgcaaagtcatcacgattgttggagtttctctttcttctccgttttcctgatacaacagaagttttcttatcaatactactccacagtgcaagagacacaagcaaaaaaggatgcagagatgaatatgcaaacaaacaagaaaacaaggccacaagggccaacagtagcagcacaggaagcaacagagatgaatatatttcccctcaaaaaaacagagatgaatatgcacagcgacaattgcaagggccctgttcatgtccaagtggctgcattaacatggacgggctgagagtttatccaagaagaagttggtatttgagacagagtacaggaagtctttggtctgttaactggtggtaatagagttttcagtccatagaaggaatcccatatcgctgtactgtaattcactctttatcaagcaagaaaaatatgtctatctccctaattttctagaatcaatccctcaatctctctgaccacgacccgtatatgttcccctggcttctgaaatctaatctccttcaagttatatcgccaatccttcatctgcaaagggtttatcccattgcgaacaaggtttcacacaaagaaatatgatttgggcactccctgttgaaatgatgaaatattttgagcatagatctttccagaacttcaattcatacatgcacccatatttatcttggtgattgcagcctacccagattgttattcagtgacttggcagaaataattccacaaagatgatataaacacgaataaagtactactgaatgaacagagcagctaatcaaagaattaaggctgctgtgcatccaggtaaggtaatgacatgaaatgatgccaccttaatgcatcatagcacagaaggatgcggtaaagaagcgaaacttgaataatcacaaggccatgatgataggagcaaaggaaacatatgtattacaactcacagcataggcaaaaacacctgattgtgctaattcatttatataatggaagaaagaagactgactcttttgatggtacgagtcatgactttctgagcacaagaaagcctttgagtctcccacatttgcagctatgatttggccatcgactatcaagatcacagccgctgttgaaccaaactcaaaattattccgtaaagcttcctgaacaacaaaaggttcattttcagttataacgaaaacatgtgatgcaattcaatttgtaggtcaaaataacaccttccttggagaatgtcaaatcaacatcatgaactgctctcaataatgattccttcagaacttccatgtggaatgatcgatctagaatagcaggtaaagcccaacatgacctgcattttttcagtacagaacaacttaaattaccctgaaaacaaggtttgcatccttctaaatgccattcaaaaatttagtagtttaagatcaaggaaacaaaaatttcattttttttgttactacaaaatttgctagttgatatatcataataatttaagcctgcctgctccaacatgttaaatgatgtaaaaccttgtcatacaaacggcagaattagacatggaaaatactattgtagcaagtaagcaacatgttactcactttgttccataaaggaaagaatctagggaaacaaacaggaattcaggaccaggatataaaatattggtcgcttaacgctaactgaaatttccttcttaaaccctgattagctagtaagtgaaccaagtgaaaaaggttcacaggtgataaatggattatccaccatcaaaattgtactacggcagatgtcatacttagagcagagtatgttatacagacatcaaaattgcatgtgtggcaatactaggcatgtactagcattactggagatattacataggttaaagatcatgggaaagaaataaaaattttagatgttatgttagagttctaaacatgtacaactgtataggcagtatttggcactgggggtggatgtgctaatattgtgaaagtaaagcacatactgttttacatcaaggactcagaaacaaaagaaataatgttgaagtgcctattcacattaccatgcttgttatccaacataaacaaaacatagatagaagaacaacataccccttgctatgactggactggtcctccttgtacagattaatgacattattaagaatagtaacttctttatatgtcagctttccagtagattttctgaacatgatggagtatataccatcaagaagaaaataaacatggagcaagaaatactccagcaaaagcttagaagccatctcactagcctcagccccattatgaccatcaaatactgcaaccactccgacgtccacctctttaatcctcatatgctctgtgttttttggcaggatagatcagatcaaattgcaaatgaaaagagtgcatcttaaagcattaaacacaaaatagggaacaaacaaagcacttctaaaaagaggtctacatgtaagatatttgatatttcaattgaccgaataatagtagcctgtgatctcctgatctctacacatgatacaaccatcttcagcattgagcaaccatcagcatgtagcctttacggcacgcaaaagacattttccatcgataacctcggttggaccaagcaaattgtatgtatatgatacctttctacaaaacctccaacacattaacaaatcatgatccctctagtgtaagtaaaacccagcttcccacagtcccagttggattttacgacttgttaagaaaccactctcttcagagagatgccattaaacatttcacaggacaaagcgcataccgtagaagacctgattttgcactaggttccctgcataatctcaaagttctgattcaatctcatagaatctctcaaaatcctaagctggttttcgtactcagtttgcccatctcatactcaaccatgacacgaaagtgagaatttggatatcgaagcttgtggtatatacctatgaaggggatgcggatgccgagcgcgcagacggcgcggtcctcctgggaccgccgcctgcctctgtcaaccgccacgtggcaccccctcgggtgcggcggcggcggcggggaggaggaggacgacctccggtccccatccccctctccgccgctgccagcggagggtgcgaggagcgtccagcgcgggcagtgcgcggactggaacaccgcgggcgccccgccctcgcggtacacggcgaggcaggtcgccgactcccccgcgcacctccgcggcggcgcgacgaggacgaggacgacgaggcggaggagcgcggctcggagtaggcggcggcggcggccggagcaacccagccgcatcggggagtcgccgccgctcgccggagttgggggaaatggtaggcgaggctttgcgtgtcccgagctcgtggtgggccccaccctccagcctctatgagacgaagcgtcgttacatttttgggcctgaacggggccgcgacctctccatgcggcccacaaatgttgggccggaacgggattgcggggtacctgcagcccatatacgttgggctggaacgggattccaaggttcgtgcggcccatgtataggttgggctgaaacgggaacgtgcagcccatattaattagtgaaaatccaagaaatgttattattcacgaacgcccaagtccaaaaagttccatcgatgattgcgagtttttgtttcatatcatacaaaggactatatccgtaaatatgatcgccctcattaagtgctatagaacgaacatcatatttaatagggcgggatgagtgaaaccctagcaattatagtaattctagggcaaagtcgtttgtacaatgatatatttcatgaaattcacactcatcaaaaagtatttatattggaattagtggcttgtcaatgaaatatcttggattttctcaattgaagtaagccctgacgggattccggtgtacctgcggcccgtaatgttgggacatgaatgggcttaatgtggccgtacgtaatatagatggaaaaagtacaccgaaggtccctcaacttgtcatcgaattacaaaatcgtcccctaaacacaaaaccagatatataacattccttaacttacaaaacagtttgttttacatccttcggtggtcttgcacccggttttgtcctacgtgacgggtaagtcaacgtgggcctcacatgtcaggacgccatgtcatcagctccgtctttcccctcctctcccttcctctttctctcactcatctccctctgggtagggcggccggcagtggggaggaggtcaccgggacgaggaggtcggacgggcgatcggcgatgcggaggcggcgacacggagagaatgggagggaggcggc

SEQ ID NO: 24476 - DNA, 2963 bp, Oryza sativa
ccctcctcccctccctcccccacctcagcctccgcctccgccgccgccgcctcctccatcctccagtccctccccctccacgtggtaactccccctccccaaccttctcgatccttcctccattttgctgttctaatccgctgtgctggcttggcttggattccatccccagtccttcgaccgcggcttctacctcctcgtcaaggcgatccaggagctgcgtgagcgcaaggacggcctcgtcgtcaccgtcggcatcggcgggccaaccggctccggcaagaccaggtacgggccgctcccctccttcccgccgcgcgctggttgctgttgctgattggtggtggtggtgttgtgcactttgtgccgggcgcagcctggcggagaaggtggcgtcggtgctggggtgcgtcgtgatcgtctccatggaggactaccgcacggtggccggggccgacgacggcagcgacgttgacgccatcgacttcgacgccctcgctcgtaacctccaggtccgtgcccgcacgttccttcgattttggggattttttttggaggggtggggattggatacgtgcagggtgcttgctttaatggcaggtcactaggtcagaatggcgtgacaaatggtgggcttgaatgctctgttccattgtactactaccattgatagggtgggctagtggttgttgttggagaatagagttgatggatggatacaaatgggggaagtagagttattttcagaaagagaaatgtccagcttcttgtctccgtgccactttatgttctagccctctatacagccggataatttgatcgcagtccatttggtccaaaaccaaaacaacagtttcttcttgataactattgtcaattgatatccctctgttaataattattttttaccaagccaactttacatgacatggtcaaattataaaaaaaaaatgttaaaagatgatcaagtctagtggtttgatactatgtagttgcaaggagtcaaatgatacaggaattgggaaagtggggtaaatgggtgttcctaatctaggaggagcattcaatttgtgcttccattgtgccctctacatctggaggttgcagaacagtttacatgcacaccaattgtattggaatatttatttaccttttcttttaccatgttttcaaagggaaagccgaaatggtagcaaaatgctagtatgatgacgatgtgtaggcgtgtagctatgctggtgatgctgttgagtgtaattactgtgtcaaggtctgtgcattccaatggaaagttggaattataaatagcttctggaaaaaatggagcctctactagtgaaatcaactactggtcataatatctggaagacgtgcaattgagttgctagtatgccttattctcgtcttacagccttttcctgtgtttaatgccaaagccattcgagctgcatatgcctgcataactgataattgtaggtccagtgcttttctatgacactttgcagcggtattcatcatgttgcacaattatcgagtatttttgccgaaatgacgaaaaaaatgctgcataaacttgtttggttcatgggcccatgtgcttgtagtattttagtccctagagcctttcttctgctattattgttttgatttattaccctctgatattatttatgtattttcaacaattcttaaactgtgtataaattctatttttaatgaggccttgaaaagttgtctgaatacattagatgtctaaacaattggataggttaatattgtgattgcattggaagagagaaacaacaacaataaagaaaatgttcattgtggaggttactagtgtgttcctctatgtgttcaattggtcattcatgcatacgaccataatgattaatgaagagatcagtagtagtattgtaatacaattcaagtactttctcttttggaaaccaaataatccaaatttgcatgggttctaccctgtttattttgaaatacataatggacctaatttcccacctcgtagatttgctatgaggaaatatgctggtcatgtgtgatctggcatattttctgggcttagaaatgcccaatctctctgctatactgttgctggttttagtgacaatccagccgatcgtttttggtctataagggttgcttgctttactcctttacctgctgcctgctggaatgcacacatttctgctttctccaatgttctaaaagtgtcatgcttgttgtttgtaattgatgcatctatttggatcaatatccagactcctttgagtaatctatttgtacaaaattttcttcatttgtttgccaccttgacaattttctgcttatttaggtgtattacaagtatccttacaatcatgtctgctgagcaggatcttgtaaagggtaaagatacattgatgccattggttgattttcaagagaagaaacgtacaggatggaggcaactgaagatttcgccatctggagtggtgaaatatctcagaaatacatgctatgaacatttggcaaccttagaatcagatatctttgctagtttgatacaacatatccttgtaggtgattgttgatggtgcttatgctcttcattcaacactgaggtcactgcttgatattcgtgttgctgtggtaaaaattataattgccctaaatatttttcattatagaacagttattttatctcaataatttcacccatgaacttcaggttggtggtgttcattttagccttctgtctaaagtccagcatgatattggagattcttgctcgttggactatctgattgatagcatatttcccttgtttagaaagcatattgagccagacttgcatcatgctcaagtatacatcttgtaccttttttgcctttttatagtctgtaggtaccatttgattcttttttatttgagttgctacttgctagtgcagattagaatcgaca

SEQ ID NO: 24477 - DNA, 511 bp, Oryza sativa
acactcaattgaacttgagtacggcttatcatcctcaaacagatggacaaaccgaacgtgttaatcagtgtctagagatgtatctcaggtgtatgactcaagctacacccactaaatggaatagttggttgcaccttgcagagtattggtataacacatcctttcattctaccttgggctccttgtaaagccttgtttggagtagagtctcatgtcagccaagtgccagttttgttatcttcagttcatcagtcagtggctgatttggtgtctgagcatgaccagttatctgcattctttcagcagcaactccagtgagcacagctgcgtatgaagaacaaagctgaccgaggtggttctgagcgctcctttgaggtaggcataatggttttcctgaaactccaaccatatgcagagtcctcagtgataaatcgtccatatcctaaactggcattcaatttttttggtcccttccgagttgtggagaaggttggctctacagcttatcgct

SEQ ID NO: 24478 - DNA, 1722 bp, Oryza sativa
tatccctttgcacgtctgcatcgttggtgtggcttgctgagtacggtggttgtactcagtcttgctattatgccccccccccttttttcagaagtgtagtgcttctgagctgaagatggagttagaggaccaaggctcagaccccagttgagttttgactgtggagtggagctgaaaccccgctaggatcgcctttttccgctgctgtcgttctgtttcggtgtgaggactaagtgcctcttccgtaagtattttacgctttatttacgtttggaactgtatattacttgtcgttttctgtaccctggctggtcctggacagagatttaatacgcaaaatagtctagaaatttgggttaaatttctgggcgtgacaaagtggtatcagagccaacttgactgtaggttgagccaaatggtcaaaccctaaggacaagttttctgaaaaaccctatttgcaaattgtctcctctcgcccttcgacatttctttatgaaacggtttttcaaaattctcctcccagtccctccaatcctcatagttgttaaacctggaggacaaaccgtcagcttcacgcctattcggaagtcaagtcaagcttcgtgcaaagagtgagaagatcagcccagagtcaagtgaagttttcccggagttttcctaaacccaatctttccctgaagagtagtatcgttagctgctagatcgtgtgttgtttgcttgtgtgtaggggtatggtttgcatcattggtggggatgcgaccatactaggttgtttgcttaagcaacttgaatcataaaatccattcacaacagatcaataggcaagtggtttagtacctcctctctagtaacccctcctatttccccatctctctattgcctgcagcagatggtccgcatgagggacaatttcatcggatcaagaccccgtcagtttcatggggcaactcagtgcaattctaatagtattccacgtcagcctcttgaaggtcagcctcaaccccaagtcatggctaatcaaactcagacagtggaagagttgttacaacagatgcgacgtcggtaccaaatatactagatgcaacagatgcaacgacaatgtcaggagtcacgtcaatgtcacccaccgcaggtgcgagatcagatgccagcccggaacccgaatcagagtcagagtcaggagttcccaatatcggcaccgaagacccctgtcaaaatgctgtccagattcccgaagataacgacagccaagtcaacgtcagaccaaaggaaagtaagtgctacctgttatgactgtggtgagcaaggtcattatgtaaggaactgtccatggaaggtgttcgccaggtcacctgaaaaagacgagaagcagtgcccagggagtaaccaagctccaagtcagtctaccgacaagaaggatggtactttgcagcccaactctggagcgaacaggacagtgatatggaagatggataatggcaggaccatgatcatcaccggttcagaatttactcctgaagacgcagcaaggatacccaagcgtcagagaggaagaaataccttccgaggagcgcgtcagctaacccgtcatctcataaagtacggtccgcccagacccgaagatgatgaatcaggagaacggttttctgctgatgacgatgacgacaacgatgatgataatgatgagaatgatgatgcgacccttgacagtttcagggaaag

SEQ ID NO: 24479 - DNA, 9816 bp, Oryza sativa
actgtcctgggaggcttacgcccgaacttgccgaccaattcttcgtggcgaatccctttggtgaatgcggcgatgataacgtcgtcggtgatgtcggagatcttgttacgttgttcggaaaatcgtcggatgtaatctcgaagggattctccggacttctgaataacgttgtagaggtcgtattgtgtgccgggacgctcgaaggtgccttggaagttggcgatgaagtggtcgcgtaattcagcccaagatccaattgtaccacggggcaatccatggagccaagatcgggcggaatccgctaaagccactggtaaatagttcgccatggccttgctgtctcctcctgctgcgcggattgcgagaccgtagacggtaagccacgattctgggttagtggtaccgtcgtacttctctattccagtcggcttgaagccggctggccaatccactcgacgcaggtcgtcggtgaaggctgctactccgtcaaggtcgtcgtcgtggcggtccggcgaatgatgatggcctcgagctgctcggcgctgtatgattgtgtcgcgaagatcgacggggcggcgacgaggtggtgagcgaggccgttccactcggcgctccctatgatggtcgggaggtgagtgaacggaccgctcgtcgtgacccctgctcctgcgattggatcctgcgccggtgatgctgaggcttggatgacggtagtcatgagatcggaagtgggggactcggctgccggtcggcgtatggacgctttcggagttaactgggaccgaagccgcaatcatggtcttcgtctggttcaagatgttgacgacgtgatcagattgattgagctcgttttccttgagaagggtgtcgaggagggtgatcgcggcaaccgcattctgttgaggggtgcggaaaaccggtgtcccttcaacatcttgttggccgatgagatcacgcgctcggcgccctgcttccaaagctcgctgccgtcgatcctcagcctccttcgcggtccgctcacgctcctgctgctcacgccgtagccgttcttgttcttgtgcttgatgctcctcctccagtcggcgacgctcagtctcgcgacgtgcttcggtctcccgggcttggcgttgctcctccgtctcgtcatcggccatgaagacgccgaagtagagaggggtgtagttgtcatctaggcttccgtcgaagtcgtcgagatccgggtcgttgtagcgagagctaaactcgtcgtactccacgatgtcggtggggcgcgagtcgacggtgggagagctgtagtagccatccagctgatccgtcgaaaccgtgccgagtggttggaggatgacgccgacttccctgaagctaggcgaaatcggtgttgaagccgacttccgcctaggcctacgggatggagacgctgtcgtgatggagacggccgccaaatcgtcggggagcttcatcaggatcggtgggtaagccccatcatcttgatctggtgacgttggagaagatgcgatctcacccaagtggtttgaagccaactcgattgagatggtcttgaagtaactttcagccgcgtttgggagtccaaacgggactgaaatccggttctctcccgactggtctgacaccgagtcaaggagagagatcttgccgaagttgttggtgacgaagtcgaggctgccgaaccgaaacgtctgcccaggtgggaagacgaggtcgtcgatgccggagacggaacccattgcactgatcggcgaaaagcttgacgcaacccctacctggcgcgccaactgtcgaaactagatttcggcaataataaaagggggtggctatcaagctggagaagtgtatgggtttggagacaaaagatttatacaggttcaggccttcttattcaagaagtaataccctactcctgtccggggatgaatccgccgagtgtcttattgattgtataatttggagaaaatcaacctctgcccctagaggcacccggaccccccttatatatgggagggagtccgtgttacaaaagataatctatatccctaacggaatatgcagatacagataaaatacagtcgtaaccgactaagtctcaaggtatttccttgatgtacaagttgagaaacaaacccgagatacaaataagatattctatctatattcggtatcctatattcagcccaaatatcatcgccgtgtagatatgggatatccataatctccacaatcacattagtcccggtttcaacaaactgggactaattcatctttagtcctggttcaaaagtccatctttagtctagtttcgttaccaaccgggacaaaaaaaattatatctttaatcccggttggtaaccgggattagatatctctctcccacgtcattggcatctctcactctctctccccctctctctctcttccttatctcggcatcggcaacaacgccttatcccctcctcctcctcctcctcccctcttcacgccttcttctcctcctcctccactcctcctccccctcccctctcgtctgatcccctcctccccttcccctctccctctcccatctccacggcgacaccctcccttgcgtcggatcgggcgggagaggagccggcgggagaggcgggcaacggcgcacgaggcggcggcctcccctctgccagatccggcgggaggggaggcgataggatgggagggtggccgggtggcagcccggtggaggaggcggcggcggcggccgggcggggccctcctcctcctcacccccgtctgctggctatgactgatttgtttttagattttattatagatttttttagatttgggaagattttgtggatgggccagtgatttgtggatgattttatagatgggcctataaattgtggatgatttgtggggatttggggtgacggcgtcggtgatttcggctcaaaatcaatagatgcaagcagcaaagaacaatagaaaaagaaagaaaaagaactttagtcccggttggtaacaccaatctggactaaagttggtagcaccaccaactgtgactaaagatgaatctttagtcccagttatttcaaccggtacttaaaaaatgctcatcggagtctcggtttgtaacctaggactaaaggcgttgtaaactagatctgaagatcacttctccagcggtggaagaacaaagaagagagaaaggtagagatcatcaaaatgaatactccactacttttagatcatcaactgttttatttccaaagattacccaaatataaacctttcatgatatataagaaagtacccaagatttttggcgtctgcgccaactaggaaagctgacatgattatccatgaactggagaaccgttagttcttcggcctaatttcgatcccctctacaataatttggcattggtgcgatccggttaagcccctaaactcaatagaaatgtctccattctcttcattgttctgttttaccactgatatctctgtactaatttcctgctccatccatccatcacttcttacacaaatgcctacatatttcagttctttcttctggttattgttggtttttacaaatgatgatccatcataatccatgttgaacaacagtgagcgcagatgtttctgcggcataagatggttgcattcatgactgcaaatgctggaggtggatgatgacccagatgctgttgcatcttgttctttgtagcctccattttgatcttctgtgtgcaagaattggacattgtacacaagataagctccgtaggatgtaccgtttgagagatgctttgtgttgaagataccatagatgtccaaccaacacaagtgggagaggatggccacctcagaaaacctagaaataaagaagggaaaataatggacatataatcgtcagaagggttgtctgctatttatgggagagaaaaatcaacaaggagtacatcccatgacaaaaaaaaagacatgtttacaatgttctgtggtagtagaaccaatctagattttctaatcaatatggaccatatctactgatagcagaattcataaatcaacacttaagatcatttctacggatgataatactcttagtattcaagaaggaaatgcatgatattttgtactccctccgtcccaaatataagcatttttagctattaatctggatgaccgtgcgtccagattcatagccaaaggtgttacattttgggacggagatagtagtaaatgatatttacataaagccagaattaaatttgaaaacatactgttgatttgtttttttcttataaatattcggaatgtaaatgttttggcggaaatataccgtcgacctcgcataaccgttgcgtaaaaatgatgtaggcgtaacgacacgggcgatctcgcacggcaaagatgcgagaccgcacggtcttgtgcgaggaaacagctgagaccgaacggtctcgcataaggaaccaacgagaccgaacttcttgtccaacggtgccgtctaattagtgattaattacctgatttatgatgataattaatcactaattaattaaccatatgaattggcatggcagtccgggatcgccgactggttcagcggggtctcgcggtatggctgcgcaagaccgctcggtctcgcgccgccacgtactgtccacgtcctcgttttcgcgaagcgatattgataatatatttctcccaaaataattacaccccgaacaatttaaataaaaaataggtaaacaatatatttctaaatttaattccgtaaagccttgcaaaaataacacatataatgtgggatttcttcattggttttgtgcaccaaccacaaacctggaatccggatggttttgtatccagacgagacctccgtagggatagccgctccatccaaaaccgagagctcttgctcgcatcatgtatttcttggcaccactacgcttctccaacgaaaagctctggtgcaatgagagcagggatatcagtgaactgaatgcccagtactgttagtgtgaaggcaaaactggtatgaactagtctattactcccttcattttatattataggtcatttgactttttttagtttaatcaaatttatagaaaatatatagtagtatttctaaaacaaagcaaacatattatcaaaatatattcaattctagatttaataaaattaatttaatattttagatgttgctaatttttttataaacttgatcaaatttaataaagtttgacttagaaacaaaagacaaacgacttataatatgaaatgtaggaagtatctatctatttatgtatttagttgtgctattcttcttatctatctatctatctatctatctatctatctatctatctatctatgtgctatcagtcagtgaaatgaattacgaaggtctagattaaaagaacagatcatatcaagaaaagtttccaaattccgtaattgtgttttatcaatagaaaacatatattaaggttcacaaaattaatctagaaaaaataattgtccacaagtatgtgttgaaaataaaaatattcaataattttttacgtacaattttgaatacagttttaaataaataacagttattaaataatagccttgacaaacttacccataactactatatgctatgaaaattttccttttaatcattacaatttacatagaatttcaataaaatccaaatggataaaaatagttttgtaatatattgtatccacctattaatatattttgacaaacctattaattccatatttacctgtcaacccctttatttttacttataattggtcagttaagatttggagcttcagagtttaaacatttcatagaacgagattaaggcactgtttagttcctctaaaatggcataagttttgctgtttttgagtactttttgtcaaaatggatctaaacactaatatcaaaagttagcaatttagcatttatcatttggaagtctagagtagcaaattttaccaaaaaatacgttgggagcattgctctatctgtctttactagtaaaatggtaaaactttaccatgcatctaagtcatctagacaccaactaacaaacttcaatgccaaatcttttgccaccaaaacttttaccaaaaaaatttaccacagcaaattgatcttaacaggccctacaaaagaggcaatagtagtacatagtacttcctccctctagttttggttccataaggctattcccaacccaagacactagatatagtttccataaacttcacataattaagaaactaatactagacactactcttccaaacatcactattccatacttaagtttaatgctacttatctcacatgatgtcttggatgttgtgtagaaactatgtcccatgcaagacgtggtttccttctctttcctcatttattcacttgtcacctcattttttatcctaggtggcagtttatttaatgctatgacaccattctagtcattggattggaaatggcctaatgttttgaacaatgacatagtttctaaaatatatatttaactatgtttttctattatattatatagaataaataaatacatttttatttttatatagtactactatatatattgctcaagtgcctttataaactaaatatttataaaattattgatagtcaaaattataaatgtttgaccaaaccgtgttcaaaacttcaataattatggaaccaaaggtaaaaaaaaagaattaacaaacaacgcagataaggaattaaatggcttttgattaccagcttgccgccgtcgagaaggacaggcaagtcgcagaggcggaggaacatctccttcttgctctccccctcgcggccccccggcttaccgtccagggcgtcgccgtcgccggcccactccggcgggaggaagctcccccacacgtcatccgagtcggccaccggccggagcgccgcggccgccgccgccagccggcacgcgtcgccgggcgacgtcagcgaggcaatgcacgcgatgcagtccatcggcaggtcgcacatgccgctgccgccgccgccgccgccgctcgacttcctctgcatgttggatatatgtatatatcgttctcacgtctgcccttctgctgttgttgaagctgcttggcggcgagaggtggaggatgaatggcaaaatgcgggcatatatatgcatataaatgcttgttctgtggtaatgaaaataacatggtgtcgcgaccatggcgacacgcagagctagtcacctgcgtcctgtagtttctgttttcattgtaggcgagggacgaacaagcgttcttgtgttaatcacataatgacgacatcgtgtataagagcgtacatagaaaggttgacccaaccggtcggtcggtgaagagaacaaatgatgactagctaatactccctccgtttcacaatgtaagtcattctagcatttcccacattcatgctaatgttaataaatttagacatatatatctatctagattcattaacatcaatacgaatgtaggaaatgctaaaataacttacattgtgaaacggagaaagtaactctatgttaggttatatacttatggtgtactcctttttatccgtgtcactgtgttttgcaacaaaattttatgtaaaagagaagtaatgttagtatgttgttgccattattttctttttatatatatttattactgacatgtcgattctttggtcccatgactttttttttctttagacatcctcaatgtttattgtaaactaggtagtaaggtagactcgtgccatgtggtaatagtaggatgaagaggcaccacaatatatatatgtgtaaagtagataataaggtgggacccatctgaaaaattcttcaaacatgagtcatgctacaattaaaaaatagatgggaccagacataaagtgctaatacatggtagtaagtttatatttgctagttgttaaccatctccacgatgtgatgcattctgtttattacccacaatttcaccacatgtaagctctctaaccccgtatgttactagctgatttgctcgtgcgttactactgaatttttagaaaataaacttttgcattcatttttaaatcctaaaactatctacctatcaagctatacttcaccatgagtttttgatgcttactgaattagctagagtagaggcatagagctatttctgtttgattaatcataggagaagcaaaaaagtttcaccaacattatagggtccatacaaaggtgaaacacgtgatggtgatagattcagtgtcaccactattaccaacatttaaaaatagtatagcaaatagtaggcagttggtgaggttgggggtggcgaaaccaccaccactcctctgtttcaaagaagtataaataataccccttatttaaatatatatatatagtgaattatggtttggatcaacttttgttactaaaatttcagcttcgaccattttttatccaactaggaaggtagcccgcgcagttgcgcgggcatcttatttaaactatcataatttttgttattaggattttgaatatcatgacttttgtctctcggtgaaagaatttgaaggttctttccaacacatgattgaaaaaaatatataagtcagaaacatgttagaaatgcatgtgtgaaacaacgaataaatgaattttggacagtaaacgaattttttacagagtacagcaataatatgaatgttaaaatttgttaacccacatagatgaaatcatcatctttcattgcataaataaactgcagttaaccaaacaacctttgcatcagcagcttgattttctcgatcccatgcgaaggaaaaaaacatgcgcatgcatcttatttctattttattaattttattgccattgagatataccgcaactttttggatatcagctaatcgttaggtgcaccgtgcatggatacctcgtaagcaatatgatttggggattagcagatagtggtagtgtggatatacctcataagttataattgatagtatacatattaagcgtttaagcgttttagtagctttctaaatagcttatcggattggctactcccttgtccaatatatctgtaaagttcatcccactaagtgcagctaatgctaattctctcttctctcatgaagccacatcatcttaattgtttttagcccttggatgattcatcaagggtgcaaattgcatttcttctccccaaaagccacaccatacaactcaaccatttataacttttcaataattgatcaaagtacaaaatatacaagcacatgaaagaaaatcatatagtaaataagatttttttttctacagctcatatctactattttatcacacaaatctcccgcagcaatgtgcggggtacccatctagtttatagtgagaacgtttcccggactactaaacatgtaatattttatctttttctcataatttctatgattttatctaatttattatagtatcatgtatgaatttaagagtgttcataagatgtttaatggactttaacttttctatgtttatttttgcatggtatcgataggatttgaatttttcatcagacttactataatgtattcgtgcaaatcaaaagatgcaatcaataggaatcccaatcgcatactttttttcctataatctaaaggagctttgaattttaattttaaatcccaactatacttttgagctgagtacaaactttttaacggtgtattgccttttggatttcacaaaaaaaaatgaaagagaggaacatcgga

SEQ ID NO: 24480 - DNA, 4422 bp, Oryza sativa
tgacttttggtggaccccattaaatgatctcaaagctaaatggatgtttccaagtagcccaaaaactccatcacaaaattctgctttcgcacaccttgattgtgtacattctcatggagtcatggtgatccctagtgaggtcaaaagtgattgaggaaggctgatagagtattaggacaccataagaggagaggtatggtttcaatagacagtgaaggagatgatgagttgggaggagaaaggggacagaaaaatggacagtccaagtaacatagtatgtattacatcatgtgggattacagcttcttaagcaacaacgaatattgtagtataaaaataccccccctccatatgtgacatggtagttaccaaaccaagaatattacccagaaatgaaaaatactgggtcccttctgaaccataacaaaatgtatgtcaatgaaaatatgaaagagaaagatggttatgtattttaccactccacattcctcagagacttgaagctcctcgaatttctttcttttgcacttctcaaagtcaaagcaaggaacttctgctttgtgattctttctgatctccataatgttctgcggggcgataagagaatcgtcatttaacaggcactatagaacccaaccatatgattccagaaaagaaaaggcagcatgcaaaatgctgtggagtaagaataattttatcaccactattgaatgcttaatataaccaatacatatttctggcaaattaatgtcacataataattttctgtctctgttgaattaaaatcagttttgtaaatacaagaattatctggtaatgtggttgttcaccaccagattttgaaccctaaattcaagtgatctcgtatagatagaaacatggttcaagaaggcgctaggtgctagagggtcagcagagctggtgcctagtgcctagcgggcacctaggacataccaatcatagaatccaagaaattatcaagcatattacatagagaaaaatagcaacacaatagcgcccaaagtaggttagcctcctaatgcactatctaatgcctaatcgtggcagctaccaagtgcctaggcggcgccttgcatcgacttttagaacaagatagaaatttggaagcatgcttgaaatatttaagattctagtagttatgcacaggaatttgtaattcacatgataatacagaaaaggaatcaatataaaaaggaatcaccttagtaagcaaacctatatccaatgagctatactcatcatatttataatccctaacttgttcaggcttataataactctccaagcttataacttcacaaccaattatattggccatcttctgagctaaacttgtcttgcctgatccactagggccacctacaaataaacagtgtatcaacttaaacagcgacagcatagtcagtaaatgtaatttgctgggtgtgtgggtcatatcatttttgcacaagtttaacagaattattattacagaatcaatctattccatacaatataaaattcttagaagaattcttgtattcacatacatggactagtaaaaaaacagatggggcgcaaataatcgctcagtaatctgccagaaggcccatttatgtttattgtctgctttagcacacattttcacaatagatggttgttcgccataaataagggacaattgcttatatttagaagccgaactaccaaattgaccctactttttcaggtttgctcatttgaccctgtttttcaaaagcgaagccaccatctgaccctgtttttactagtccgttagggtttcagttagaaaaagaaaaaaaaataattttactcgcatgaactgaccaaaatacccctcatcccaacctttatcccacattggcgtggctggccggcgcgtggagggaccaggagcaggtgagcagcggtgctggcaagcaaagagagggacggcagtgggcgccagcgtatggaggagcagcggcggcggcttctgccgcacagagagaggaagggaggggcagcgccggcgcgcggacaggcggcggcgcctgttcgcggaggagcagcgcgccggcttttgccgcgctgagggagggacggctccagcacgtggcaggaggagcagcggagctggcgccggctgttgccgcgtggagggaggagggatgggcggcgacggctgctgccgtgtggagggaggaagggagggagggccagctccggcgcgcggaaggaggagcggcgacgccggcgcacagagggaagaggagcagcggcgcgggcgcgtgtagaggcggtggtggcgatgcgtggataagcagcggatggtgcggcgctgatggggaaacgcgcgggccggcgcttgctgtgtggatggagtgcgtggccgtgtggacggaagcgtgcaacgcttgcctggctcagccggaggcacaggtcctgcgtgaggcgctcatgtggcccacatccttgctcgctcttgctctacccacacctcctctctataccttgttctactagatctggaagttgctttgctcttgttttgctgatctgattgaataatctctcttgttttacatgtattaatttcacacttttttttttttttgctttggggtcgacacaaatttgagcttcgtgatttgcttggggcaattgttggatgtgaaatagcatatatgcttttctttcttcagcgtgcaattggatggataatatatttccaaagttttattaaaattcagtcatctttgcttaagttatcaaatctaactcaaattcacacacaatttgtcaattccaagtcaaatttattaaaactttcatcacatacaccgagtacacaaaactaagccaaataaataaaaactcagagagtatactcaaaatgagcaggggtataaacggcatttggcccctaagttaacaccgttaggttggcctgatagaatagggtcatagctaatgttcatttttgaaaagcggggtcaaataagcaaagttgagaaaatagtcaaactggtagttagctttcaaaacagcgtcaaacgtgcaattgccccataacttaaatatattacaaaaaaggcatgacatgtagccccagcaactggtacaacaaacccacagagaattgtaatacaagttaatcctaaaataacaggtgtataggaatagattaggcacaacctatcaggcactcttttttgcacagcaagcataccattatagcacattaaaaactggatcatgtgaaatttggagatatagatgctctgatatcactttaatgaaactggtagtcattgcaagtgagacttgtcacaagggatatctggtgcagatgtctgactaaatgattttaagttgccccagcaaagtagagtgagttgttttagttatttatcattcacagcaagcagatgcttggtcttagtaaacacaaaactactgctactttattaacggtaaagatgttattaccaatcccaacaatgacaggaaatcctttgttctccaacaatgcctgaaagacaacaattaatggaatatgttacagatcagtaatgcgtaactgtgatgaaaaaaatagaatgtggtttcatttacctgaattgcttgaactgataggagaagacccctatctaagtcataggagtctggcagtggagctaactggatgttacttcctgaagaagaatctgcaaaagtgtaagaatatattcaatggattttctacagaaaaaataataaataaatatggtttccaatgtactccgtaataggcatggttgggattagggcacttgcgcctatttctagttgtgtatccctggacccaagtggcagcggtgccattgaggcagccacgccacaagggcaggagagaaggggaagactaaatactcttgtttattacttgcttgatgagtaaaatacaaaccccgtcatatagatgtgttagcttgaccattaagaaacctatccctagtattaagaaaataactaacttataagtctaaccttatctctaataagaccacctgacatgaactatccacgcacgaaaattaaccaagtaggtactattaatgcacagtaccaccagccctagagaggcagaccactctatgggccctaatgggctgcacatgatatccaatgacaagagaaaatgccctttgttttagcattaaagaacagaatatgcaaggcaaaaatcataaatgaaagcacaagtttaaaaccttgattgaaatgccattttcccataacaggctcctggtcaaactttttgggtggagacctcgtccatggttgtgcaaagtcatcaaaatttgcaacattttcggtcgaaacacgaattggctttggtgcaacaatttttttttcttgactttcagtcagtaattt

SEQ ID NO: 24481 - DNA, 5527 bp, Oryza sativa
ggcctatcagtcgatcggctatcggttgactaattgtagcacgagttccaatatagtatgtaagagagatgggtggattagatattaatgatgcagtatatatctataactaactattgtataagtggctattagattggctatatatgatatttcaattttgggagctagtagatggctatattattaaacttgctctaatctcacctcttcgtctgtctagatttttaccccagctagtgaaatgcctctaatttgttgtggaattaagaaaaaaatgggaaaaagtgttccatatcatcacaagtttccagttttagtttgatagcactgaaatttcgtgttgcactttaataccgttagagtttccaccgttactcttcctactactaccattaaaaaagcatcgtgaactttcgatggtataaaattaaacttgaaaactttcaatggtatggaacaaatttctaaaaaaatatatttatatgaaacatcagcatgttacaacgaataaatgtattttgaattttaaattttagaattaggtagaggtttttttatcttcttatatcttagtcataaaaaaactagagtaaattgcacccacggtacaacaacttggcaggtgggtgcgattcagtgcaagaacttgagaattaaacgtccgagtgtaacaacttgacaagtgggtgcggtttagtacaagaacttgacaatttagtattttggtgaatcaatttagctaagcatatgctaggtgaggtttttcacgatgtcaatatgccaatacacattaatcctatggatattaccttataatattgaatttaatctttaagaattatattgcacatacaatttacattcagttacctttaagaattttttgttttcttcaccttctcaaatatcaaccgaaatataataatttctacatccagtttaattgactttcagttattagctattagagttattagttattaggataaaaatataaatatgtttatacaaatccacgctagtatattgtcaagtacttaaaattttgaatttatataaaaaatgctccaaataattaagttgtcacaacttcttaatttattgtatcaaaatcgtacctaccttacaagttattgtatttatacgatcacttataaagttcttatactaaattgcaccttcttgccaagtggttgcactagaacgctcattttttaaattattataccaaattacacccacctaccaagttgttgcactgtgagtgcaatttactcaaaaaactataatagactcagttgaaactcgtctttgccggattgccaagccacagggctaggatatcaaattaatccataccttagcaaaataaaagatgacacggtgtcttttgttttattttaacttcattagaatatgttttatattcagtaacgccggctatttctaattcaggatacatactctatgtcccattttggttctgattaaggtgcagattcttgaggccataatagtataaccagcgatggattagaactgaacttgaaaaagttaaggtttagcccgtcaaggatattatatgggatgctcaagctatagaacaatacaggtaaaggttttcatatatcttatatgtagtgtcgtgtgtatgaaaagcgaaatcaaatttggattggagtcaaatttccatatggcacactctaaattattttgtttatatattttcatgcgacgtcgccaactctcttggtgggcgtccacccgtgcgacatcgccgtggctgaaccagaaggccaccaggcaatcggcatcagacccggtgatgatgtctgctcgacaaccttagccgcgtgtaagttttttaaggctatatgtttgtagtgactatctatatatatttgttgacaaacaaatttgtcagatgtaaatatgatataatattagcgtaattacatgtaattataatttgtgaaattgtatataactttccaaatttctgtgataacatgttatttccgcgaagcggttgtcgtggaaccgaatcccctcacccataagtgtgcaatgatttttttcccttctcaaaattttgaaacaaatccgatttaaaattatatgaaagttatattatagttacaatataattacagaattatgttgtatttacatttgacaacgacaaatgtgcaaaatcgcttttgtattttttttccgctatatccacacaaacttcacaccgtttctgcaatgctgatatactaaagttctctgcatattggccgtttctgcagagcaggcggtagattatattgcgctggatgaatggatccaacgctggtatactgcatagtgcatacatattcttctctaacattactatggcaacttgtactgatgtgctttgacctaacattacatttgacaacgataaatgtatagcaaaatcgcttttgtatttttttccgctatatccacacaaacttctctgcatattggccctttctgcagagcaggcggcagattatatttgcactgaatccaacgctgatatactgcatacatattcttctctaacattgctacggcaacttgtactgatgtgctttgaggtaacattattttccgacattttcattgcgggatataatgaacgaacaacatgcatattaagaagctaacaattatcagttataataacaatatgtaatcaaactgtttcacgatccagattaataagcattgatattcaaattaagcgtggtcttcctctataggatcgatcttgcaaattactgcgattttacctttcttttgtttcttgaatagagagactcgaagccaattttctttcatctctggttgtttccattctctaggtaggatattgcactgcacccttctcagagtataagtccaaagccctggatgcaataggagagacagtccacgatcgtacacggctcaaaacggtccaaccgtgtacgttcgatgcttccatctgcaaggctataccgttctaagtttccacagtatccgaagtagatggtatcagcagcgacaaatggtaaggtctccgccgacacggagatcgcgcgggacatgctgatgaacagggcgcgccagttgaaaccctttaccgggacgaggatcccggcatcgaaatccaccctccacgcctcgtacttcctgctgcgctttgttctgtagctaccatcgtcatgagcataatggtctggccaaagcatccgctgcaccagaatcagctccccgccattgtcgaccaagtgaagggtgctctgcagcgctcggctggaatggatcaatgaactctcaatcgccatccgcatctgcggcggcggtttccggcgatcatccgaagcgatatcgagctccattattcccctgtcggtggcgcggtagaagcgactgacgaatggcagagccgcgggggaggtgttgtacgtgctgttgttgttgtcgtctattaagttgcatgcaccagccagttgcacctagaagcctaagctgatagggaaaggcggacaattcactttatacactccaacactccccctcacgcgagaccccctcaagtctcaagcgtggaatattggagtgtgctgcaattattttatttaattgcgcgccagccaggatttgaactcgagacctctggctctgataccataaaagtgtgataggctcaacacgatagattggattatcacatatggtagagtacatataggcacatgccttccatatctagcaaccgatttatagaaacaatatcggagaagattaaggaaggatggcaagggataaacacaatctaacacccccgcagtcggaacgtcgtgggaacggacattcagactggaccgaaactccaagaagatggcactgggcaaccctttggtgaagatgtcggcaaactgtgacgtagtaggtacatgtagcactcgaacagatccggcagcgacgcgatcgcgaacgaaatgtagatcgatctccacatgcttagtacgctgatgttgcaccgggttagaagagagatagacagcactaacattgtcacagtaaaccaatgtggatcggctcggaggggtatggagctcatgaagaagctgtcgaagccaccaccgcgttggccacgacacgatattctgcctcggcactggagcgcgatacaataagctgacgtttggaggaccaggagaccaagttgtcgccaaggaacacagcataacccgaggtggatttcctggtgtccggacaacctgcccaatcagcatcagagtatgcactcaagtcaacagtggaggagcggcggatgtgaagaccataatcaaccgtgccatggacataacgcaagatgcgtttgagagcagcaagatgaggctcccgtggatcgtgcatgtgaagacagacctgctggacagcataagagatatctggcctggtgaaaatcaggtactggagggcgccagcaagactccgatagttcgtgggatcatgaactggggcaccatcagcggcagagagcttggcgttggtgtcaacaggggtagcacatggcttgcaatctgtcatgccagcacgctccagaaccttgaggcagtactggcgttgactgagatgaaggccagaggactgccgagaaacagagatgcccaagaaatgatgcaagctgccaagatccttcatcgagaactccgactggagagcacggatggtccatcgaagaagtgcatcagaggaggctgtcagaacaatgtcatcaacatagaggagcaaataaaccgtgtctgatcctcgatggtagatgaacaaagatgtatctgattttgcctcaacaaagctgagtgtaaggagaaagctggcaaaccggctggaccatgcccgtggggcctgcttgagaccatagagccgcataggccggcgggaggaaggcttgctgctgggccggcgcgggcgtggtggtgaaggctgtcccgacgaagttgggccgcacgccaaggaggcctagaccggcctggcccggccacatgtggattctccctgtccatgggttgtaggccgtgggccaggcctggttggcccgtggtgcagtctatgcgccagggctgccctgtgcgacgccgctgtgtgcttgtccgccgccgccacttgcgccgccgctgccattgctcccgccgccaccaccaccggagccatgaccacggcgtcggttgttgttgcgggagttgttgttggaggtgttggtggaggtcgccgagcgagcggtggtcgaggaagcagcgaggaaggccgtggcagtaacgggcggccggtggcctttcgtcagctcatcgaggagaagctgtgcgcgagccttggcgaacgtcgggaacaggacttgcagaggcaagagggacttgaggttgtcgaatttgtcgttgaggccgccgatgagggtgaggatgagagaccgatccttgacaggttcaccgacgtcggcgaggttgtcggcgaggacctt

SEQ ID NO: 24482 - DNA, 32481 bp, Oryza sativa
tccatctgtgtccagtcggcgtgatcgggccgaggtacgtcgaagaagacatgatcggtgagggcgtattttccaagcgcgatgaggaaaaggcctcgccagcgggagtagtttttggcgtcgaggtcgagggtgacggggacgagcgccttcacgttgaggacggcgacggctttgctgtggaggttggcaacggcttcggcgtcaagcgccgccggtggcgcggcggcgtcctgcgtgggggcggccggcgtcgtggtgatgccgagacgggcgagaagcgccaggatctcggggggaagttgcgccgcgggagccggagtggaagccggtggcggcgggatggcggtcgtcgaaggcgcggtcgtcggaggaaccggtggaggcaccgtggaggagtcgtcggaaggagaccgaggataacaggggcgagggccgcccgggccacggtcgcggcacgatcggtggcgtcgccagcgacggcggtggtcagggtgtcgtcgtcctgaccagagggagccttgaaggaggagcggacggcatcggcgatgattttgatggtgtcatcaaggacggcgtcggcagtgagggaggagggaggagaagccatggcggcggcagggtgcgccggccggcggctggggtggagaggaggcggaagcgagaaggaacctaatctgaggacgcccccgtcgatcaaccccaggccaggaacgtcccctcttggccacgtccgtgtgtccagtgccagcgcatgtgccatgctgtatgaccactcccggtccacaccaaccatactcccgtgaaaccgcgagagtcagctctgataccattttgtaacgacccgcctttcccaggctaggcccacttacatctggtagctttcataggtcataagactgtcctcacagaccaacacaagtcttttctacgcactttgtcctcactcatgcgcactcgggaagaattttctggtcggtcacccatccttaaattgctccagaccaagcacgcttaacctcagagttctttagagatcggcttccgaaaaagaagttgcaatttgttgatatgagtattctagtaatcctattaagccctagaccgggatgttacaccctcaccccttacaaagaatctcgtcccgagattcggaacggctagaaagaaaagggcattggtcaactgcagtctatcttattccataactatgataattattctaaggctttaaagaaaactactgctgctttgagactggtggctgagctgtaacacttgaagatgcaactggcactacattggctcctgtgacgacaaagatgtcgatggggtctacttatggaggccaagtcaagtggatcgagggacatgaagatgatggtcgaactaaagtgtccagctgtcaagatggaatgaagtttggatcctagcttagaacctaaaccaccaaattgactttgaagaatagttagtagggtagaacgtttgttgcttgcttgtgtgtaggtaaggttgcattcccatcattggtgtagttcaatgatgagcgtgtaactatattaggttgcttgcttaatcaacttaaacaatataatggtttacacacactagatcaatgttaacatggttaaggtcttgtctttagtgtcacccctctccttctatcttctccaaacctatagcagatggtgaacacttgcgctagtggaagtggaaacaataacaatgatgagaacccaactcttgctcaagttctagctcaacagactcagttaatgaacataatgatgcagcagatgcagaaccagctcaaccaagggaacgacaatcctccaacgccacagaacaagttagctgacttttcttcgtgtgaggccgcctaccttttctagcaccaccaacccagtggaagtaggtgattggctatacactattgagaagaggttggaattgctccagtgcacagatcaggagaaagttgttttcgcttcacatcagttgcatagacctgcttcagaatggtgggatcacttccggatgaacagagcagaaggacaaccaatcacttgggaagagtttactgaaggattcaagaagacacacatacctacaggagtagttgctttgaagaagcgtgagttcaggacattaaagcaaaaggatcgtaccgtgacagagtatcttcatgagttcaaccgtctagcacgttatgttccagaagatgtgcgtactgacaaggaaaggcaggagaagttcttagaaggcctgaaggatgaactatcaattacgttgatttctcatgactatgctgatttccaagagctggttgacaaagcaatttgacttgaagtcaagaagaacaggatggacaaccgtaagagaagactgattgttttcaaggaagcacagggtactagccaaaggcagtgtatcaagcaatcccaagttgatgaatcaagtctaacatctcaagaacagtcgcaacagttgaacatcggtgatgagatcaattcagagactaatgcaagcaatgaagttaacatcaagcaagctactcaatcagtgccagttcagcagaaccagtctcaagaaaataatagtagtggaatggaagggagcagcaggtatgtttcaactgttacaagccatgtcactttgcaagagagtgttcgaagccaaagcatcagcagccgcaaggtcaagtcaacaacattgtcgtcacaggagccaatgcagtgcaagttgcgtcttcaagtgttacagctcaaccaccagtttcaaagcagtagtagttttctttaaagccttagaataattatcagacttatggaataagatagactgcagtttacctatgcccttttctttctagccgttccgaatctcgggacgagattctttgtaaggggggtagatttgtcacagcctgaattttcgtttcaagatttataaattatttaataaattattaatagaatttatattaaatgttcattaatttacaagtgaagtgaaatgtgggaaatcaaatttcctaattataaagcatgggtggatttaatttttattaaattctccatgattaattatactctctgaaattttctcggatttttcggagctcaattattaattttaataatacaaagaacatttcagtaattattcacatattaaattaatcattaatgagctggtttcaatgtttttaaatacttagggtgtccaagtatgttcaagatttttcttggaattatttgaccattggaagtatttttaacaatcgaaagatcatcttattggttaatttatttggaaaagtaataaaatcttcatcctcagcttgggcccttttcagcccattctctcccttcctctcagcccgcagacaagtctgcttttcgtccctctcgctacagtgttgtcttcaacccctagacagagccgactgtctccagcccgtgcacagttgccgccgcctcctccttccaaatccggcctctccgttgctcctttttccaaattagttgtgggaatggaatcctctcaatctcctcttccttttccccaagaaatccccaaaatttctatggaaatcctttccaatttcgcggatcaatctttcctttttccggcgaagatcctaaactttcccgagtttttcccgtcgatttgggcccgaacccgagctcctgtgcctatataaaggaccccctcgtcgtcctctacctatcccctcaagttccatcttccgccgtcgtcggaatcgctctccccgcgctcttcttctctctccaagcgccggcgccgctccagccgcccctagccgtcgcttcggtcgtcgccgtcggtcgccgtctccttcatcagcatcgcgaggtcgtcgccgtcctcgtcccgtcctccgtttccgccgaagatcgccagagcgccgctgacactgtcaacccgaagctcgccgccgcattttgatctccggcgaggccactgctgctccttccgtcgtcgccaagctttgccgtcgcctccattggattcgcagctgcgaagtgaagcccggccacccctccgttgttgccgcacatcgccggaaagtcgtcgccgccgtggacagtacctcgccgcccttcgaagctcgtcgccggccatcttccgtcgctgtccgtcatcgcgtaagtgttggtaaggaccgtcgtctcgtgctcttcctcccggtgccctccgtttgcattattgtgccgtggttcgccggcaaccgctgcccctatgccgttcaccggtgtaggtttttccctagggtcttaatccaacataatctaatccgtgatttgtctagcgttgtcatctccgtgtgttgtagccggaccgtcattgtcgaccctttctctctgatcgctttggttcggtgagacttctatccgttctcttttttcagtggcatattatttctttttaatatatgccatctactaaatataacctaatcttttctgaatgttgctttaatcttttcttaattataaatcatttgtaaattgtttaattaatttggaatagttttttctttaataggtttaattggaattaaatcttataaaattcataagtaatttatatgaaatcggaatgaggccgttcaagtctcataattcatctaaaatcatgatctacatgtttatttactttatatgtattgtttatttggtttttattagtctttttccttgttttatgtgttagcttgtcgtttcgaaggatcgtgagtgcgtcggaagtgttcaagaagattaattgaagaccgaatattgcaaggcaagtcacatagatcccaaacacaattcctttgagcatgttgatcctatatttaaattctctatttatttcaagtatacatctattttcgaatgtcaccgggtggtgtgaacctatttctttgttatggccaatttacattgattatcctatttcttgattacctcggggtataatttgactagttgtatttatatattggttcaactagatacattagatataattgcttagccatgtttagaaacattagcacactattgggataactaatgtttcacatttacttaatgataactaatgttttgctattacttaatgattggttaattaattaatgtgccaactaaaacttgataatggtgggttgtgagcacatgattttgatggtcgtgctcatgacaattaaggaccggttcacgagtttcggttgtgaaacattaaccgtgccaaacacaagccagcataggcaacggctggacactttgtatagcaaggctcattgtggtgtgccagactgagaagtggcggagataagcccacgggggtcgctggggagtctatgcctttggtttttgagggggtgactacgatccaggaaaggtgcgctgctttgagttgagctatgcgaggggtcttgtcacaactacacaaatggtgacatgttcagcatgggcacatgatgatatggtgacatattatggagttgtgtcttgtgggtacagtggtacacctctggccagagtaaaactattcgaatagccgtgcccgcggttatgggcgggtctaacaatgtctttcgtgattagtctcacactactcattaataataatgtggtaattgatggtaattaatttagctcctggtttggaatggtacattcctggtttagagatagatctgtacagccgtgtatagttgttcaggatggttgggcctgtgcagcatgggtgtgcagttcagtgttaattaatattgatgattaattactctactgttttagaattctcaaatgttttgctaaatgctgcttttgcaaatgagctatatattatgccattctttggtatccttgtgcacttgcatatttgttgtgtggcttgctgagtatgtcatatgcccacattgcaataatcaatcgaacctcagttgaagacaagttgcgaaggagaagacgtttggcttgtaccccagttgagctacttgtggtagtggatgtcacgccctgaagtttccccctttttccttgctttaaaaatttgttaaataaatcgtccgaagaaattgtcttaattaacctagagctaaatccctaattaataaaggcatttaataattggaattggcaatgtgggattttccttgagttccacatgtcacaatacattaacaggattgatttttagtgaaattttcagagccttggaaataattttaaccaattaaaaatcaccaaagtgcaattttaaatcccaggaaaaatcctttcccctttttccctttttcgcttttcttttcctctttttccatctttttgggccgtcggcccagtccaccccccctttttctcctacccgcgctcggccttcctcttgttgggtcagcccatgcgcccctccctcctctctctgggacgccgataggtgggccccacctgtcggtcgtctcccacctccggccgttggagccggagctccaaccgctgccgccgaaaccgccgcgccgccgcctcctccgctcctcccgtgcccacgccgcgtcgctcccgcgtcctccccacgtcgccgccctctcccccgcatctcccggcccgcgcgcgcgctcgctaggggcgggattcgaatttgaatccccccattctctctctctccacccccacgtcgccggccaaatcggccacctccccggccacgtccgccccctcccgcacctataaatcgctccccgcgtccccctctctcgtttttcgcactcgctgcgcccttccgtgcttcctatcctcgccgcgccgctcgccccttgcgccgccgcctaccgccgtctccggccacgcgccgccgccactatagccaccaccgcgccgcgcagtcgctgccgtcgcgctcaccgagcccgcccgcacctcggccgccgcttcgttgccgcaaatcaccgccggagctccgattccctcgcgtcgccggtgagctctccattttcatccatctccggccggccactttggccgccgtggtcgctctccctactcctaacccctcacctccccttctctaggtgccgccgccacccgtccgccgtccgtgtcgccggtcgtcgccggccgccaccgcctcctctggtgaggactcccctcctccctccttccctatgtgccgcacgcgccgcagctctctgtgctcgccatcgccttcggccgccgccgccagcctgtgcgccgtccgccgccgcctcccgcaccgccgcttgttgttgccggcgctcgcgcgccgccgccggtcgccatggccgccggtcggcttcgaagccgagccgagccaaccgggcacccttcctctcctcttgtgccgctgcccggtggggcccaccagctggtggaccccccttttagccgctgccggtggggcccgcgtgccgtcgccacctcccccccttttagagccgctgacccatggggcccacttgccggcgccgcccccctccttggctgacgtcagccctgggtattattgcgcaataaattgattaaggactttttctttattagtaaaaacacagttttatcttctaaaattcataagtaattcatccgagctccgtttaagtccattcaagtctcagtaaattcataaaaatgcaaagaatccattaaaaatggttttgtttcctgtttcattagtcttatagcatgttttgcttgtgtactttgtttgtcgcgtagatttcggccgtttcgtcgatccgcggtttctcgaagacgttgctgaggtctcatcagtgcgagagcaacgcaagtcatgcattacaattgatcatattgtacccaatttacaaatatcccgcatttctattaaatgtcgcattcttttacaatgtcatatgggatgggtcctattactcagccatttattgtttaccatatgccattaataacttgggtatcaaaatgattagatgttggtttaggaaatgcttagccatgcttagctccactagtacacaaatggggatcacattattacatagactttgactatgagcatagttttggattggtgccaccgcaatggtgttagttaattaaaatacactgaatggtgggctgtgggtgcatggttttgctggtcgcacccatggcaattaaagaccggttcacgggaaaccctgggagacttaccgtgcttaccacaagcgagagtgggtaactgcttgatctgaagtatagctcgaccctttcctaggcaccggtggcgagggtgggcgtaatggagttgggtcggccagggtgtccggttgtccagctgccagattcaccgcggcgcaagaggggaccgcccactgcccgttgggggtggaggtgaaaccttagcgtggtgtggatggttaggggagggttatgcggagggtcttgtcacgatttccccctttgcagtattatggtgatacttcggggcatggtgacatgtgtggaatcgtgtcttgtgggtacagttgtacatctctggacagagtaaaactattcgaatagccgtgcccgcggttatgggcgatcaaccagattcaccgtgattagtctcacccctagtttagcttaatgaactagtgtagttcaggtggttggttgggcctgttgcaacgtggtgtagcgttggacagtgattggttaatattgattaattactacagttgttttactgctttcaactactgcttttaaatgctagttttatgcaaaagaacccctagcctcctttggttatatcctgcatcatacctcctcttccggtatgacttgctgagtacagtgggtagtactcagtcttgctctcttttcccccacaccagagttgaagttcttctcagttggagctgtctcagaggggttggtttcgtcgctgccgtcaaggtttgcctatggagtggagtcgcccgctgctgaagtcaagcttccaaggctagctcgttttatcttttccgctgcatttgtaatcttttatatttttgtaagacgtggatctgtatgtcaacaattgtcgtttgtgtaccctggctggtcctggacaggggtttaatgcacattcagcttagaaattctggttcgtgaatttctgggcgtgacagtggagccggagcttcgctagatcgttattccgctgctattttctcttttcatttgtaagtatgtaacgttgtattattgatgaatctgtatattaaattgtcagcttgtgtacctcggctgattcctggacgagggttttatgcacaaattagttcggaaattactagtgaatttctgggcgtgacaagttggtaccataataaatggcgtcgtcgtcgtctccatgtgttgccgccggttcaccgtcgtcatctattcctctccgatcgctttggttcggtgagacgtctatccgtgttccctcggtttagtttttaatctctcgtttgtgtcgtcgagtagccgccgccgtgccacgcttagctgctgccctagcgtcgccactgcactagccgcctagtcgtcgctgtgccgctccctgctacagccgtgctgctgctgctcgtgcgtgacaagtcgctgccgtcccgctaccgtagccaccatctgccgtcgctgtgtgtcgtcgtcgctgtgatgtcgccctaacccgagccgcgtgtctccgccgagtcaccgccgcctggccgagccaagtcgccctagtgccgccgtgtcgcagctgtgtgccgctttaacctagccgccgctttaaccgttgctcggtagtcaagttgtctagccgtaggtgcatccctaaattcctaccggcctatcgtttgccgtaccggggctttaccgtgaatcgtttctagcccaccggtttagccgcagccattgttgagtcgttcgctcgttcgttcgaacgaggtgttacccgtgcttcgttcgtttgtccgtgttgagtcgtcctttagtttagagccgtttagagccgccggttccgttcgccggtttcggttgatcatttgggtaatcccgtgtcacgtagaattgactcgttgagtcggtatctcgtgaggctcgcttgccagatcaatctaagccatccgttgaatcttggtcaactctatgtcaagattaatcttagccctccaaaatcgatataaatatgttctctcttttcagtggcatattatttctttttaatatatatcatctaccaaatataatctaatctatttccagaggttgctttaatgttttatctcagttataaatcatttgtaaatgatttaattaatgtggaatagtctttttctttaataggtttaattggaattaaatcttataaaattcgtaactagttcatatgaaatcggaatgaggccgttcaagtctcataattaatctaaaatcatgatctacatgtttgtttactttatatgtactgtttatttggagtttcttagtctttttccacgttttgcgtgttagcttgtcgtttccatcgtttcgaaagtccgtgagtgcgtcgggagtattcaagaagattaattgaagaccatttattgcaaggcaagttacacagatcccaaacacaattcctttgaacatgttgatcctatatttaaattctctatttatttcaactgtgcatttattttcgaatgtcaccgggtggtgtgaaactatacctttgttatggccactttgcattgattactctgtcctttgataccttgggttacaatttgactagttgagctttatatattggttcagctagatatattagatataattgcttaggcatgcttagaaacagtagcacacgattgggataactaatgtttcactattacctaatgatggatatttaatcatagctcacgatggctaatcgtgattggttaattaattaatgtgccaactaaaacctgataatggtgggttgtgagcacatggttttgttggtcgtgctcatgacaattaaggaccagttcacgagtttcggttgtgaaacattaaccgtgccaaccacaagccagcataggcaacgactttaccttttgtatagcatggttcattgcggggcaccagactgagaagtggcggagataagcccacgggggtcgctggggagtccatgccttgtttataagggggtgattatgatccaggaacggtgcgctgtggtggattgtgttgtgcgaggggtactgtcacaactcctttcagaggtaccgtggtggtattgaggcgcatggtgacatgtcgtggggctgtgtcttgtgggtacagtggtacacctctggccagagtaaaactattcgaatagccgtgcccgcggttatgggcggggtctaacaatgtctttcgtgattagtctcacactactcaccataataaatgatgctatcactggtaataattcatggtatcagattaggttccttctcgcttccacctcctctccaccccagccgccggtcggcgcaccctgccgccgccatggcttctccctcctccctcactgttgacgccgtccttgatgacaccattaaaatcatcgccgacgccgtccgctcctccttcaaggctccctctggttaggacgacgacaccctgaccaccgccgtcgctggcaccgctgccgatcgtgccgcgaccgcggcccgagcggcccttgcccctgttctcctcggtctccttccgacgactccggccgccgatgacgccatctcctccacggtgcctccaccggttccttcgatgactgcgccttcgacgaccgccatcccgccgccgccgacttccactccggctcccgcggcgcaacttccccccgagatcctggcgcttctcgcccgtctcagcatcaccacgacgccggccgcccccacgcaggacgccaccgcgcaaccgccggcgctcgacgccgccgcaccaccgccggcgctcgacgccgaagccgtcgccaacctccacagccaagccgtcgccgtcctcaacgtgaaggcgctcgtccccgtcaccctcgacctcgacgccaacaactactcccgctggcaaggccttttcctcgtcgcgcttggaaaatacgccctcaccgatcatgtcttctccgacgtacctcgccctgatcacgccgactggacacagatggactgcgtcgtcctcagctggctctacggctccatctcctctactcttatgcaggaggtgctctctcccacggcgacggcatgctccgtctggcacagactgcaccacgggtcaaccaggcctggcccacggcctacaacccgtggacaaggagcatccacatgtggccggtccaggcctccttggcgcgcggcctagcttcgccgggacagccttcaccaccacgcccgcgccggcccagcagcaagccttcctcccgccggcctatatggctcttcctaggccggcccagtacactgcaccaagcacggcgcctccaactcttgttgccgctgtgcaatctccattccagtggacggggccctcacagtgggacccacgggccctcgccaacgcgtacaacacggccacattaactactccaccgtccaatgaatggtacatggactcaggtgctacttctcatatgacgtctgacaccggtaccctctccacttcccaaagccccacccgcaatactccctctcatactattgttggcaatagctcccttctccctattacctccgttggtcacgcatatttacattaccccaattcttcctttgtgcttaacaatgttctcatttctcctgagattattaagagccttatttccgcacgccgttttacttgtgataattggtgttccgttgaacttgacccttttggcctctctgtgaaggattacccaaccaagatcgagatcgtcaggtgcaatagttcctgtgctctttatcctctcccggcagatgcgtactcctcggcggcctccactcgtgcctttgtcgcctcctccaccaacaccgacctatggcatcgccaccttggccacctcggtcatgaggccctcacccacttggcgtaggcgtctgttgtcacaccccgaagttttcctcccaagccaaattgtaaattacaaatgaccccaagaaaatgcagaggaaatcaggataaaaccctaagaaaacaatgcaaataataatcggatttgacatgtggaatttttcttgaattctacatgtcgaaattcattaacaggatttttagtggaattttcagagctctagaaataattttaaccaattaaaaatcactaaagtgcaattgttaattccagggaaaatccttttcttctttttcttttccctccctttttcctcctttttcttttcggatgggccgccggcccattcccctccttccttcccctcccttactgggccggccgcaggccgaggcccagcccgacagccggccgcccgcctccctcctctcggggtcgccgacaggtggggcccacctgtcggacccgtctccctcctcccgccgatcccgctcgcgccgccaccgccgcaaccgacgccgcgcccacgtctccgccttctccgggccacgtcgaccacgcccgcgcgtgcgccgcattccccgcgcccgttcccctctctctcccgctcgcgcccgcgcccgagatggctgggattcgaaaaccgaatcccgcctctctctcctccccactcccccacgtcggccgtcgaatcccgccgctcccggccacgtccggttcccccatcccctatttaagcatcgccggcaccccctctcgctttttccccattgcgccgacctctcccgagctccccaacgcctccgcgccgtgcaaccacccgccgccgccgcttttgctactccggccgccgctagccgccgctaggctcgccgccgtctcacgccgtcgccgccgttagcttcgcgcggccgaggtccacctcgtccacccctcctccgtcgaggttcgtcgccggagccctcatctccacgcgcacgggtgagcgccacctctaccgccgccttcggccatggatcccgatcgccatggtccatctctctctctctaatccctctcttctccttccttagggcacgccgaagctcgtccgctagccgacgccgtcctcccgtggcttgccgtcgccgtccgccatcgccttcctccgcgccggccaccctcggtgaggcatcccctcccttcttttccccttcctctcctcctagagccgctagccgccgcttcgagtcgtcggccgtcgccttcgactgccgccgccgtttcccgtgccgccggtagccgccgtcgtcgcacgcgtgccgtcgccgtttaacccagccggccggtcggctttgatgccgagccgcgccggcggccgcatttaccgcgcgccccggccgcgaggtccccgtcgccgtcggttcggccgccacgtggcgccgccgcccctccttttccccgtgccactgaccagtgggcccgcgcgccgccaccccctttctctctctcccggtcgctgaccggtgggccccgcatgtcggcgccgcgccccctcgctgacgtcagccctggttaatattgcgcaataaattatttaaggatttcttttatagtaataaacacagtgaatcttctaaaattcataactaattcatccgagctccgtttaatcccattcaagtctcagtaaatcaagaaaaatgtgtagaatccattaaaaatggttttgttctctgtttcagtagtcttatagcctgtttgcaatgtttgctttgtatgtcgctagattccgatccctccgacgctccagtgtacttcgagatagtcgccgaggtccctccagcagcagagcaaggcaagtcatgcttgtcatttgaacatgttgatcctatattgcaaatgctctattgttttctttcaaatattgcattgttttataatattactatgggatggatacctattgttacagccatgcttttggatatcatgctcctttgttagcttgggttataacatgattagactttggactaggaattgcttagccatgcttagttcaactagcacacagtggggatctcatttaaaacctagactataggtttatatgataatgttggtttaataccaccgctctggtgttggttaaataaaatgaaccacatggtgggctgtgggtgcatggttttgctagtcgcacccatggcagttaaggaccggttcgcgggatgccctggaagaatttatcgtacttaccacaagccagcgtgggcaacggctgggcttgtagtgtagctttcctctagtcgacgcatccaggcaagggtgggcgtgatggagcggggcgggccctgcgacggcctctgtcgcttccggattcacctaggcacgagaggggactgcccgtcgcccgctggggacgggggtgaaacctgaggtgtggtgtgcttggctagagggggttatgcgaagggtcctgtcacggcctctttccggtatgtcgtggtggcatgtcggcgcacggaaacgtgtcgtggggctgtgtcttgtgggtacagttgtacacctctgatcagagtaaaactattcgaatagccgtgcccgcggttatgggcggtcaaccagattcaccgtgattagtctcaccctagtgtaatctgttgaacttggatagtttaggtggatggttgggcctgtcgcaacgtgggttagcgttggacagcggatgtttaatactgcttaattattacaaccgttttcgcattcaattcctgtttataaatgctagtttttatgcaaatgaaccactctagctcttctttgttaattccctgcatcatacccctattccggtatgacttgctgagtacagtgggtagtactcagtcttgctctacttttcccccaacctcagagctcgagtatgtgtccgatggcgggttctccgaggagtaggcttcgtccgtgccgtcgaggatgcctgtggagtggtgttcccgctgcagttcaagtcaaggcttagctcccgtttcttttgttttccgctgcatttctgtaagacctttataatgtttgtaagacgtggatctgtatgtcaacattgtcgtttgtgtaccccggctggtcctggacgggggttttaatacacattctgcttggaattctattcgggaatttctgggcgtgacatctgtcatcccaccacctaaagtcactacatctttatgtcatgcttctcagttaggtcgtcatgttcgtcttccttttcccactagctctagtcgggccaaggcaaattttgatttagtgcattgtgatttgtggacatcacctattcctagtgtgtctggttttaagtattatcttgtcattcttgatgattgctcacattatgtgtggacctttccacttcgctttaaatccgacacattctccacattatctcatttttttgcctttgtgaagacacagtttgccacgaccattcacagcatccaatgtgacaatggtagggagtttgacaattcctccgcccgctcctttttcctcaccaatggagtctccttgcggatgtcctgccctcacacctccccacagaatggtaaggccgagcgcatgcttcgttccttgaacaacatcacccgctccttgctcttccaagccaaccttcccgctccctactaggtcgaggcccttcacaccaccacacaccttatcaaccgtcatcccaccaaaactcttcaacaccacacccccttttttgccctatatggtgctcacccgtcctactcccacctccgcgtgttcggctataagtgttatcctaacctcttcgccaccgctccccataaactagccccacgatccaccccatgtgtgttcctaggctatccctccaccataaagggtatcggtgtctagaccttaccaccaacaaggtcatcacctcgcgacatgtggtgttcgatgagacatgttgtaacgccccgattttcgttcgggaataaaaatcaattaataatacattttctagaaattaaataaaagttaaaccaatttaatcaagtggaattatagaggaaatttgaaattttcctttaaaaatcattggtcgggaatattttgtaatattctttgcgccctaatgtactctccagaattttccgtgaattttcggagctcgagaaatagttttaatagcacaaagatcattgcatcaattaaaataaaaaaaaacaattaaaattccacttcctctctttgggcctttttcggcccaagtcttccttccctcccgcggcccgcgcgccccttttctctccctctcgggccggcctcctccctcggcccgctcggctctctctctccctcaagtctgctttacctccctcgcccgttttcccctctctctcgtcccacctgtcatcttcttccctaacctcccgtcaccccaatggccgtcatggccgccggtttcgccccacgacgccgcggttcccgcgcttcaccccgccccacgagcgcgtggaatcgatcccctccacctcctccacttttcccccactctccccgcgaaaatcggcgccggttaacccctccaccaccccacgtcggcgccccacttcgccggccgattccgccacgtccggcctcgatcccgccttcccgagcccataaaaagcacccccgtgctcccctcgtccatttccccttgtttcccgggcccggcactctctccctcgctcttccccacgccgctcccgcgcgccgccacactccggcgaactccggccgccgtttcccgtcactagggtcgccgccgccctgctccgccgccaccgccagctttgccgccgcccgggcaagctcggccaccgctccatttcccctctccacctccgtagcgccgtagccacgcgaaccacctctctccgctgccgcccccgactccagccgcgtcgcgccgccgcttcggtcgacgccgacccgcgccgttgcctccctcagctccgcaaggacgaggaggacctcggccgccgcccctcttcgccggaaatccgccggagctcctccttcctcggtcgccgatcgaggccgagcccgtccgccccatcccgagcgacgcccgtcgccggagctccgtcacgtcgtcttcctgaggagccccgtcgccaccgttccttgccgtcggccgcccctttgccgtcgtgcatctcggtgagcactcccctccctctcccttttcctccccttcgttggccgcttcccgggcgtcctcgcgacgcgctgccgccgccggtggccgtccgaccgggtcgctgccgccgcgctccgcgctccgtgcccgcgccgttgccggtggtgccgggcagccggttgccgcctcccccttgccgccgccgcgccttggctcggccgggccggcttcgtgccgcgcctgtgcccctggctgccgctcccctcggccgcccgatcggctcaggccgatctgggccatccacgtggtggacgcgcacccgaggccacgtgtggaccatgtccaccgtgcgccctccccctttgactcgctgacatgtggggcccgcgtgtcggcgctggccgcccctttgctgatgtcagcgaggtccatttcctctgtaaaaataaataataattgcgcaataaatcgagtttaattctagaaattcatttaaatggctcaaaacttctaaaattcatatctaattcattcgaactccgaattgagccgttcaacttgcaaaattcatctaaaattgagctctacatgtttgtttactttttatgtactgtttgtgtcacgcccagaaattcactagtaatttccgaacttatttgtgcatgaaatcctcgtccaggaatcagccgaggtacacaaactgacaatttaatatacagattcatcaaattaactaaaccgataaatacttacttaagaggcacttagtcctcaccaagaagaaaactgcagcggaaaataaaatctagcgaagctccggctccactcccacaggcagctcaactggggtataagccaaacgtcttctccttctggatcctttttcttcaactgaggttgattgattattgcaaggtgagcatatgacatactcagcaagccacacagcaaatatgcaagtgcacaaggataccaaaggatggcataatatcggctcatttgcaaaagcagcatttagcaaaacatttaagagaagtaaaacagtggagtaattaatcagaaattttaaccaacactgaacagcacacccatgctgcacaggcccaaccattctgaacaaccatacccggctgaacagatctaactccaaaccaggagctaagcaaattattaccagttataacatctataattatggtgagaggtgtgggactaatcacgaaaaacattgctcaactcgcccataaccgcgggcacggctattcgaatagttttactctggccagaggtgtaccactgtacccacaagacacagccccacatcatgtcaccatgtgcctcagtaccaccacggtacctcggaaaggggctgtgacagtaccccttgcataacacaatccaccgcagcgcaccattcctggatcataatcacccccttataaaacaaggcatggactccccagcgacccccgtgggcttatttccgccacttctcagtctggtgctccgcaatgaaccatgctatacaaaagataaagccgttgcccacgctggcttgtggttggcacggttaatgtttcacaacagtagctcgcgaaccggtccttaattgtcatgagcacgactctcaaaaccatgtgctcacaacccaccattatcaagttttagttggcaagtaattaattaaccaatcacggttgaccatcgtgagctaccattaaatataaccataagtgatagtgaaacattagttatcccaaatatgtgctaatgtttctaagcatggctaagcaatcatagctaatatctagttgaaccaatatatataaagctcaactagtccaattataatcacccaaggtatcaaggaataaagtaatcaagaacaaaagggccataacaaagaataggttaattccacccaatgacattcgaaaataaatgcacagttgaaataaatagagaatttaaatataggatcaacatgctcaaaggattgtgtttaggatctgtgtgacttgccttgcaataatcggtcttcaattaatcttcttgaatacttccggcgcactcgcgaaccttcgcaacgacggaaacgacaagctatcacgcaaaacgaggaaaaagactaataaaaaccaaataaacaatacataaaaagtaaacaaacatgtagatcatatttttagatgaattatgagacttgaacggcctcattctgacttcaaatgaatttattaagaattttacaagattaaatctatttaaagcccatttaaaaagaattaaataaatttaattcaatttatggacaattttaatatgtagatctttattttaaacaacttttgcaacttgaaccacattaaactgagttaagatgaattagatatgaatttttaaagattaaatcggattaaaacacttaaatcggtttaaattgaattatgacgcaataatgaattatttttgaaaaggaaaaggggattattgcgtcagcggctagggtttcggtggaccgggcgcacgggcggcggttcacgcgaacggacggccgagatcgaaccaatccaaaacggacggccgagatcgatcgggtccacggcggctcacggcggacgactccgatgacgtcagcgatgacgtcaccaccggcggcggcggctcggcggctcgggctcacacgctcgccggcgaacggcggcgcggcggcgcgaacggaaagcaccgggatgaagcggacgacaaggcgaactcaccggtgaccaaaggaacggcggaaaagcaacggacgacgccggcgacgaggaggaagcggcgaagctcttcggcttgacgacggcgacggcgctccggcggtcaacagcgacggcgaagcggcggacggggacggcggcgacttggcgatcccgacggtggccttcccgagtgacgacgacgaccgtagcgacggcggcgcacggctagacgaacggcggcgacggcggcgcaaaagctcccgaggctagggcgctacacacgacggcgggcgaaggcgagggaggcgacgggtagaggagagcttgggggtccttataaaggggctagcgagcggcgacggaggcccacggcgaccggcggcgagaaggaaactttagggtttgggagagagaggaatccgattcgatctcgattccatcgagtttccaaaccgaattgaccggagattccaaaagagaaaaggaagaggagatcgagaagatcatttcccctctaaagatttcaccggagaaggaaagaatcgagcggatttggaaggagaaggcggcggcggcgcgctagggttcgcgggcggcggcggcgacgcgaggaagacggatccgacaagcggggcccacctgtcagcgaccgaacgcgcgcgcgcggctgcggactgggccggctgggccgaggagggagagaagagaggttttgggccggctttcggcccaaagccaaaagaagacttttaaaacctttttcaatttaaattatttcttaaatgcaattccatttattaaaaatacttccttagctcaaataaatcccagaaaaatctaggaattatagaattaagcaaagtatttaatgaaattttatctagcccaattttatattgagatttaacaaattaaaattagatcttctcttataagcttttaaaatcatttctaataattccttttaaacaacaatttataatttaaggatttttaaacaagaaaagctcttaacaattataattagatcattaatgatcaaataattactgaactgttctttgtattattaagagttgagctctgaaaaatccgagaaaatttcagagagttgacttaatcatggagaatttaataaaaattaaatccatccatgctttatatttaggaaattttatttcccacattttacttcacttgtaaattaaagaacatttaacaaaaattctattaataatttattaaataatttataaatcctgaaacgaaaatcaggatgtgacagtttgcttggtttttattagagtttttcctcgttttgcgtgccaacgtgtagttcccgacgtttcggaagatcgcggtcgcaaggataagagttcggaagattgtttgaagaagcaaggcaagtcacacattccccttgagcatgttgatcctaatttacaaatcttttactgtttgcaaataaatatgcatgttttgctaattacacgggatcagggtttacctatctgctcgcttgtgccatgtttacttgatatctatcatttgtcaaccttgggtaataaatcgactagctcatgttacttatgtgacccagctagaactatatgcttagcgatgcttatttaccactagctcagttgatgggataattacagtattagacctttttagtatcagagtgagctgcgtgctcgagacatctggccatgcttcatggtcgtaattatccaactaaaatgcgactgaatagtgggctgtgggtgcatggttttgctggtcgcacccatggcagttaaggaccggttcgcgggatgccctggaagaacttatcgtacttaccacaagccagcgtgggcaacggctgggcttgtagtgtagctttcctctagtcgacgcatccaggcaagggtgggcgtgatggagcggggcgggccctgcgacggcctctgtcgcttccggattcacctaggcacgagaggggactgcccgttgcccgctggggacgggggtgaaacctgaggtgtggtgtgcttggctagagggggttatgcgaagggtcctgtcacggcctctttccggtatgtcgtggtggcatgtcggcgcacggaaacgtgtcgtggggctgtgtcttgtgggtacagttgtacacctctgatcagagtaaagctattcgaatagccgtgcccgcggttatgggcggtcgaccagattcaccgtgattagtcccatcttaataaatcgacccaatacactgtaattcaggtgggttggttgggcctgttcaacgtggtgtagcgttgatcagtggagtttttaatgttactttaattacccaatagttttactgttttgctcaataaaatattttacaactgcctttatgcaaatagccacaaacccctccttgtatccccttgcacgtctgcatcgttggtgtggcttgctgagtacggtggttgtactcagtcttgctattattccccctttttcagaagtgtagtgcttttgatctgaagatggagttagaggaccaaggctcagaccccagttgagttttgcctgtggagtggagctgaagccccgctaggatcgcctttttccgctgctgtcgttctgtttcggtgtgaggactaagtgcctcttccgtaagtattttacgctttatttacgtttggaactgtatattacttgtcgttttgtgtaccctggctggtcctggacagggatttaatacgcaaaatagtctggaaatttgggttaaatttctgggcgtgacacatgttttccttttgctgagatgactaatgatgcagttgctactgacttgaagtttcttgaggatttttcagctcctctccctgcgccgattggcagtcgccgccgccctggtcacactgacccggtggcctgcacgcccacggccctcaccgagcatagccgctctcggccggccgctccaccaactgggccggccactccaccaactgggccggccgctcgcagcttccccgcacaggcttcggtgcgctcaaccactgctgggccgtcgggcccaaccgtcactcctactcggtcggctggtgtgccgaccggaccgcctgcccctcggtcgccctggtcagctggcgcaccgactgggctgtctttacttgcgcctgcctggtcagccggcgtgcccatcgagctggctcccctaccgacgcctgcttcgttggccagcgcgcccaccgagtgagctcccctgctaccaccaccgactggtgctgccacacgcgcccgcagtgcgcgtgtccccggcattcgattgccaacgcagctcggcatctctcccatcatcaatgagcacaccatgacgacacgcggcaagcacggacttcaccaacccgtcaagcgctacaacttgagtgccaccactctctctccagttccgcgcacatatcgtgccgcactggccgaccccaattggcggtccgccatggaggaagagttcactgcgctgcaggccaaccgtacatgggacttggtcccccgcccaaatggcgccaatgtcgtcaccggcaagtggatcttccgctacaagttccagtccgacggcagcctggacaggtacaaggctcgctgggtccttcgcggcttcacgcagcgccccggcatcgacttcgacgagattttcagccctgtcatcaagcctgccacagtccgcactgtcctcagcttggcggtctcccgcgattggccagttcaccagctggatgtgaagaatgccttcctccataggacacttcaggagacagtctactgcactcagcccgccggctttgttgaccccaccaagcccgaccttgtgtgccgtctcaacaagtcgctctatggtctcaagcaggccccacgggcatggtacagccggtttgccagctttctccttacactcggctttgttgaggcaaaatcagatacatctttgttcatctaccgtcgaggctcagacacggtttacttgctcctctatgttgatgacattgttctgacagcctcctctgatgcacttcttcggtggaccatccgtgctctccagtcggagttctcgatgaaggatcttggcagcttgcatcatttcttgggcatctctatttctcggcagtcctctggtcttcatctcagtcaacgccagtactgcctcgaggttctggagcgtgctggcatgacagattgcaagccatgtgctacccctgttgacaccaacgccaagctctctgccgctgatggtgccccagttcgtgatcccacggactatcggagtctttctggcgccctctagtacctgactttcaccaggccagatatctcttatgctgtccagcaggtctgtcttcacatgcacgatccacgggagcctcatcttgctgctctcaaatgcatcttgcgttatgtccgtggcacggttgattatggtcttcacatccgccgctcctccactgttgacttgagtgcatactctgatgctgattggatgagtgcatactctgatgctgattgggcaggttgtccagacaccaggaaatccacctcgggttatggtgtgttccttggcgacaacttggtctcctggtcctccaaacgtcagcttactgtatcgcgctccagtgccgaggcagaatattgtgccgtggccaacgcggtggctgaaacttgctggcttcgacagcttcttcatgagctccatacccctccgagccgatccacattggttttctgtgacaatattagtgctgtctatctctcttctaacccggtgcaacatcagcgtactaagcatgtgaagatcgatctacatttcgttcgcgatcgcgtcgctgcgggatctgttcgagtgctacatgtacctactacgtcacagtttgccgacatcttcaccaaagggttgcccagtgccatcttcttggagtttcggtccagtctgaatgtccgttcccacgacgttccgactgcggggggtgttagattgtgtttatcccttgccatccttccttaatcttctccgatattgtttctataaatcggttgctagatatggaaggcatgtgcctatatgtactctaccatatgtgataatccaatctatcgtgttgagcctgtcgtcgatgacggtccagctctcgtcgccaggcttggcaatggcgcgcaccgtgggatcggagaaatcgactgccactactgtggaggcatcctcgacgacaaaaccggcggcgttcacgcgaagacccacgccatgggcgcccaaacgccagctcgctcgtcggcgccactccggtgtcaggagcgctgtcaccggcgggaggtcggtgcggtggcgggtgagcgggttcaggaggtggaggcggaggctgggctcgtggagcagcagcaggaggccctccggcgtgagcgccagcatcgtgtggtcggcgagctccgggatgtcgtccgtgtggatgcacccgccggtggagacgttgagaaagcggtggcggcggtgggtggcggcggcagtggtgcccttattgtggtgggccttgtcgagcatgatccagtgacgagggaggaagcggctgtctaggccaccatcttgcgggcgcgggtgcagcgaggaggagagccgccacgggcggcacacggcacggaagcggacgtaatcggcgacgtcgttggcgagggtgagctccgcgatcttgccggccggcccgtccccgaggttcgtccagtcccttgtgccagttttgctattgtggttgatagagcttggtagcgagcgcctgggcaccaccaccgccaccgcctgctcattgccgccggctggcgtggggcgggagcgtttcgcctgggttctcgctggttcggtggaggcgcaagctccccgcggcgattgtgacttattgaactggctggctggtcgcttttccatcccaccgctgcaatccatcggacaccggcgaattaggggattagacgtagcttctccctttgtgcaggcgaagaagggcgcggtgaggggaggatggatcggcgtcggcgtcggctggagacgtaactctggtatttggtattgccctagtttaggtcacaactttttctttaaacttttaatttatccatcatatcaaatctttcctgcatacataaacttcaaacttttataaacttccaacttttttcttcaaacttttaattttagtcaaacttctaattttaacgttaaactaaacacatagattatcgagtcgagacgagtctttaattaacgtggttattatttattgtcgttgggggtcggactcgcgatgcgcgtcggatcgatcctcggatcgggtggtcagtcgtatccgaggttcgagcaatcaccggcaagttcttttctccccacatgtttcctcccaagagaggctgatgcggcagcggccgttgacggcacatgcagggatccacggcgctgtggatcagggtggtcgatcggatcctgagaggatgcaacgttgggcgttgagacgatgtgttggatctgtggacatgactcttcatcatcaagcctcctgctccgccgccactggacccgaccacgtcgccggtcaaggaaggaagggatgacgacagcggctccttttctccatcttattcatcgaccacagcagcaaagagctgacacggatgtgtatgtgggaaagtttgtttctttgcaaatgtttttcacctacatgtaaaaacatttactaattgaataatcaaaattttaatatttgatcaatgacgtataacggaatacacatacgtcaacttttgaaatagtcatccgatcgatttgtgaggctatagaaacgtgtacacaatgacgcatgcagcgaacacaacctagttcaatactatatataatttctgattttgttttgtctttattttgtttctcttgtttcagtttatcgtttaaattagcagagtttttatcgatcgtaaaaattattttcgcatgttacaacgcacatgcattctactagtaataacaacatgtaatcagatagtttaactgctcatggttcagattaataaatattgatttaatactcaaaagagtggtctttcctatatagtgcgctgcaaattataagtagttattgcaattttattggagaatcagcaggaaaaatcgggcgcctctatcgcgcctccagctcgcgcgctgcaagcctctagctcaggtgccgcccccaccacacaccctagcacacacgccgttgcaatatatcacccacatattttagaaaccatctattaagagaattcgtttcagtttgtttccacaaaaaatgtttcatctagtgtactacaatgtttcactatgtatagatctaatgctgcagtggattgaaacattcttttgcaacaaatcacccacatattatggaaaccgaattcatttcatttttttccacaaaaaatatttcacctagtgtacttataatgtttcattatgtatggatcaaatgttgtagtgaactgaaacattatttcgctatttgatgaaacattatttttatataaggtgaaacggcgcccgatttaaatgattgaaatattttcgatttaaaacaatttcaatatacttggtgcaacaacgtgcaacatttaaaaataattcaataataagctaaaaaagttttcgtcggaatatatccatgtgtagtcttgttttaaagatttaattgcaacgaatttaatagtgcaattggatcatgatttggataaataatttaaaataaaaaaatagtttaaaatagttttgcgcgcatacatcttgctgacgtcatgctgacgtcaacatgacgtgggcgcccgattttcccaccccggatcgggcgcctgacgtgtagttgcctcccattttattgcttagagtgatgggtttctttttacaaagacacggagtcatcttttcccctcctcttcatttacattctctaggtcaaatatgaaaaattgcacccttctatttgcctaacaggccacacacaatttccttccaaagcccaaaatgtacggtttccgtcggcctaaactgcgaggttttcatttttccatcttcaagccaattcaattctgtctctcttatctgaagcaaggttttcattttcagttttgctcaaaaattcggccatgtcggtagcatcgaaattcccaaatttttgggattttgaagacttattggatcaaaattatttaaatttttaagacaatttgactagatttgaataaattttgatcaaattcaaagaaaaagaaaagaaaaaacaaaagtttcagctgagataatgacttgcccgaggttaccgaaattgtttttcactgatccaaagtagaatattagcagtaacaaaggaaaacgcttctgccgataaaggctccatttggatattgggttatacctattgggaaaagaaaatgatatgctggtagattgaggtgggagattatatgaaagaaagtcatatcccatgtttggtttgatggatgggaaatggaagtttctagagaaatgaccaaaatacccctccctacaataagtggtataacattcaaatgcagccaacgatcacataatatatacatgcacctcaccatcttcgagagccttcgtcccacgcgaggatctcggtggattgctgccagctgcttacaccaaagagcaccctcagatttgatgctatgagctgtggtagatgaatcaacagattatagaagggtcaaaatggcgagggcaatttggtaatttcacctggcaatattaccctcaatccagcatgattgcatatcccattcccaacctatccaaacaagggaaatatcaaaactggaaataatatccatttcccactctctttatcccattttccaaacacaatcaaagagattgtgtgatacatgctcatcaacacgtgtgcccgttaaagcccttggctaggacaagaatccaacttaaaaatccaccacacatcgtactttccactttatactagtataaaataagggattttgtccgtacagttacatactttgtattttacctacatctaatctcctcattttctgtttttattatccttctctaccaaatttctttcctcataaatattttttttaaattatcattaaggtgtgtctacaacaagtttgttactttgcaaatgctttttatctataggtaaaaaactttcactaattgaataatcaaactttcactcatctatagcaaaatacacatgcgtcaacttatataatagccacccgatcgatttgtgaggctaaggaaatgtgtacataagagatttttcgtgtgatgacacaggaagcgagcacaactgagttaactttgttttgccattgttttgttcatcttttctcggtttgttatttaaattagcagagtttttatgaatcatgaaaattatcttcacatgttgaaacataccaaacatttttgctagtcattttaaaaacagaaatgctacttaccgatataccgtttgggatcggtcccggacaggacaatttcccatggatcaaacacacaccctcacggatcagatacacaccctcgagaagcattgagacacctacagctggcaaggctgcggcggcggcggcggagcctgcttgctgctcctcctcttcagcgacgccggtgcgcacgaggtcagctgtgccaatgagagagagtgacgtaagcatgttgatggcggctgcggcggcggcgtctgcggcggagctggtgcgcatgatacccctttctctcattcctccttgatgaggacatcctccactattacccactggcaaagacgctaaagtcgggcggcgaccgtgtgagcctctgaataatcccaccttgcttagcttgggaggaggaatccaccttaaaagggagagccacccttcccttattagactagtcttttagggagattgggcattttcccgagtgagtgcgcctatgaactgttggggtccgggcaaccttaagttattaggcctcggccaaccccacctgggccggattattatcatttggtatcagagttgggcccttgttaagggggtgggaatgatgaggacattctctactattacccgctagcaaagacgctaaagtcgggcagcgaccgtgtgagcctctgaataatcccaccttgcttagcttgggaggaagaagccaccttaaaagagagagtcacccttcccctattggactagtctttagggagattgggcctttccccgagtgggtgtgcttatgaactgttggggtccggccagaataatcccaccttgcttagcttgagaggaggaagccaccttaaaagggagagtcacccttcccctattggactagtcttttagggagattgggcctttccccgagtgggtgtgcctatgaactgttggggtccagccaatcttaagttattgggcctcggccaaccccacctgggccggattgttatcactcctttttcatcgatttcctgatttcgattttaacatctcttcatttttgtattttctagggtttgttgaatccccaacctgtggatggggctcgtcatatcacatccaaattgaaatcaaagtaagctaatactctctcttttttctatgcatttttgttcattcactggggatgtttgtaccagaggtgaggggtgtgtgtgtgctgaatcatatgatacttgatatgatacttgcagcaaaatgttcgaattggaatagatcgctaaaaatgcttctagttgtatattgatgggaaggcaaatattgcttggagcaattttgtcgttaacaagtacacactgtcttgaaacagagaaatctccattcaactagtagcttactgcttaggacttttttaggtgaactgaagtgtaaacaaaatcagagaaatccgcatcagtcggttgctggcttctagttccgggtatgctttgcttgtcaattgttatcctttttgtcatagagggcagcgcgtggcgacagagatggcagatgcagctgagtcatagatgcagatgatttggatttttttttcctgttgatgtttgtagatctcagtggctggctgggagttttctgttttaaaatgatttgatactttggttcaatctaagaagaatcaccattgaaatgatattttctttgtcctttcacacatgtgcacagagttgaaatagcattgccacctgcttcaagcgaatccgatttcatgcatgtttcaaagaagaaaaggtgctcttcaaggttgaacaagggctcagcttaacccccacttgacaaatctcacactgctcattcttgtcatccatgcaggactacatgaaagaatatcatagggagctatgcaaaaggttgttgtaccatcgcttcaatgacttacatccaaaacgtcatttctatgctcattcggttcaa

SEQ ID NO: 24483 - DNA, 3842 bp, Oryza sativa
acatgatcctacctacccaggtatcatgatcgacgattttcctaggtaggatcatgtgtgatacttcacaagtatcacaccatcctactaaagtatcatctctgaaacctcacaaggatcatgttaccagagatgatacccaagtagaatcatgtgtgatacctgtaaagtatcacatcatcctactaagtatcatctgtgaaacccatagggattatgttagaaaacatgatacctaagtgggatcatgtgtgatacctcacatgtatcacacatgatacctaagtaggatcatgttagaagacatgatatctaagtaggatcatgtgtgatacctcacatgtattacacttaatgatactttttttattaggatcatatgtgatacctgtaaagtatcacaccattaagtagcattcgtgaaactcatagggatcatgttagaagacatgatacctaagtaggatcatgttagaagacatgatccctaagtaggatacatgatacccaagtaggattatgttagaagacaagatccctaagtaggatcatgtgtgatacctcacatgtatcacacttaatgatactttttgagtaggatcatgtgtgatacctgtaaagtatcacaccattaagtaccatctgtgaaacccatagggatcatgttagaagacatgatacctaagtaggatcatatgtgatacctcacatgtatcacttaatgatacttttttgaggagaaccatgtgatgctacaaagatatcacatgatcctacaagagtaccatgtgatcctcaagagtatcatgtgatcctactagcgtatcacatgatcctaacagagtatcatctgtgaaaaccacatgaatcatgtgctacttgtgtgaaaatttttagcaatcacataacaaattgtgtgtgaaaaactacctccaccaacagccaggacactcagtgtacatcttttgatcatttttctaatacaaaagttcaacgatagtatgcaaacacacaagcaatcttttgacaaatattggagattaagcagtccttttatgtacattccatcaatttttgtaccacacagggacaagtcatgcataccatctgttctatccacttccatatcatctgggtcacatctagctctttttttttcgccgggccagccaagataggccaactaaatttatacttacgattgaagaatatatacaaatatacaaagttttaacttcaactagaagccgtcaaagtaatggaagttgtcaccggagcaacctctctcctatatttctgaaaaccccagcttccttccaaatcgccacctcctctttgattgaaccaaacaggaaaccggctgagcgccgctggttctgaaacacacgcgcatttctttccttccaaaccatccaacaaataagcagcacaaggctatcaatggcatccatgtagttgttccgaaatttttgccgcatcgctaaccaccattcgcccaagtccaagcctgactcatatggcagcaggaagccaaccccaatccagcccttgatcattctccacaccctggtcgtgtaggtgcaagacacaaataggtgttcataatcttcatcaaccaccaagcaaagttggcaaacctgctggttcggccagccacgcttacttagattatccgccgtgaggcatcgccctttttcggccaaccacataaataatttcacctttgacggcgctcttgtttaccaaatcagagtaccacatcgcgccaccgtgtttgccatgaagaacatgctgtaggccgagtagggagtgtatttttcatttggtgcccacttccagattgtctcatcttcctccccatcttgaagttgcaccccctagaccacgtcccaaatctgaaagtattccccaattgcacgattggagggtgcccccttgatgtctcgtacccacctatggttcagaagccctcatgccaccgtcaagcccgagcgctcgacgtggctgaagatcaaggggaatctcaactttatgctcctcaccagcaaccagtccgccagccaaaatttggtgttcttcccatcacccaacacttgtctcgttcctgcgaggtagaggtcttgcaagtctttcgactgatctattggaactgttgttcacggtgtcgacgttttatgtcgcgattccggtatttgcatagtatgggaatcgttggtactaggatatatgcgagattgaagtaaaagagatggggacgaggatttttatataggttcaggccccttatcttacaggtaatagccctacatcccattggccgaagccggtgttgctctttattcatctggatcacacaagtacaatatttggagtagcctatctaactgttgtcgacttggcggtctgaagtgctgacttgtagtcgacaacagggtagccttcctcctcgaatccgcatccggcgagatcaaagacagcgctatatctctcctgataatatccgtagataccgtaagggactagccatgcttatctctgaattcgatatccggcgtcttgtcttgcatgttggcttttatgttgatcttgtgtcttgatctattgttccgtgtcccctctcctcctagggggccctgtatttatacccataggtgtccccttgtctaagtagaactagggaaaccaatatggatacaatccaagtagtccttgtcgtttccatgtagaactctattcatcattccttatgcggaattcctcctatatccgaaggttgttttcgtataagacatggtatgtggtgggtcctgccgagatttagtcaactactattaggtatatggtatccataaccttgacacacggcctgtcctgttgttccccctttttgccaaccacttgagacgaagtccttgccgaaataattgatgttcttgattcccagcccgccattttcatgtggcatgcagaccgctttccaggcaaccaagcagtgtccgccattcacctcttcctgcccttttcatagaaatccccggcacttcctatttatttctttgattgcccactgtgggagctcaagtacagacatgtaatgcactggcaaagcaagtaggactgtcttgatcaaggtcagccggtcaccggcggagagaaactttggcttccacccggcgaatttcttgacaaaccggtcaaggagcggttggacatcgtgcttcgtaagctttcaaagggggagcgggagcccgaggtaggtgattgggaacagctcgactctgcaacacaggatcgactggactagctctgattgctcttctgaacattggatcatggtgactgcactctttaacatctagctctaacaagggcctcctttaacatctctatttcagcacttaactcatccaacactaacttatctactattgttgtcacaactgactcgctagctacagacacactagcagaaagtgcacacaaaggagattcactcgagggggcatcacttttttttattctcctgggcatcaaaagaaatcacacaaaatagcaacaaaacatcaaaacacatacattgcatgcataaaatagagataacagagaactggctttagaattcttacgcgggctgatgttgagcttgcagcgcatagctggagcagaatcggtcgaggaggtaggagcagagcaccggattgcagaggaaatcggtagacggcgtgtgcgccggcgaaatcaacaaaggaggcgcgcgattccgaggatcaatcttggggatgcggaggagctcgcgccggcgaggaatcgtgcgcggaggcgcgcgatttcgaggaggattc

SEQ ID NO: 24484 - DNA, 10947 bp, Oryza sativa
attctttctgtttttgttgacgcgcggggtgaccataccgggttggttttagaatcatccctgttttcaacgggataccggtagatagcggctttttttaaaaaacgtgcccgtgtaagaggaggaaagggtagattgaagccgtttgtaatccggatcggactcgtgtagtcgtattgcaagacgcaatcacgaccgttggccacagatcgggcggtcaggacaccactcgccacacgttctcctcctcacccgcagcggcccgtacccttcccaaggagaggcggcggcagcggcggcggaggtggcggcggccgtatgcgggagagagaaagagctcagctcgcatggccatcgcggtgaggtcggctgcggcggtggcgaggcactccctgcgccctccgctggccgcgcccggcagcatccgcggcgcctcgctcctgccgccgcagcgcgctcgcggcgtgggcccgtgtcgcgcccgcgctcgcgcggcgagctcctccgcgactggaggtggcgggcaccttcctccgctgttcaggtgagcggggagcggaattattccgtgttttaggcaatggagacgggcggggatggcggtgctgctcatggatagctgattgatttcgtggttttccccctcttctcctgcagcgtggcgccgatgatggactggacggacaaccactaccggacgctcgcgcggctgatctcgaagcacgcgtggctctacacggagatggtggtcgcggagaccatcgtgcatcagaaagataacttggtgagctatatgcccttccgcccttcacttcttcatgattaaaaccgggtgaaacgtagatgagagaaatgcaaatccttgctacggaggaggaaaccctgcaactgatcagcagtgaagcaacctgtggttttaccacgattctgaattactgtgcgatgtgaatctggtagtgatttgattggagtcagcagcaaactgaattcgtttacgattggcccactttcattcatgtcaataacaatgccacaggtgttccatgaaaaactttcccgtgcgcattgcataagttttccattctcttcaagctatatctggtgactctttaagtacactcatcagagtcttatagtataatgttcatcttaatagttccattagcccatggtgcgctttcatatatcacaacttggaacctaatcatacagcggcattccactgattccttttgtcagatatagttcatctcctctgctgtctcaatctaggcatatgcgaaggatatccattgttttagctaatcagctctttttttcacataaatattgcagtttaatgaaaaaaagaatcaacttactgccttatcgggataaccagcaatgtattgcccacatgttttttcttttgtatgttatcaagttgcgatgagctttcttggcggcactggcagcttaatatgggggaaccacttcaactcaacttggcaccatcagtgctggcttgttttgtatatttgtcactatgtcttcaatcattgtttcttaaattctacttttggtgcaatgaaggcaactgtgaaacgtgtctacgacatatggttcacattatgtgcacatgacactgctacacagaattgataaatcttattcttttgtcgtcacaatatgcaggatagatttttagcgtttcctgctgaacagcatcctattgtgttgcaaattggtggaagtaatctggataacttagcgaaggcaactgaactggcaaatgcttattcgtacgatgagatcaacctaaagtaaaaaagcgtcactcaatctcatctaatcatgtatgacatttcttttattacatataatttactccaaacgttttgtatcagctgtggctgccccagtggcaaagttgctggtcatggttgcttcggtgctcgcttaatgtttgatccagaggtttgctttatgaattcattgcagtaaaccatcaggtagcatcaatttgttctttctccacccttagtaaatattgattcaattatctgaagtttgtaggggatgctatgtcagctattgctgccaattgtaatgtcccagtcagcgttaagtgcagaattggtgttgatgatcgtgactcctacgaagaactttgtgagctttcttcagagacctctcatgttcctttaaatttccttaggcttcccagatatgagccatggaaatcatgtcaaataagtacactctatcagatgcacttttacaccgaaaaggatcaatcaacaatgggttgcggcatgctttaatgtctcatattatcaaaatatgttaacctataccataagctaaatataagtaaatcacttgctggtgttatctggttgttttacaagaaccaggttacctagctgtagttgttattggttactggtcagtgtatttgtactcttctggcggtggttgtgcccttaaggtcaaattgaagaaagaaaaaaacagtagtatctcttgtgcatagtgatgctggacggttaaaatcttggattagtattaactgacccctaaaatgtaccactggtgcaattactccttacatttcaagttttcaacagcatcagagcataaaaaaaatctcatatcttctcaaatcaaaagaatagttgaaagcttctaacatcagtggagagtctctagttctctgcatatatttatcatgacttattccaaattaatctactgtatgtaaatctgcttgtagatgaaatggtggcatgatgacatttactgcagtttatctttttttagggccaaaaataatcacccatggctgtttggctaaatttgaaaaattcccctttccccctgagttggctgaggattatcttcaaagcattggactcctattaaattgcaatgtttaactatggttgccagttaattggtgatgtatatatttgacatgtgatcaacctttttgtatgataacaacatccttttacatttatttagagattatcccttctgcacacatcaagctgaaataattaggtaactgaataatgggaaatcaagtctaagaataagttgctcaatttaattgttttcttcttgttatgatatatggatatggcccatttctttttaacatgtcacacgacatagttccttttgttaggaatttgtaacatatcttttttttatttatattacccagttcaaattctatgtcatgctgtaggtgcatacttttaatgattctcattcatgttactctagataaatttttcatatgatgtttaattagttcttgtattgcatggtatttaattatcataggagtattgtttgagggttaatttaacctcatgtgctgatacagtgccatattgcaacaaactacgtatctttctcactgttaggtacattgactttttttttctttcccaggtgaatttgtagataaggttgtttcaaaatcaccaactaggcatttcattattcatgcccggaaggcattgctaagtggcctcagtcctgcagaaaatcggaacgttcctcctttaaagtatgtcacgcccatgattttctttgtgtaaaatattattcaaatttgatggataagtcttcgtggtccttggtcgtgattcttctttttgcttttgggtagtttcaccttttcaggacagcatctacttctttagcgtatttttcagttgctaggacagctgcggttagtaggacagcagcagttagcatctcctttatgcctcctttatgctttattcagtttggatgccctctaggacagcatcccattcaaatttcgaattttagactaggagggtgcagcaataggctagcagccagctatggctatatatatatgtatccaacctccctcgggtaggtatggctttgtgttttgtgaatgaagaaaaccagaaaattgccccatctcgagtgccatcctcttctcaatgagagtaaccattgaagttctaacatctggtatcaaagccacactttcctgtaggctaaacatctcttgttccaccccttcccaagctcggttgagctctcagctagcagcagcagcagcagcaacaccggctgctcctccttcccctttcccttccccctctccacgcagcagccccccggaggtgtgccatgtccgacgttcggtctcggcgttcggtcgcctcgagcactcggcgtcagcaggacaccgagctcgccgcagcagaagagcgcaggcgagcaacggctcagaccgctgcagcagcagcgagggcggccagactggcggcagcggagttggcagcagccaggtcggaggcggaagcagaggcggcggaagatgcggcacgtgcggcggaggtagaggttgagaccttgcgcagcagcatcaacggctccatcgccggcgacatcaccgccgacagggagcttgaggagctggcaagaggaagggcacgggaacgggcagagcggcggcggcggcccaagggaccgcgcacccgccgacgggaacccagatgggcgcgggcgtgccggcggcagcccggagcccgcgcgcggccctcgcaggcagcgcggctctccctcccctgaccggtgccatggtcaccacggcgtccagacggtggtaagggactttggtctcggcggtgggtggcctaccctcaccaaaaccaactacatcgagcgggccgcggtgatgagggtgaggctccaggtgcggcacatgtgggaggcagtccggtacggcgacgttgactacgatgaggatcggcgggcactggatgccctcatcgctgcagtcccgctcgagatgcagttctcgctttcccataagtggactgccaaggaggcctgggatgccatcgctgtggcacgtatcggcagcgaccgcgcccgcaagtccacactgcaggcactccgcaaggagtgggagaacctggccttcaagccaggtgaggatgttgatgactttgccctccgtctcaacactcttttgcagaagatggtgcagtacggcgacgacacctacgacgaggagagagctgtcgagaagctctttcgttgcgtcccagagaagtacaggcagatcgctcgctcgatcgagtctctgctggacctctccacgatgtcgatcgaggaggcgttaggtcgcctcaaggtcgtggacggcgatgagccacagcctctctcggggcctatcaccattggcgggaagctccatctcactcgggagcagtgggaggccagccagggtgacgggaggaagggggagtcctctccctcgacaggcggccgcaagccgtgcaaggcgcgcggaggcgtccaactgcggtgggcgcgaagacgcgccgagggtggtgctcgcagaggcgcccagggcggcgccgccggcaaccacaagccggcacgagacgacgcttgccgcaactgtggcaagcttggccattgggccaaagactgtcgacagccacgacgcggcatcgagctatctccagcggcaccggccgcaacggctttcctccacctcgatgagccgaaggtacacgccttcctcggcaacagctccagcaacgacaaggctgatgggtggtacctcgacaccggcgccacccatcacatgactggccggcgggagttcttcaccgagcttgactctagcgtccgaggctccatcaagtttggggatgcctccggcatggagatcaagggcgtcggctccgtcaccttcaccgcaaagtccggtgagcacaggctgctcaccggagtctactacatccccgtgttgaggaactctatcatcagcgtgggacagctggatgagaacggctcacgcgtgttggtcgagcacggagtcatgacgatttgggatcgccgccgtcgccttcttgccaaggtaaccagaggcactaatcgactctacatcctcagcgcgcaggtcgcacaaccagtttgcctcgccgctcgtcgggacgacgaggcgtggcagtggcacgagcgtttcgggcacctccactttgaggccctaaagtggctcagcgccaaggagatggtgcgaggcctgccgtgccttgaccacgtggagcagctctgcgacgtctgcgtcctaacgaagcagaggcggctcccctttccccagcagacgagtttccgagccaaggagcagctcgagctcgtgcacggggacttgtgtggcccagtgacaccggccacaccaggaggacgacgttacttcctgctgctcgtcgacgacctctcccgctacatgtgggtgatggtcctcggcagcaaggcagaggctgcggacgccatccggcgcgcgcaggctgctgcagaggtggagtgcggccgcaagctgcgcgtgctgcgcaccgacaacggcggcgaattcacggcggctgaatttgcgtcgtactgcgctgatgagggcattcagcgccagtacaccgcgccgtacagcccgcaacagaacggtgtcaagcggcgcaaccagacggttgtagggatggctcgggctctcctcaagcagagggggatgccggccatattctggggagaggtggtggtgacggccgtctacatcctcaaccgctcgcctacgaaggccctcgatggcaggacaccgtacgaggcttggcatgagcgcaagccgggggtctcccacctgcgggtcttcggctgccttgcgttcgtcaaggagcttggccacatcggcaagctcgacgacaggagcaccccaggggtgttcatcggctacgcggagggctcgaaggcctatcgcatcctcaactcggagacacagcgtgtgcgcacagcgcgcgatgtagtgttcgacgaagggcgagggtgggtatgggacaaggcggtggacgatggttcgactccgaagtacgacgacttcaccgtcgagtacgtccacttcgagggagctgggggagtaggcaactcttcttcaccgagcgtgtctaccccagtccccgagcctccaccgactccgacaccaacacactctcgggccacgacttcgactacgacgagctcctcgcctacaccaccacagccggtgaccccacgcgctccagcaccaacagccactcctccgagcacgtctactccgacgccagctagtgttgagcgcaacccggtggagttcgctactccgctctcccacgacggggagcgcatcgacgcgtaccacgacggcgagcagctacggtaccgtacgatggaggatcttctcggcgaccagccggtgccgggactggtgcctcccgacctggaggcgcagttgcaccttgcgtgcgacgacggtgagcctcggtctttcgcagaggccgagaaacacgtggcatggcgtgccgcgatgcagtcggagatggacgcagttcaggagaaccgcacctgggagcttgctgaccttcctcgtggtcaccgcgcgatcacccttaagtgggtgttcaagctgaagagggatgaagccggagccatcgtcaagcacaaggctcgcttggtggcacgcggtttcgtgcagcaggaggggatcgactacgacgatgccttcgctcccgtggcacggatggagtccgtgcgactccttgcgctggctgctcaggaaggctgggcgtccatcacatggacgtcaagtcggcgtttctaaacggcgacttgaaggaggaggtctacgtgcaccagccgccaggatttgtgatccccggcaaggagggcaaggtgctacgcctgcacaaggccctctacggcttgcggcaggcaccgagggcgtggaatgccaagttggattccacgctcaaggggatgggcttcgagcaaagcccgcacgaggcggccatctaccggcggggcaatggaggaaatgccttgctggtgggtgtctacgtcgacgacttggtgatcaccggcaccaaggatgcggaggtcgcggcgttcagggaggagatgaaggccaccttccatatgagtgatcaggggcctctctctttctacctggggattgaggtgcaccaggacgactccgggatcacgcttcgacagaccgcctacgccaagcgcgtcgttgagctggctaggctcaccgattgcaacccagctctcactccaatggaggagagactgaagctgagccgtgatagcacgacggaggaagtggatgctacacagtaccggcgtcttgtgggaagccttcgctacctcacccacacggctggacttggccttctccgtcggctacgtcagtcggttcatgcaacgaccgacaatggagcactagcaggctgtgaagaggatcatccgctacgttgcggggactctcgaccacggtctctactacccgaggtgtcctggcaaggcacacttcgtcgagtacagcaacagcaaccacgccggtgacatcgacaccagcaagagcacgagcgggattctcttcttcctcggcgagtgcctcgttagctggcagtcagtcaagcagcaggtggtggccctgtccagctgcgaggccgagtacatggcggcctccgccgcttcgacccaggcgctctggcttgctcgactgcttagtgatctcctcggcagagatactggagcggtggagctcagggtggatagcaagtccgctctggccctggcaaagaaccccgtttttcacgaatggagcaagcacatctgggtgaggtaccacttcatccgaagctacttggaggaagggagcatcaaggcgagctacatcaacaccaaggaccagcttgcggacctgctcaccaagcctcttgggaggattaagttcctcgagctctgcttcaggatcgggatggctcaacttccccacaagacgacgcacaagacttagagggagaatgatggataagtctttgtggtccttggtgatggaataagccttgtggtttttggtccttgtggtccctctcttgcttttaggttgtttttcccttttaggacagtatcctttcagttttgcttttagcatctttcggttttgcttttagcatctctaggacagcatctaggaccatcacctttctgctttattcagtttggatgctctctaggacagcatcacgttcaaattttagactagtgtgggcagcaattagcttgcagccatccagccagctatggctatatatatgtattcaacctctctcgggaaggtatggcttttgtgttttgtgaatgaagaaaccagaaaattgccccatctcgagtgccatcctcttctcaatgagagtaaccattgaaattctaacatctggtatcagagccacactttcctgtaggctaaatatctcctgctccactgcttcccaagctcggttgagctcttagccagcagcagcagcaccggctgctcctccttccccttctccttccccttctccacgcagcagcctcccggaggcgcgccatgtccgacgttcggtctcggcgttcggtcgcctcgagcactcggcgtcagcaggatgccgagcttgccgcagcagaagagcgcaggcgagcaacggctcagaccgctacagcagcagcgagggcggccagactggcggcagcggagttggcagcagtcagggcggaggtggaggcggaggcggcggaagatgcggcacgtgcggcggaggtagaggttgagaccttgcgcagcagcatcaacggctccattgccggcgacatcaccgccgacagggagcttgaggagctggcaagaggaggggcacgggagcgggcagagcggtgggcagcagcccacctccacggcggtggcggcgacccaagggaccgcgcgctcgccgacgggaacccagacgggcgcgggcgtgccggcggcagcccggagcccgcgcgcggccctcgcaggcagcgcggctctccctcccctgaccggcgtcatggtcaccatggcgtccagacggtggtcagggactttggtcccggcggtgggtggcctaccctcaccaaaaccaactacatcgagtgggccgcggtgatgagggtgaggctgcaggtgtggcacatgtgggaggcagtccggtacggcgacgtcgactacaacgaggatggcaaagaaccccgtcttccacgaacggagcaagcacatccgggtgaggtaccacttcatccgaagctacttggaggaagggagcatcaaggcgagctacatcaacaccaaggaccagcttgcggacttgctcaccaagcctcttgggaggatcaagttcctcgagctctgctccaggatcgggatgacccaactttcccacaagacgacgcacaagacttagggggagaatgatggaataagcctcgtggtctttggtccttgtggtccctctcttgcttttaggttgtttttcccttttaggacagcatcctttcagttttgcttttagcatatttcggttttgcttttagcatctctaggacagcatctaggaccatcacctttatgctttattcagtttggatgctctctaggacagcatcgcgttcaaattttagactagtgtgggcagcaattagcttgcagccatccagccagctatggctatatatatatgtatccaacctccctcgggaaggtatggcttttgtgttttgtgaatgaagaaaaccagaaaattgccccatctcgagtgccatcctcttctcaatgagagtaaccattgaaattctaacacttggtcgtgattcttctttttgcttttgggtagtttcaccttttcaggacagcatctactcctttagcatatttttcagttgctaggacagctgcggttagtaggacaacagcagttagcatctcctttatgcctcctttatgctttattcagtttggatgccctctaggacagcatcccattcaaatttcgaattttagactaggagggtgcagcaataggctag

SEQ ID NO: 24485 - DNA, 2322 bp, Oryza sativa
tatcctcttctcaatgagagtaaccattgaagttctaacaaaatttatggagtggcgccaaaaaaaatctctaaagaggataaccatttccataaacaagaatatgcattaagtagagtttcaactttcaattgttaactttgggtaagattccaaatgatgtagatactacgtgtagagcatgaggggcacaaacacaatcctatagtccaaattgcttcctaatctgttgaattaaatttaaggtctgcagaacagattttatttcctggttatcaccagtaactgactagttctcatctgaattttcatccccggcctcaacattttttttgcagatatgaatactactttgctttattgcgggacttcccagatgtgcagtttactctaaatggaggtataactactattgatcaagtgagtatcttactctagttatgtagttttgataatgcaattcctggaagttgctattttaatgaacaaattgcgtagcgagtccatcagttcaaattaggtcaaactgatgttaatgatacaattttccttggcaataaaaaaacaattttgtttcatgaatgcaaaaagaatatatttgttctctctgtacttagtactagacattcatgcagagaagtagctcttgttgcaatcagatataatatgcctgagtcaagtcatttttattgaacatcagttatattcatttgcaggtcactgcatccataagacaaggtgcacatcgagttatggttggccgggctgcatataataagtatggtcataattagaagcctttgtgtctctaaattctttgatgctttcaaacatgcaaactaagtaactagaatatgtttccttttgttgctgaaaacctgaaacagtatttagttgtaattttaattttggtatggaataaatgttcagtccatggaacatgctggggcatgtggacagtgaagtctatgggatgccgacaagacgctcttctcgtcgccaggtttagcatcaaaggatggttttgttttcagctatcaactatttcttttataagtattaactgaactccttgttttagatccttgagagctaccaggtttatggtgattcaataatgggccaatatggccccagcagaccaaacgtgagacaacttgtcaaggtgtgggttgcacttacatttaatgaaaacaacctattgttagctttatgatgtgatgtagcagggcatttatgtacttgtttcaccttataatgtaattatctgtgacgtatgcaccattgtgttgatcatagctttctgaattactcaagaactgttacttttgtttgcgtatagatagggattctactttatgcctaaaagcctaagatatgagttataaaagataattatagcacactaaatagaaaatagagttcattgaagaaaaggaaatgcactgatcaaacagtttcatctgtttctcctggtattctgagctgcttaattgtggtctaacagttgcgagttctgcattctgtgtattgatctggaaactagatttaatgcaattactatattgacctttatcagtccttttgtaaaatttatgagcttatgcaaatatgtgctttcagttactgagaaaatcgcttgattttgacagccattgttaaatttattccactcggaacctggcaatggcctttggaaacgcaaggctgactctacactgcgtcattgcaaggtaagttataaaaaaaaaagtctatcctttgtcatgccacattacttcttccaacaaatacaacagaagaaagatgcctatactatactcaaatgaattattgtgagacttggttttatgaatacttgtaaggttaattttgatctagtaaatgaaaatgaggaagctgttcaatctccaagtggtcaagtaatcatctcaaacacttaactagttttttttttctaacttaattatctgaatgttgttggtcatcattttatatgctagccagttatgttttaagctacctgaaaatgagaaaatcagtatgaggtgcacaatcatggatttggaattttacaccttgagggcatgtggcccggaatttccaaacctttcaaatatcaattaaataaatggaaaatattcaaatattaaatttaatttatcatttcagaacatttcaatttgaaactcagatgtgtatatgaaggaaccgaagaatgactccacccttggaaagcaagagccaattcatagctatattttgtttcactaatgacttgacaatttgtgcctttaacttcattcaaaattttcatgacgg

SEQ ID NO: 24486 - DNA, 713 bp, Oryza sativa
atccggcgtcgcgcagccgcgggaaggcgagcatgctggggaacgtggcggcgctgtccgtccggagcgcgagcgcggggacgccgagccgggccgccgcgcccagcgccgcgtaccactgcccgtccaccacggcgcacgccacgccggggagcagcgacgccagggcgtcccggaacggggcctcgcaggcggcgttgagcgcgaggagctgcgcgacgatgtcggcgccaggggaggtggcctcctcggggagcgccgcctcgtggatggggaggaaggcgaggtccggcccgtggcggtggcgcgccgggtcgggcgcgttggagcgcgtgtggaggacggtgacggcgagcccccgcgcgcggaggagatcggcgagctggagcatggggctcaggtggccctggaacggcagcgggaacagcgcgacgcggcggccggcgtggggttgccgttcgggttcccgttcttgcgtggccatcgctgccgtcctcggcgaggtcctggggcttgcgacttgcgaggtacaagcagcgagcgctagagagtactgacacggatttctttttcaggtcggtggagaattgtttcaacaaatgcggctatatgatattatgatgcgatggcatttgctaaggtagtacttccattcttatcacttgctcccttctttcaaaataaactaaaattaagtgaccagtatacatatg

SEQ ID NO: 24487 - DNA, 632 bp, Oryza sativa
ctctgatcagaggtgtacatctttacccacaagacacattttcctcacgtgtaaccacgtgtcacataccaccatggtatacggacggaagacatgacatagtttccaacccatcctagccataaacaagagtaccgacccaaccccacctacggccggaacccccgggacaggtaggcaggactgagtccctagcagcaggacaccggccctgtgccatgacatctcgactaccgggccgcagctcgtgtagccttcatttgccctagagatgtccatcgacccccgacttcgtccatctccatccgtgtacttttgtttataaccagactgagccacaaactaagccttacccactagacatgtggaagtacggtagtgctttgtaacagaggcccgaagaccggtccttatatggccgaggtgctactatcaaaaccatgcaccccgagcccagcctaaaaccattttgagggttttgaatagaggggaggtgtgaatccaattccacaataatccaacaattccatagtgtcgaggtgataagagtattcccaaagtctagagttgtaaaaccacctaatgttgcctaattaaccagcgaagcatctacctaaaatcatactagtggt

SEQ ID NO: 24488 - DNA, 806 bp, Oryza sativa
gtagcgccgtagccacgcgaaccacctctctccgctgccgcccccgactccagccgcgtcgcgccgccgcttcggtcgacgccgacccgcgccgttgcctccctcagctccgcaaggacgaggaggacctcggccgccgcccctcttcgccggaaatccgccggagctcctccttcctcggtcgccgatcgaggccgagcccgtccgccccatcccgagcgacgcccgtcgccggagctccgtcgcgtcgtcttcctgaggagccccgtcgccaccgttctttgccgtcggccgcccctttgccgtcgtgcatctcggtgagcactcccctccttttcctttttcttccctttcgttggccgcttcccgggggtcctcgggacgcgctgccgccgccggtggccgttcgaacgggttggtgccgccgcggtccgcgttccgtgcccgcgccgttgccggtggtgccgggcaagcggtttccgccttcccctttgcggcggcgggcctttggttgggcgggccgggtttgttccggggcttgggcccttggttgcggttcccttggccggccgaatgggttaggccgattttggccaatcaagttgttgaaggggaaccgaaggcaagttttgaacaaggtccccggggggccttccccttttaattggttaaaatgtggggccggggtgtgggggttgccggcccttttgttaatgtaagcgaggtccatttcttctgtaaaaataaataataattgcgcaataaatcgagtttaattctagaaattcatttaaatggctcaaagg

SEQ ID NO: 24489 - DNA, 11646 bp, Oryza sativa
caatcccccattgagaaaagcatttttaacatcaagctaggagatattccaatgacgagtagaggctactgcaagagttcaaacaatggtcatgtgagccacaggagcaaaagtctcatgataatcacgaccatgctcttgttgaaaaccacacgctaaaaggcgagctttatagtgttcaagagttccatcagagcgagtcttgaccttaaagatccctttacacgtgataggacgaacatgagatggcaatggaacaagatcccaagtaccagtacgctcaagtgcaacaagctcctctgccattgcatgttgccattcttgatgaataacagcatcacgataagaactaggctcagcgagaacagtcgcaacataaccatagcgatcctctggacgaatcgtaactaaattacgatcccgaagattgtatctcggaggagcaacaggagaagcatcaacagaaggctccataacacgagggcgacgactatagacttgagtaagagggtttaggggaggtagcagaagcaagaagactggtaagcgcagcggaaggaagacgaagccagtcaagctcccaaagatgctgagaatcatggcggcgagggccagtaccaaccaggagacccatgcgtcgatcctgaacacaacaagagtcagaatcaagaataacacgacaatcatgatcaacaagctgtccagcagacatgagctgtatggtcaaatttggaacataggaaacaaaaggaacactacaagaagatgaaagagtcccatgaccaacaacagaaagaggggtaccatcggcagtttgaacagtaatagggactaaaggatgacatatagatgaaagacaagacttatcaggggtcatatggaaagaagcaccagaatcaagaatccacggaaaagtgagaaccaggaacaacaaaatcagattgtgcagagggcaaagcaactaaactagctaaacctgtcgaagcagaagcagtgaggcaacgcagtaacataaggatctcctgtgtatcagaactgcagaactgccagtactcttctgagaagaagagcgagtactcttctgagaagaactcccagcaaccgatgaagaacgactgcgccataaatccttcttcttcctaaagcaaaatgactccacatgtccatctcgatcacagtaagtgcaatgaagatgaccactggaagatgataccacttgagaagaagtatgtgctggtaaagtaaaggaaggagctgctgatgatgaagacactgaagctgtggtacgaacgagtactgaagaaggatgcgatataatacccgcttcacgaagacgaatctcctcagaatgaatctcagttagagcctccatcaaagtaacacgggggtgccgagcaagcaactgtgcacggatcgactcatactcagagcgaagacgtgtgaggaagtcatagatgcggcgaagatccatgtgagaccactggcgctgacaacactgacaagtacgacaaatatcaggtcccaaaggatcaagctggcgctagacagaggataactgtgtatagaactcatcccctgtagcatctccctgctgtaaagactgcttctgacgcaccatagcaagatatagagcatcaccagtaggtgcataacggtcacgaaggtgtgtccacgtgaaatgagctgaagcaagggtaaccacatcaccagtaagatggacctccatactagctacaagaatagcagaagcacaagcatcctcatccaaccaagtcttgtacataacatactgaccctgataagtttccaaagcatcatcatactcctcttgtgcctttgctctgtcttcatcagtagtctgagctgaaaaagtaggcatagcttgagccaaggggaaaggggggcaagctagctcaccaaaaagaacgtcccaaaggcgttgaccacacatatgtagacgcatatgctgagcccaatgattatagttgatgccatcaaaaataactgggcaacgaggaactgaaactgtgcctgatagagatgacattggcacggagcaacgggcgacggcgagagcgcaaatgaaagcggcaacaagcgaaagaacaggaacctctctctctctctcttttcttttgtttttcttttcttttcttttttttaacagcctcggagaaacacccaaacgctggtgcaactgcacaggaaaggcagcaagaggctcttttttttattattttttttagaaaaatcacccgatctggatcggtaccgattcgaaggaaacgaatcgacaccggcgggcaacacgaaacgaaatggcggttggcgctgggcagcaacgagcggcagctgctcgacgggcagtggccggagacgggtggcgaccggcggcggccggagacgagcggcgccgcagccgacgaggggcagcggccggagacgagcggcgacgggcagcggctgaagacgagcggcgccacagccgacgacgggtggcagctggagatgaggggtgggttgcggccggagacgagcggcgccgcaaccgacgaagggcagcggcaggagacgagcggacgacggtagccgacgacgagtgattgccggcggtgagcgacgggcagcagaacgaactggagctggtgacggggacgacaagcggtggccggcgagcatagatgagcggtcgccggcgcagagacaagcagcaccggcgaccacgacgagttcgatgaccaccgcgaaaaaatcgaccacaaaaaccaggtaacgtgtgtggaaaaatctttggatcatctaggacaagaagaaaagtctaaccctagtttaggctctgataccatgttatgaacagcacttttattcaccttagggcaaaaggcccaaatatatacaggtacaggaatacacaaatatacagaaaaaccctttacaaataaaggaatataaaatctaaatatacatctaacagaaagaagctcaaatataattggtaaccagaattttggtattaattggagccggttgggaacaattaccataggcaaaatgattgcccagctttacatttaggtgcaaatcagacagcgaattatttttatgaaaatgacttacagaattggtagctactttggctaagcttggcaccattagtagccctactaggctattatgccccaaaaagaacatcttaagtcatttggagcaagtaaactagtctaaaaggatatgcctactttgcactttattttatggtatctggccagaagcattgctacttaattagacttcactctaggccagatatgattacctcaaaatgcagaaccaaggcagactaggcaaggttaaccacttaattaggcttctcgaaatgcagaactaacataatcaaacttctatatcttgtaaagtaggggctatatgaagttcacccaaactgtaacgctatccagttttcttgtctccagtgccgtcaatggggacacaacagcaatgaaatattaaaatgtggacactgaccagttctcgaatgtaatttatgtaagtatggagatcaagatcttggattgttaaaaaggacatagacctctgttagaatttcaatggttactctcattgagaagaggatggcactcgagatgggacaattttctggttttcttcattcacaaaacacaaaagccatacctacccgagggaggttggatacatatatatagccatagctggctgctagcctattgctgcaccctcctagtctaaaattcgaaatttaaatgggatgctgtcctagagggcatccaaactgaataaagcataaaggaggcataaaggagatgctaactgctgctgtcctactaaccacagctgtcctagcaactgaaaaatatgctaaagggtagatgctgtcttgaaaaaggtgaaactacccaaaagcaaaaagaagaatcacgaccaaggaccacaaagacttatccaacattctccccctaagtcttgtgcgtcgtcttgtggggaagttgggccatcccgatcctagagcagagctcgaggaacttgatcctcccaagaggcttggtgagcaagtccgcaagctggtccttggtgttgatgtagctcgccttgatgctcccttcctccaagtagcttcggatgaagtggtacctcacccggatgtgcttgctccgttcgtgaaaaacggggttctttgccagggccagagcggacttgctatccaccctgagctccaccgttccagtgtctctgccgaggagatcactaagcagtcgagcaagccagagcgcctgggtcgaagtggcggaggccgccatgtactcggcctcgcagctggacagggccaccacctgctgcttgaccgactaccagctaacgaggcacttgccgaggaagaagagaatcccgctcgtgctcttgctggtgtcgatgtcaccggcgtggtcgatgtcgctgtacccgacgaagtgtgccttgccaggacacctcgggtagtagagaccgtggtcgagagtccccgtaacgtagcggatgatcctcttcacagcatgctgctgctccgtcgtcggtcactgcatgaaccgactgacgtagccgacggagaaggccaagtccggccgtgtgtgggtgaggtagcgaaggctccccacaagacgccggtactgtgtagcatccacctcctccgccgtgctgtcgcggctcagcttcagtctctcctccatcggagtgagagctgggttgcaatcggtgagcccagccagctcaacgacgcgcttggcgtaggcggtctgtcgaagcgtgatcccggagtcgtcctggtgcacttcgatccccaggtagaaggagagaggccccagatcactcatttggaaggtggccttcatctcctccttgaacgccgcaacctccgcatccttggtgccgatgatcaccaagtcgttgatgtagacacccaccagcaaggcatttcctccattgccccgccggtagatggccgcctcgtgcaggctttgctcgtagcccatccccttgagcgtggaatccaacttggcattccacgccctcggtgcctgccgcaagccgtagagggccttgtgcaagcgtagcaccttgccctccttgccgggaatcacaaatcccggcggctggtgcacgtagacctcctccttcaagtcgacattcagaaacaccgacttgacgtccatgtgatggacgccccagccttcatgagcaaccagcgcaagaaggagtcgcacggactccatccatgccacgggagcgcaggcatcgtcgtagtcgatcccctcctgctgcacgaaaccgcgtgccaccaagcgagccttgtgcttgacgatggctccggcttcatccctcttcagcttgaacacccacttaagggtgatcgcgcggtgaccacgagggaggtcagcaagctcccaggtgcggttctcctgaaccgcgtccatctccgactgcatcgcggcacgccatgccgcgtgtttctcggcctctgcaaaagaccgaggctcaccgtcgtcgcacgcaaggtgcaactgcgcctctaggtcgcgaggcaccagtcccggcaccggctggtcgccgagaagatcctccatcgtacggtaccgtagctgctcgccgtcgtggtacgcgtcgatgcgctccccgtcgtgggagagcggagtagcgaactccaccgggctgcgctcaacacgagctggcgtcggagtagacgtgcttggagtggctgttggtgctggagcatgtggagtcactggctgaggtggtgtcgacgaagagctcgtcgtagtcgaagtcgtggcccgagggtgtgttggtgtcggagtcggtggagattcgggggctggggtagacacgctcggtgaagaagagctgcctactcccccagctccctcgaagtggacgtactcgacggtgaagtccaaccatcgtccaccgccttgtcccatacccaccctcgcccttcgtcgaacacaacgtcgcgcgcagtgcgcacacgctgtctccgggtcgaggatgcggtaagccttcgagccctccgcgtagccgatgaacacccctggggtgctcctgtcgtcgagcttgccgatgtggccaagctccttggcgaacgcgaggcagccgaagacccgcaggtgggagaccgccggcttgcgcccatgccaagcctcgtacggtgtcctgccatcgagggccttggtaggcgagcggttgaggatgtaggcggccgtcaccaccgcctccccccagaagatggccggcatccccctctgcttgaggagggcccgagccatccccacaaccatctggttgcgccgctcgacgacgccgttctgctgcgggctgtacggcgtggtatagtggcgctgaatgccctcatcagcgcagtacgacgcgaattcagccgctgtgaattcgccgccgttgtcggtgcacagcacgcgcagcttgcggccgcactccgcctctgcagcagcctgcgcatgcctgatggcgtctgcagcctctcccttgctgccgaggaccatcacccacatgtagcgggagaggtcgtcgacgagcagcaggaagtaacgtcgtcctcctggtgtggccggtgtcactgggccacacaagtccccgtgcacgagctcgagctgctccttggctcgaaagctcgtctgctggggaaaggggagccgccgctgcttcgtcaccacgcagacgtcgcagagctgctccacgcggtcaaggcacggcatgcctcggaccatctccttggcactgagctgcttcagggcctcgaagtggaggtgcccgaagcgctcgtgccactgccacgcctcgtcgtcccgacgagcggcgaggcaaactggttgtgcgacttgcgcgctgaggatgtagagtcgattagtgcctctggttaccttggcaagaaggcgacgacagcgatcccaaatcctcatgagtccgtcctcgaccaacacgcgtgagccgttctcatccagctgttccacgctgatgatagaattcctcaacgcggggatgtagtagacaccggtgagcagcctgtgctcaccggacttggcagtgaaggtgacggagccaacacccttgatctcgacgccggaggcgtccccgaacttgacggagcctcggacgctggagtcgaactcggtgaagaactcccgtcggtcggtcatgtgatgggtggagccggtgtcgaggtaccacccatcagccttgtcgttgctggagccgttgcagagggagacgagtaccttcggctcatcaaggtggaggaaagccgctgcggccggtgccgctggaggtagctcaatgtttgcatgagctgggagcaaagccggctcttcctccacccgtgcgacgtggacctggccgcgtcgtggctgtcgacagtctttggcccaatggccaagcttgccacagctgcggcaggcgtcgtctcgtgccggcttgtggttgccggtggcaacgccctgggcgcctctgcgggcgccaccctcggcatgtcttcgcgcccaccgtagctggacacctccccgcgccttgcgcggcttacggccgcctgtcggggaagatgactcccccttcctcccgttaccctgagaggcctcccactgctcccgagtgagatggagcttcccgccgatggtgatgggccccaagagaggttgtggctcatcaccatcgacgaccttgaggcgacctaacgcctcctcgatcgacatcgtggagaggtccagcagagattcgatcgagcgagcgatctgcctgtacttctcagggacgtagcggaagagcttctcgacagctctctcctcgtcgtaagtgtcgtcgccgtactgcaccattttctgcaagagagtgttgagacggagagcaaagtcatcaacatcctcacctggcttgaaggccaggttctcccactccttgcggagtgcctgcagtgtggacttgcgggcgcggtccctgccgatgcgtgccgcagcgatggcgtcccaggcctccttggcagtccgcttctgggaaagcgagaactgcatctcgggcgggactgtagcgatgagggcatccagtgcccgccgatcctcgtcgtagtcgacgtcgccgtaccggactgcctcccacatgtgccgcacctgtagcctcaccctcatcaccacggcccactcgatgtagttggttttggtgagggtaggccacccaccgccgggaccaaagtccctgaccaccgtctggacgacgtggtgaccatggcgccgatcaggggagagagccgcgctgcctgcgagggccgcgtgcgggctccgggctgccgccggcacgcccgcgcccgtctgggttcccgtcggcgggcgcgcggtcccttgggccgccgccgccgccgtggaggtgggctgctgcccaccgctctgcccgctcccgtgccctttctcttgccagctcctcaagctccctgtcggcggtgatgttgccggcgatagagtcgttgatgctgctgcgcaaggtctcaacctctacctccgccgcacgtgccgcatcttccgccgcctccgcctccgcctccgcctccgccctggctgctgccaactccgctgccgccagtctggccgccctcgctgctgctgcagcggtctgagccgttgctcgcctgcgctcttctgctgcggcgagctcggcgtcctgctgacgccgagtgctcgaggcgaccgaacgccgagaccgagcgtcggacatggcgcacctccggggggctgctgcgtggagagggggaagggaaaggggaaggaggagcaaccggtgctgctgctgctgctggctgagagctcaaccgagcttgggaaggggtggaacaagagatgtttagcctacaggaaagtgtggctctgataccagatgttagaatttcaatggttactctcaatggttactctcattgagaagagaatggcactcgagatggggcaattttctggttttcttcattcacaaaacacaaaagccatacctacccgaggaaggttggatacatatatatatatagccatagctggctgctagcctattgctgcaccctcctagtctaaaattcgaaatttaaatgggatgctgtcctagagggcatccaaacttaataaagcataaaggaggcataaaggagatgctaactgctgctgtcctactaaccgcaactgtcctagcaactgaaaaatatgctaaagggtagatgctgtcctgaaaaaggtgaaactacccaaaagcaaaaagaagaatcacgaccaaggaccacaaagacttatccaacaacctcaatggaatacctgattgaatcattgacaagtagccttgccctgacaagtttggatcttgctaggtcactgtcctccttgtcactaataaagtttagcatggttagccttgccaagtgtaccaaagtaacagctacctgtaacattaggaacaacaggaaatcaatcactgtccactggagatggaatcatttcaaaaactgtgttaagtagtcgcaatacccagttagaacccaccaggtggactaggttccagctagttgctagtgacaaccagtattaaattgattgtatatgaaacggcaggaaaacccaattctcggtgttattgacttttcatgattccagggatgcaccttcaacagtaaatctcgcaataacatatttgtggaagactaaactgtactccctccagtcacaaataagtgtcgacttttcaaagccaaaagccaataagacataactttgaccacttaattcaattccataaatccaaaatgagttgcagaagcgtgacattatgaaagcttttttgatataacgaatttggccatgttattttcatatacccagatctatattctaaacaataatccctctgtcttaaaatataacaacttctagcactaagaattttgtccaaaaatattacaacttctccatcaacattctcttcccaaccaatcataaccctccaccattcaatttctacacctacctccacttctcaaccaatcacaacctctccatttaattctacttactttcttaataaccgtgtctaacactaaaacttcttatattctgggacggatgtagtaataattatgtcgcatggattctaaaacaacacttatttgtgactgaagggtatctatatggtaattattattttcattagattgatccaaatatttgaggatcatagcatcataatgctactattagagtattagttttgattgccagtttgccactagagtccccagttccccaccactaggcattttgctgtatcacctgacatgtaggggtgcaccgtgaactcaacatagcagatgcaggtcacatggtcttgtgtgtgccgtagctgccgcaaccatcagtcaacaatgacaattgccattggtgatatggacaatactctacctaaagcaagggagtcctacattcttcaacaaaacatttgcatttcttgggctcagcttctcaggacacagcatgcaccaaggaagtgaaacactaatgaagcaatctaatcatgtaatcatcaaactatggaaatggtgataatcaacatgaattggcgatgccaccatgacctagtaaaatacatatggagcaacagtgattacattgcttcccaatcaagcatcgtggcaggggcacatggcacaaatacctcccagtctgtgttaattgccaataaagcagagcttgtggtgaaaaactcaaatacctggtaagtgatctggcaaccataattttaagaaacaagagaattgtgatcatgtaagaaagctcgtgagttttttcattgagatgatgctttcatgttttatttccactaaagatcacgtgaaacattaaatatgatacaaacctgaaaatgttcctcagacaaaatcctttttctgacttcaaggcatctaaatataatacaaaaaataaaattatgttagtaagaaatttaaaaaacaatcaatggccaaaataaacagcttttacgctccacctttccaataattcttcagattccttcaacttccccatggtttgaagagtcattgttaagagttcagctgcattcgtagtgtcaaatgaatcccacccctatcaaacaattgcaaagacgaacattgataggttttgtaaaaaaattggatgattcatgataagatttgataaagacttaagaggttgttcattaaaagaatatgacatataaggttagcatggtccattaatagactcattatgaccgagcctgatattgctggaatatttgtgttaattcccttttcagtttaccgtggactatggtgcatacaaaaataaactactacagggagaggggatagggacaatatttccatcggttgctaagaatacagtattactggaacatggctgaggtggttggcttggtttgttctttccagggtgaagatacaactccatccttatatagctaggctaacttgacccataagggtatgtacaaaggtagagtcgctcttagttaatacatatcacttagagattatcctccaacaatagttgagacaacaag

SEQ ID NO: 24490 - DNA, 1268 bp, Oryza sativa
taattattcatgactcggaggaacacctttgttgtgtgcaaagtcttctagttggttttgcaccaacagattttgatgccagcatggatttttattgtgctctgaactatcgaccatatgcttccgtagttggtggcgactttgcaagcaacaaaggatggtgattttgttttcttctggtttacaggtttatgctgccgtggttttttgtttgatttgcggatgtcatttgcccggcaaattttacttgtatcatgactgctccattttggaacacttaagtaagcttccaccggggcaacgaagtgtgctaagatccactctttaggattttatattcttatactcaccttgttcttcagaagcttctttttcctgcctggaacaacttcagaagttgatatttgcaaaaatatataattttcctttggggtcataacacaaaccattattgtttagtagtaaaaacatgggcatttaacattttcaatataggtagagtcattgggtgttcgctctttttccataactgtagcgttggcaatatgttgccgagttcgcgaggatagtgggcgaaatgctggcaaataatcctaagacctggctttcttattagacctacctcaacactatttgaaatataaagctataataactacttgttatgtctgtgtcgtgtttttgaggtgtctactagagatcaggtattacaaacattatgtttgtttgcgcacataaaagaatataacccctaactgcggtaaggagtattaaaggaataaaatatcttaatttataaaccaagagtagataagaggatataaaacggtaatattctcaggtccagaaaaaagtttggtaatcttctccctttggtgggcatttacgcaaggtactgatattttgagtctcgattatactccacattaaactagatgatgccccgcgctttgctgcgggatatatatattagatattgtagaaatgattaaatgatttggattgaaatattgtgaaaatgatttgagaatgatgtttatgtttagtttagttttagaatgaaataaattgtagatataattactatatgtttgtatgttgagctttatgtgattagtaggttgatgtggcatgcttgcatgctaggctttaggggtactaaggccatgttcaacgctccacgctggagctggagcgtggtctcacccttcccaaggggaatattcatgtcacgtcgaccaggaccgcaccctcacctagcgccgcga

SEQ ID NO: 24491 - DNA, 712 bp, Oryza sativa
taattatttggacaaaagagattctttgtccaaagaacacaaaaaaaaatccaaggattacaagagtttgctttgttctcataaatatcaatgtgaaatacttacaccaattaacttagccacttatgattcacaaagataagatataactaactagcctatcaatagcaatttgagaggacccaccgtcttccaagcagcgtgccactttgttcttaagctcatttgctctttccctcatctcagctccctcatttttccccattaatttcataatcgctttctcaattttgcaccactctaactttccctcgagctcaaaccctacaccccacaccgcttccacgtaccttgtatttatcatctgatctgcgaattgaggcctacatatcataagaactccctcacatatactctccaatatcgagttccatccaccgtgtgtccaaaaccagcccactgcacagtgtgccagcacctcctgctgtggggcccacttaatcaccttacccctaccttccaccgcactctcaaacccatccggcaagcatgctctctccacccccctcacaaggtttggacgaaccacccatagaaaaggatggccgctcttctccaacccaaatgcgacctccatgaactcgtcggagtccatggatgccaagctcccaaagctcacgtacaacacggaccctgtcgcctgcgtgtccag

SEQ ID NO: 24492 - DNA, 680 bp, Oryza sativa
tgtgagtgcaagcccccccgtcgagcgtggcgacggtcccctgaggtatctagaaatccagatcctcactgtctccgccatcatcggcgggggccttgttcttggcctcctctcaccggtcgccggtcgaggtcgcgggggctttgccctcccgtcgaccctgccgcttctcctcatcagcctttcgaaaccactcggccaaattcctgaccgagcggcagtcggcgagactgtggcggtaggtgttgtgtaccgaacacacccaagttagtgttttaattcttaaaacctgcctaacaactaaaatgtggaatggttggcctgggttggcttgggacgagctgggacctagggtcgggttgtcagttcggtctgaatcatcgtaggccttgggttaaggcaggttcgtgagggttcacggccttgattaaataacactgtgtaactctaggatcgtctttataaaatggatttgggcaactaagtgacttttaaatgctgttttctgcaaaacttaacccctatattattaccccttgtacccccttgcattaatcatgcatctgccggtgtggcttgctgagtactgtggttgtactcattcttgctcaatcttccccccccccttcataagagaagctttggagaagaagtcttaggtggagtcctggcttataccc

SEQ ID NO: 24493 - DNA, 2055 bp, Oryza sativa
tcccccaaatagtgagataggtggacttttatcccatcccccaaccagaagccatcaaacaaggaaaatttattttaaagtgagatacaaaatgatgaaaaatatgattgaattatttacagtggatataattttattttaatttttgaggttttaaagtctttttttaattcccgttgcaacgcacgggcattcagctagttctgtatgaaatctgtagttatcaacctgaaactgtaagaaaaaaaatatgctgctccgttactgtgtcaatttacatatttacacttagtcactactgtgaacacataaatgataaaacaatagtgttaaatgcacaagaaaaaaattaagattttgcaatccatctccttaattatgttgtatacatctaaacagtttacgctttccactaattgttcacataacagatttgcaatttattattgattctgactattatcttgactggtaggggaaacattaaaatgcattttaccactggcatttactaaggatattaaacttcggtaatcagtgcaagaacttcactgtcctttgctaagtctattggcttatgttgatatgaaaggttaacaaatattgtctctggggcagggacatcaaaccatttgtttgttctaacacaaagaacaacatggactgttccgtttgtgtataaaggcatcataagtgtatgctttttcacggaaactaatagttattacctaaagaaaattcaaacaatctaattatcgccaagagcaatatcaagatgtccagggtgaaggatcatcaaatcgaattttgcttatccaattgaaactaaggacctaatcatcagcagtgtagagctgattatttagcattggaacttaatgatttaattgtccattagtgtcagatgttagaacatgctttttggcaatggtgatactaaaagagctacactaagaacaatgatttatagttttatgttggttccttttatgttttcctgtaaataaaattgaattttctggttgaatttaactctagcacctatttcaggatgacagcgtatttcagcaaaatggggtggccagctaaagcaccaaagactgacgacgaaagaaaggagtttattgcttcgctgcacaagaggaaaacagaattattcatggctctgattgagaagaagttgcttcccctccgtccaggtgttcaaaggtcatatattttacatgaatttggactttagcaacttaatgcacttcaaaagttctaacacttcgatatcctgctttgctactttaatacaagtcagttattatgtcttgtggatagccattagcaattgttcatctttaactctcatttgcattctgcaacatttcattattcttttgctctttctcaaactatgtataaactgcagttatattctagttgtagccaagctatttttctttgctggaaaactaaatgcatcttaattaatattgcttcttgtacttacaattataacatgaaatcatgacgataattgaaacaagctttacagaagtaatatcatgaacttcactgttttactttctgttgaggaagtctgcactacatgcattaggaagacataacaatccaatcccactatggaatgttgaatttactaacttcggaatatgttgaagtaaattagtatggggtaagttacctagatgttttaattacaatttacaggttaatagatgaagccctaggaaaaggagtgaaagttgcagtatgcagtacttcaaatgagaaagctgtgagtaacacaatatttccaccttaaatgtacttttatgaagttaattgttaggattggtaataacaattgttttcattttttatgaaatctttcttctgattttttcataaggaaatactccaatagtttcttataaaaacttaatatgtactatttttcacactttttaaatagtagtacatgttgatagtagctgtgaacttgtatgccagatagctcacatatttatgcttgactgaatgcaggtttcggcaatagtttcatgt

SEQ ID NO: 24494 - DNA, 11116 bp, Oryza sativa
gttgtcttgagagaatacggtgttccaagcaagcacactacaaccaaaccctgaaaagaaataaagagaacttgccagcagcagtggtgcaagtgctgtacctgagcggccattatttatttattatgatatggcccagatagtgccttcctttgaaagttgctggttcactcaaatgaaatcatgatagtttaatttgatgtttgctggattgatgatgattccttcaaaatgatccttacatttatttaataatagtatgttttttttatgaagatcaactcttctttcaaccaaattaagttatatttgcttatgtaggaagtaattaacttttcttgtgctataattggattcctggatttcatttctcacgagagagtatgtttctttttatctttgcaggcaatctacttacttgcagcaaccacacttggagtcgatccatctaggtaaggaatgcctgggtttctttctgttgttctgagtacaaatgtttaatgactgttagtacaaacttgtaattaatatttgtagagtctactgattaatgaactagcttggttagatgttaattactgcttgacaactctcataactgttaatccattcaaatgtaaaagaaatattgtgcgtcctttaacattatttttttaagttacattttttttaaaaaaatgtttttataagtaagcaattctagattatttttccagtaaaaaaatataataaagctttgtcgacatatgatgtattttgtaataaataccatttttatcaacagtttaatagtttttcagtttactaacaccttttttcttggatatttagttgtgttgttgttgaagacagtactatagggcttgcagcagccaaagctgctggtatgaagtgtatcgtaacaaaaagcgggtaagattttttttttccatgaaatatttcagttgcatcaaatcgctttcactaattttgcatgtattccataataaaggcatctgttgatctcttctgggtggaagccgattggattatcattagctgtagcaatagtgacagtattcttcttctttttcttttttttttgaaaatgcatgagacctgtgcttcatctcattaagaaggaaaataaaccacccatacaaccaagggctcacgagcccttcacagatccacaaacagcaaggtgacacacgaccaaaaccactctactgcagcctagtgcccttgggttagcgacctacaaaggaaaacttggaacacaagagctccagtcaggcaccaaactagcttctattgatactgcccacaacacctccatgatgtatggatttgctctgttgaaaacgcagtcagtacggtgtttccaaatttcccaagcaactaggatgatcaatgaattcagtcccttttactgctccttaggtacattcttgacagctttccaccaccatttagcaaaacgagttaccgaaggttgaggggcagaggggcagcaaccgccattcccagcttcaagaaaatcaaggtctgaacttgccgagagaagacacatgagacaaggatggatggttacgtccttttgatcacatagtggacaggttgccaggtgtgctagtccatgtttggcaagtcggtccactgtccaacaacgattgtttatggccaaccataggaaaaacttgcagtgtagaggagcccaacttatccaaatacacctccaaggggcatacttgatggatccaagaaagtaagcattctaggctgacttgctatgtgtagggacctgtagttgataacttccatctctgttggtccggcacatcattttgtagagataacccatccaccatgtcccaaatacgaaggtattcacaaataaccttttttttcgataatggaagctttattaaaactcagtcaaatacaccaagatgatacatttcaactgagcccactcccggcctctgcataagatgcacacagccacacacaaagaaagacctatgtatacccccctcacgaaacaaaaaatattagtggctatcaatccgtagactagatcaccaaccatgctcttgggtaaaaaattctagtgccacctggtccaaactttgcggtaccaccacaatagtatcccgaagacccggtttgtagaggatagccaaggtgcgaagccatcgggtgactaaagtaatagcctgcaaaggagaagacaccatcttgttatcaaaaattaccccatttctacttagccaaatggaccaacaaagagctgttgcacccatcaaaaccagatttctcatgtctttaggaacacatgtaagccaacacccaaacatatgagtcacattttgaggaggttgtaagttataggccatatgaataacagaccaaaccaagagagtaagatgacattggaagaacaaatgttgaatggtttcgtccttatgacagaagcaacatttgttactacctttccactttcgcttagctaggtactttgtaagcctgagttgtaagacctcctttagtatcatccacccaagtaaataagacttgtgccactgtgcaatgtttccttgcccttcggagagccttcccagaaagatttgggggtttggggccaattctgcagttgttttgcctttcagccatctatcagtccagaatttggtattctccccattaccaattatgcattagctaattaactgtatatgtaggacaaccctgaatgtgctattgaaataggtagattaggttgctgttaagtttctattttatgttattcgtcattgctttcttctgttctgatctttcaatctaaataaataatacgtgagaattattcacctcatgttccaatgaaatgtacgtgatattatgtttttgggggcgctgtgcagatacactgcagaagaggactttgcaacagctgatgctgtgttcgattgcattggtgaccctccagaagtacgctttgatttggagttctgcgccaacctcctccagaaacaatttgtaagctgaaggagcagacggtcaatttcacccatatcatataaattctataaattcttgcccaggattatggaaagcggaaatggtctctataaaatcattccaaatacaagagtcaagaggaacagcattgctttatatactattgatatttgttatttatgtatagaggagtacatatatgaacataatagaataagaaatcgaaatatctttaattgaaatttgttactaaatctgtcctaaaaacaagttcacttttctaaccgattcatggcagccacttgtccaaattcttgtagaaaaatgaagtcttttttgacggaggaggtagtacttttcagtatgtatgctttgatggcttttaatcgcttggcatgctgatccaaatagtgggttccatgagcacgcgtttttaatggattagctttgaacgaaaaatgaaagtttgtcatgacagtggtcattggttggaacttgtaaccatctctagactctaggttttttttttcaagacaggcatctaaagttgtgcaaagcgtgactatatggctagtattatagaaaacgataatatcaataataaatcgttaaactagacaaactcagtagcttatattagattctatatgtgtcaaaaaagcaaatacaatatgatgtaacggactttataagggtgtgttaggttcatagtcaaagttggatgagatatgtcggtccatattttgttggatatggttatctagttttttatttggttaagtgaatatggcgatgcaattttttgtttggtcgtagggatgaaggtggattttgagatctaatttttttttttggctggagggagtaggtgcatttgcaggtgtagtcacctctcacttgagatggtgaatatacccccattaaattaatacataatacaaattataaattctccaacaattttacaccactacctcctttataaatacacatagaaaaaagaaaaaaaagaaaaaggaaaaggaaaaaggagaaaaaagcagggtggatctcggggctcgctgccgctgcctcctcctatcggccgtcgctgctcgcctcctcccaccagccgctgcaacctcctcccaccaacgcggcgctcgctgctcacaccggccgcagcgaactgttgtcgtcgtcgccgggttcgcatcgtcgtcatcgtcactagccgggcttgatcatcatcgtcttcaccgcggcgcttgtctctcgcgccggatccctggctcaccgctgtcccctcttgccacactagccgcagtgcatcgttgttgtcgttgccgggctcgcatcgtcattgtcgttgccgccgcgcttgtctcttgcaccggatctccgagcttgccaccactccctcctccaaccaacacggcgcttgccgcccatacctgccgcaacgcattgtcatcgccatcgctgggcacgcattagcgtcgtcatcactgtcggctcgcatcgtcatcgtcatcgccccctctctttccatggaggccccgctcgtccgatcgctcgggcggccaaccatccggcatctgaggagaatattcccctccgggccgccatgtcccacttccgcccaccaaccaaacacccaaaaaaaaacgagcagccatgtcctatccacccaaaacctcccatctatgagaaggatcgcatgacacttgtgtttatgaaaatgagagagaggtgcgctaagtattaatggtgtagtatatatccatatatagctattgtgtgagtgtgttattaggtcgactatggataatgtggatatattattaaacttactttttttatgcaaaaaaacttgctctttaagctcaccagtgctacatacagacaaccttttttttttcattgataataaaatacgagaacacgtacctataattttcgggaattttcgagtacatcttttttacccaatcaattagaattcaggttaaagaaggtctttttcctcgtcgtatcctttatatggaaatccggggccagggggccattcccttgacttgtactgatgagaagttttttactccacgagaaattgaacaaaaagctgccgaattggcttatttattgcgcataccaatggaaatattttaagtaccaattgaattttttgaaatgaattgaatgaagaagaataggaagaagaaaagttttctcaacacgagggaaaaggtcccttcgaaattgcattattgtaaggggattttgagtatttatctaaaggaaggaacaaatgaggataagagaaaattgcttctaatttgtccaagtgggatatatggcgtaaaaaaaaaaaggcaagaacaaagaggagcgacacgcctgtccacatgcagttggcttccaaagtcgttgcctcgcctgttgcgagtgaacacggaacaggactctggagccactgccgatgaccgttttttcatcgtctttccaggaaaactatggatgacgccgttagctaccacttcacgtctccactctccacccaggcacctactatacggctccacccatagtttttcctatgaggtcttttaaggtgcttgagaggtacctccagtacctcctctcggataaacactcaccattgattcaataaggacagtttaggaataaaaatattgtaaacatggatagcactgtaactttttacaaatgtttccgtctctaatatgcttcttcggcttctgtagtgcttccgaattccgatacatgttcgtgggactcattcaatttccatatcaatcatttactcctattttgttgtgacttaggcacgttctccctccgttttatattataagtcattttgattttttttctaatcaaacttatttaaatttaaccaaaattatataaaaacataataacattcttaacacaaaacaaatatatgtaatattagattttttttttaaaactaatttaatattttaaatgctactaatttttcatgtaaatttgttcaaatttaacaaaacttaagtagaaaaaagttaaaacaacttataatataaaacggcgggaatataactcttttttcccttttgttgagatactatgagaatataccatatagattaaaggaaaatatgtacacgattattatcaattaatttctcagtttatcattaattacacaattactaatcgcgaggttagtggcgcattagggcagtcccaacccttcatctaggatggtgtctataacattaactacattgccatgtaagacttttagcttatgtggcactatattaattaagagagagagtgaagagaggaagaaattgggtctcatgcaagacacagcttcaacgcgagaacctatgcattagacactatcaagttttgcattaggagagaatagtgtcttcataatagatgaagaataaatatgattggtagagaagagagatgatgtatttattaatggcccactttaagaaaccataggttgtagagtgtagtttctattgtgatgtcttattgacatggcaccatagacactacttatagacattatgggttggcactgcccttagaccccctgccgatcacgccacgtcatgatttaattaccctctctcagcctgatctatgcaaaatcaagataattacctattaaactttccacttaatttacggattaagtaccttggcctattttttactacctttcagaagatacctctctatggaccattagattttagttgattaacggaccatataacttccgagaacccctcttttcgggcaaaatcttctcggtttagtgttaaccagcgacgaacaaattatgagaggaagtactgctacacgtgctgaagtgcatgcttgtttttcctcttagatatgtatgtctttttctttcttcttataaagttttctttcaaattacttatccgatctacaatccggttgcaccattgtgttcgttacaattaaatcttcacaacaagatcttacatgattatattacgatgaaaaaatatttatatttgtaaattacttttattatatacgtaagttacttttatcatatatatatatatatatatatatatatatatatatatatatataaaagttacttttagatttgactaagttacttcttagaaatataaaagtaaattcaataaagtctaaaaggtatttacatgtattaaaaaagtatcttaaaacaaaacggaagtaactttgtcacggtattagaagtaaattcattaaagttactttctttttgttataagttacttctataatatatgtaaattaattttaagctttattgaatttacttttatatatcgaagaagtaatttagtgaaatataaaagtaatttagatttattataaaagtaatttataatttttcatcaaaatataatcatgtgagatcttattataaagatttaattgttacaaacacaacgatgtaatcggatcgtagaccggataagtagtttaagagaaaattttatttaaagtatagatggataaagtctcctacaggtggagtggtactagctagtcacgtccctcttttcgtgtacctccagtccacggctccacccaagagttttctgttttttggtcgtcaccaccgtcacgccgtgccgtgcagaccatcctctctctcctccattaccatccgctccccccgactccgacgccgcgcaggtgcagcgcaagcatggcagagtaaggcggagacagcgtcgcaagcagaagcagctctgacactcgccgccagattccgctccccaaacaccgcactccaattccctcttcgtcgggtgcatcggccgcccaccaagccccgcccgccgaacaccatggccgccggctacggcgagcagccgctgccgctggtacaggaggccaccgcccgaatcttctccggtggcgcagacgcgtcccgcaccaccgtccgattggcccacttcctcctcccccgcgcgggcgcctcccacccgcccgctctcccgcccctgcctcccagcgatttcggccccgtcctcgacgacggcctcaaggtcgagttcaagggctgggcgccggaatcccccaagctctggaggcggtgggtcgccaagctccgcccgcgccacgagcccctgtggcgtaaggttgggatcctcgacgccgtcctcgccaccacgtgccgggtgcgccgcgacgagggcgcgctgctccagctcgccgccttctggtgcggcgagaccaacaccttcgtgttcccctggggtgaggccacggtgacgctcgaggacgtcgcggtgctcggcggcctgccgctgctgggcaggcccgtgcgcgcgccgccgcaggacgcgctccgcggcgacgtggacgcgctcgaggccgtacgccgcgctctctacctcagcaagaacaagaacagcaggcccgaccgtaccgcttgggcgagacatttcctcgagcgccctccggggaaggtcaaagtcggcggcggcggcggcgacgaagcgtgcgggcgcctcgagcacggcgcgttcctggccatgtggctgtctctcttcgtgctaccggcggctccgttcgatgtggtccggacggaggtgctcccactcgccgcccggctggcgcgcggccgcggcgtggcgctcgctcctgctgccctggctagcatatacagtgatctctccgcgctcaagcgctacatcaatttggagaaaagatatcaggccttcgtcgtgtgggcacccctgcaaatcgttcagctttggctctggaagcggttccctgagcttcgccctcctgagaccacgggcaccaatcaacctgacggccatggcatacccacggaatcccagtggcaaaatgctctcaaggtgcttgaccccgtttatgtccacgcagtgttcatgtcacccaagaagtttgaatggaggccctatgggagtagcagcttcgcgctgcggccagagatgggtagccatcgtgttcacggccaagatatagcagaaagtgcagaattgttatccttcatactatgtttacgtgcttgtgagcttgtgggcatgcgctgcattgagcattaccgtccgcatcgtgttgcaaggcagctcagctttgaccaggatattcctggaactcttccccgtgttaactcaaactgggtggctgcatgggaaacatacaaaatggagcctaagaaatttgtattcattgttcccaagtacaagcccgctgttacaattgattatgtgcaatggtggaagccttacttgttgggatgtgctgctgctgttgttaaagctaggaagatgaaagaacttccacttttacttagtccaagaaaaagaaagattgatgtgcctcctgatgttagtccaaaaagggtaggaaatggtgcaaaggaaaaggcagtggaattgtcgtttgaggcaccaataggctcagtaagcacaataaacgaattatcttgtgtatcagccaccaaaatagtacaaggcaaatcttttcagcaaggtaataaggaaccaccagaccttgtcgttgcacatgacagagagaatagaagctcgctacatagtgaagtactgcaaaatctccttgttgaggatgccacaaacactggcagcaatgaagccttatgtgcagtaactatagctgatatgcactcaacagaagtgtcgtttgatgttccagttgccttagtaagcattgtagatgaattaccttgtgtgtcagcctccatagaagaacaaggcaaaccttgccagcaagataaagaggaagcacacaacctttctgtcacacatgacagggagaatagaagctcgctacatagtgaagtactgcaaaatctcgttgttgaggatgccacaaacactggcagcaatgaagccttaggtgccataactgtagctgatatgcactcagcagaagtgtcgtttgatgttccagttgacttggtaagtattgtagatgaattaccttgtgtgtcagccaccaaagaagaacaaggcaatgattgccagcaagataaagaggaagcacgagacctttctgtcacacacgacaaagagaatagaagctcagtagtttatgtgcactcaacacctgttgtggctgcaaacactggcaacaacaaagcctttggactttcacccataattgatgtgcagtcagcacctgaagacgttgtggtgatcagcgatgacgataatgaggatgaggtcggtgggatgcaccaaaaaccaccgcagttggaaacagcaccatcctccttagaagggcaaaatgcagaaagtcagataatcagtgcaagcagtaatcctcaggacagccgagtgatgaaagatgttagggtccaaagcaattgtgatcacgaaactgataatgttcgaagcaatattgttctcagaaaagaatcatttgaagtacttgctgttgatactgtccagcctggttttaatctcttggatacaccaacaggggaaacgcagacatgcgctgttacaggacagatagacaagggatacatggtggaaaaagaaattttggctggtgtggaaggtatcaaaaatgtaaatgaagacgtgtccccatcatttcaagaaataaactctcctgtggaagattgcatggtggccaatagaagaatgggctcaggtatgaggattaataaaaatacagttccatatttcaatcaagctatgtaccaaataaatcatgacaaaaatgtgttgacgataacgtaaactttatgctattttttcaatttttgtaggaaacaactattctagtggtttggcacatgtgaatactcaattgatcaacagagtagtttgtactaggacactatactatcttagaccattttggttgtcaaaacatggtcagaacaaagatgcaagtgacaccactaccgatgaaggaactttccaaccaagacgggaagttgggacgccacaaatgattgaagaggcatttgcagctcgacaagcccaaaagttgagttgcaaaaggtaattgatcgcctgaaggaagagattgtggcactagaggttccatagagggc

SEQ ID NO: 24495 - DNA, 7154 bp, Oryza sativa
attggagtgcgtcggatgtcgagcacctacttgatggtcggttgatgatagggcgctggcacaatggctgcgtgttgaaggagtgcggttggtggtagcttctatgtccagtagaagaatcgatacgggggtacaggaagattacggggcgaaagcctagcctctctaggctagcaacggtgacgcctggggtgccgttttcctcttggggcgttgttgggtgatctctcatgtcccctaatggattcctctaagtgaaaaccacgtcttgaatcccaggacgagcgacgacggtattctcagtgttgtacgcttcctgaaggcgtcatttagaagattcttttccttcgggatgtcgttttcatgtcttttagtagcgggcttctagttgtagatacgtgatgtggttgtaattttcttttcctgactatagccttccaaggctatagagttgtatttttttttctgttctattaatatgaaacgttgcactatcatgtacgtgttgtttaaagaaaagaattttgtagaattgaaactcctggtatctcatgtcttgtaacttaaaatcagctggggaggtgcctttgtatggcgtgattttttttttgttgaagaaattgcttctgaaagagagagggtatttattggacttcttataggagaaaaaatcactgcatggattgtaggagtttttttagctgtcgcttatatagctataagatatgtaaacctaaaaacaaaaaataattttacaacaaggttttacattataattctccatgattttgtcaaatcctattcttccaatcgaaagagtgtataacaatagaatccggtgctcataaatattacatgtacgtgggtgtaattagtataaatttatatacgtgatgctattattagtattagtgagtaatctatgccactggtctttgtttgacagcgtgttaagatggtgtactgtgtatatttttaatggtgtgtgtatgtatatattctgtgtaatagaaaaaaaaactctgtagtcctaaatcctaatacttggatcgaaatgatcaaacgaaaaaaatgtgggataagatttaaatcctacataaaatccttcattctctaaaatctatcaaaaaaataatcccccctctcccccgttagacctaagcatatatgagatgtgaagaacatcactcttctaatcaagcataatctcaaagtttaattatcaagtccttgttgtagaaaaaaaagtgttatgtttgttatgttgactatacgattgctacgcactgaaaatacacattagtgcactaatcgtgatcttatctcatgtttaccttgcagttgtagtgcatcaagatgttttatattttttatgctcgcacacattttttttaactttctacaccataagttttaaaaactactattaactcgaagttttaatattgaccatgccatccttgataataggggtggacaaaataaatcgagaaacccaagaaaacaataaaacaagatcgaatatgaaaaacttgaattcttagttgtcgattctttggttagtggtagcttcgtgaagatcaattttgccatagtctttttgctcaggtacctaaactactcaatctatctaaactcaccagtttcggcgatccttcgatatcactaatctagcattccaccaactcaaatctcttacttctaaccctagccgcctaacggcagtggctaccaacccatcagatctgctagtcacatcattgctccacttcaccatcttgtcatgtcttcctccacgcttctgcttgcacttatctctatgtcaagccgtcacattttccagactccacactgccaccttgtgcaactatcaacaccattgcctattgccgcaccacgctatctgtggctctatactatcatccgcgttatttcctgtgcataaatttagtttacttagttagacctcggttaaccaaacagctgatctacacatttttttgcaacaaagattggtttttctaattttaaaaaccaaaatttaaaatactaaaaaatattaatcacgcgcccatccataatttgtagctggcagaataatattattgtgtaagtttatagtgttgtggtaaataaagacttgtcattgtcacccatataaacaatgttaccatagagcacttattatttctagaatttttagttgaaaactaataataaggtttaaagattaaaaagaaatccccaagagttgaacaaatttgccctcttcatttttcctcgacggcccagctccctcgaccaaacagaccagtagggttttaggaggcaacacgccgccctgcgccgccgccgccgccgccgccaccgccaccgccaccgccagattctcctaagcggcgatggccatggcacggcgttccgcctcccgtctcctctcctcgttccgccccttctcgctcctcctccaaccgctcgatgacgccccttcgctctcggccgcggcggcagcagcgtcggcccgccgggggatgtcttcggcgtcggcgctgcgggcgcgggacgagaaggaggtggcgaggtggcgcgagtcgatggaccggatgcggaatatcggaatctccgcgcacatcgactccgggaagacgacgctgacggagcgcgtcctgtactacaccggccggatccacgagatccatgaggtgcgtggccgcgacggcgtgggcgcaaagatggactccatggacctcgagcgcgagaagggcatcaccatccagtccgctgcaacctactgcacctggaatggataccaggtccatcaaatttctgcccgtctcacttatctttctattcgattcgtatacatccgattgcctgctagatcaccatgttttggctatcgaaaggaaactttcaaatcgttcactagtgtgcttattactctctagcaaatttataacaaatagtattctcttgattgtttactcatgtgcttccttgtttagttgctgattctaattcctttttgataatcatatgctagtgaaagcattgttaaactaaatatgctggatttgactaatatgtggtgtatagtttatattgaagcaataattagacaatttatttgcgtttgaaataatataatagtaatatactataatttatgtttttaacttgttattgtctcccaatgtattagattttgtcttcatatccattttctgttagttccaggagtattttatggcaccttattcatttatcttccactctatgctgaacttttgtttgatattgctttaatatcttgataaattactaccatgccactatgtataaaaaatacttgaaaaggtacatgtataatgctctttggatcagtcttggattgctttttaggttttggtataagtatttgaaagtgaaacctcaagatacaattttatgcaggttaatatcatcgatactccaggtcatgtggatttcactattgaggttgaaagagcactccgtgttcttgatggtgctatacttgtgctatgtagtgttggtggtgtacaaagtcaatcaattactgtcgatcggcaaatgagaagatatgaaattccaagggttgcatttatcaacaagttggatcgcatgggagctgatccatggaaagttctcaaccaggtaaccatgaactctttatcctatgttttgctgacaaatgcttccattctggtgatacagaatttctcaagaacattgatacatcaatatgactagtacaacgaaaaattaagctgaatgttttttatttgatttactgggctgtcaaatgagtgatgatgggctgttctatcagattgtatcaggcgctgaaactcccgatacacagctgatggtatgtgagaactagggttctgaaaccagtttggctggaattaccagcctccatccagtaactggctggtacacgcccgatacctgattttacctaaaattcaaatccaaaatttggacttttccccagtaacctcaaactggtagaataattctaaatttaatttcatatccttctgtccaatagttgcccttataactgttccttggctctggaccagttactgggcagtaaacgccgttaattttaactattgtaaccctgaccagaactatcagacagatacaatggttcggaggagtttcagtgcctcatagtccatccatcttgatgcattctgatgccatccttagaatttttatgatttggaaaaaccattgtcctcggtgaacagaagtcaatcttgcattccattccatgtctgcagtgtgcattagttgatctgtacaatgctgcagccgtcaaccacacatcaacggaagaaatttgtctaaattactgtggtgaagcaggactggccaaaaatcatatgagggccaagaacacattacgtagaactttatcaaaggaggccagcatagcataataaaaaagtacaatttggtctttgtttaacaacctatcagtagatggaaggacaaggacaaagaccctctttggagtcaactagaccgctgccacttctctttcgttaccttttactgcaaaaaatagttgatacttgataacagaagtgatgttattgagttgtatttacttgtagctttgccttcttgttttgattttatttgctgatattattgaagatggtaatggagcaacctgtcggcctttactttctctcctgtataaccttattagtgtctagcacttgttttttagcacctataagatgctacatggaccatgattacactaacagtacagttctcgtggtgaaactactgcaaagcaccatttaccttattccatggatttttgtccctgatgttttgttccatcttattcctagttcctgtaattgatttgtttttggtcttaacattccttttatttctgatgaggcatttcacagtgatatgttgctatttccatagctgatagctttcattttctttctttcttttcttttttgctattgaaggcacgttccaaacttcggcaccacaatgcagctgtacaggtgccgataggattagaagaagagtttgaaggcctggtggatcttgtggagttgaaggcttataagttcgagggtggtagtgggtgcgtccctgttctttacaagttcttcaccctgaaggttatgtgcatttggatatttcaataacatacctagcctcatgtttaatgtgcagccagaatgttgttgcatctgatgttccatccaacatgcaagacttagtcatggagaagcggcgtgaacttattgaagttgtttctgaagtagatgatcagcttgctgaagcttttctcaatgatgaaccaatacaagctaatcaactcaaggttcgttaatcatacttcaattttttcgtatattataatcttactctgccatttaatattcatggaattattcatattaaacaatatttaaatgcctgtgtattgcaatggatctcaaatgcataatactataaaatgtaaactagaaataaatcgaagttccttatatagaaaaccattgaagaccaatcagttctccactctccaggctgcatccagatgtccaatattttactaaatcgaaaagaccataaaagaaccattatgcagaaatttttttatttaagtttatgccctcccattcatatttacatgacatttaggccactgcacaggaagtaaggtatcaactcatatgatcacactaccattgctaatttcttcaacagttcattgtgcatggttaaaagtcttttggaatagattagcaatacaccgcagagtgaaaagaggacctccccagatggcatgcatattgtctcaatagtcaatggaagtccgtaaagtatttaacatgagtaagggtaacagggcatgctctcaagcattctccttgaaaatgtagaacctcatattgttaagcaaaagaaaaaatacacttggcaatactttattgctgatctgaaggggtacaaaattcgcatcctaccatcaagccctagagagaatcatgtgaccagtcacatgcatatacacggtgatgtacccaccccacgggtcacacacatatggatatactatatttcgaggtgaggccactgtcattggttcaaacatttgtaggagtaaatatatactatgtccgttccaaaatatataagggattttggcgatgcatatatttcgggatggaggtagtaatagtatataagaagaaaattcatctgaaaagctgttccagcttaggggtgaatcatgacaccaatgatagacgaaatctaagtatttaaattcagtcttcaatcatgttgaaaacttgttattgttccgggcggagcctgacgttggtcaggcctagagctgagcaatgtgcccttggccagccatgaaaaatcgatcaactatgtgataaaacatatttagatactttgtaaccagatttccatgttgaacttttcaacattagtgatgatatgatattgtctagtaaatttactgacatggatttgtagaatatcgattactttatgatttagtcattaattaacttttgtgctacttttgtcttgatatcatatttcattttgaccaggcagctattcgaagagcaacagtagcacgcaagtttataccagtttacatgggaagtgcattcaaaaataaggtttttttctgttgttcctcatattttttatttaactattgttcatcctgccattgaaaatggaatattgtaataccttttgtagtaatagaagtcggttcttaagctgagttgaattcctaatgatgtttaaacataatataatagtgtgtacagcttcatattgcccagtgattttccaatgtaatagcaatcatgggaatgggaaaactaacaactgtgagattttctttaaattagttgctggatgtttcagaatttgcatgagcttacattctgactggtttcgcagggtgtccagccgcttcttgatggtgtgcttgactatttaccttgtccaatggaagttgaaagctacgcacttgatcaaaacaaatcagaagagaaggtagcacaaaatcaagatatatttaataggcaactgtggtgcaa

SEQ ID NO: 24496 - DNA, 12129 bp, Oryza sativa
attcctgcagcccatttattatagtctctctcaaaacatatctcagtagctattcttttctatttccattgcatttaaaggtgggtcgcatggcaatttaaactcatctttctcttgatttagtactcttcttaatccttgtgcccactcaaaatatgccttacattttgaaactgagggattacagttgccattatttgtaacaattaagttattcttttacacttaaagttacttttagctttcgcagtgaattattcttgtctcgatgtcaggtcttattggctggaactcctgctgagccacttgtggcattagcatttaagctggaggaaggtcggtttggtcaattgacatatctaaggtatctgacaactacagactaacctttttgcagtatcatgcgctttactctgaagtagagtacattgctttgactttatttctgaactaacctttccttcatgttgttgtcgttctagaatctatgatggggttataaggaagggtgatttcatttacaatgtgaatacagggaagaagattaaggtaagatttaattcttagctcaagcaaggcagttgaagcagttggttcaaattgtcgttagcagggatttttaataataaatcataccactatgtccaattttatttaggatctctaagcaactatagattgaatatgttgtgaagacaacaagagggatttattgtgatagaagagtaccaattactggtttaattatgtgccagagcatttttttctttataagagcaaagaatgcacacaatctattatagctatgattactatggaggtgactagcatagttctttgtgatgaatttcaaacaatataacagtatgttctgtttggccaactcaaatatctttttttttttttgttgggggggggtggggttgggtgggggttgacatggagaagaatggagttttatacctattttcaagtttgaattcctacgtattaggatgtctttttcagctatctaaacctaaaaaaatgatttggacatttatgtggtgcttatttagacattaatagcttaattggtgcttgtttgagttcaaatttgttgccttatgctttaaacttatgaacttgaaaatttgtttttacctttccaatgttggaatttaactttcgacttaatcttctagcctgctatgtaaaatatttacttgttcttttatattttattttataacaatttaaaactaatatatgaatgtttaaagttattgcttgtttttggtgattttgttgaaacattaatgctgatattttttaattaaattatatttttaatattgaaagcttgtaatttgtttgaaatgttcatggtaaataaaattttaaatatccattattgaaaattacctatttaggaaaattcttttttttttacttagaaatgtgagcatttatgttgattctagcttttctataaccctaatgttttatataactgtgtgatatgcatggcatttcaaataatatgaaatcattggtaaaacgtagcaattatgccaggaatacattagatgctcagttagagttaaaacttgtgccattatgtttttctaggttcctcgcttggtaaggatgcactccaatgagatggaggtaagttgcaccagatgttgtaaccaaaataattactaagtattagtttgatctgatcattggagttgattgtttcctttataagcaaatccacccctaggctaatatcttctttattctgtggtcaatataggatattcaagaagcacatgctggtcaaattgttgctgtctttggtgttgattgtgcgtcaggtaaatttttgagtgaagtgtagggccacaggctattcaagaagtacctctgtccactatactaccatgtgctcttcgattttctgttgacattttcggatttgttctgtgttggtctgattatttgttctcgcatcaataggtgatacatttacagatggatcagtgaaatataccatgacttccatgaatgtccctgaacctgtgatgtccttggctgtctcccctatatctaaagattctggaggacaagtatctacttttctattttcaagaatgctatattaactttaataccatacatgtgacaaataattaattaaaataacatttcagttttcaaaggctctgaatcgtttccagaaagaggatcctactttccgtgtaggtctggatccagaaagtggagaggtttgttttgttatctgttgtatttttctaaatctatcatttgtgaactttaaagtgtaaattttgatcgcagacaattatttctgggatgggtgagctgcatttggatatctatgttgaacgcatcaggagagagtacaaggtaatgtatacttaggtcaatggcatgattcgttcccctggctatatgtgcaatgcaatttaggattgatggatgtttattgtactaaaagcttgtctgtgtaaggctatattaccagtgtttgatgaaatcctccttttacagccaaactagtccattcttttgtgagataatatgtcaatatcatgcctaactggccgtggatttgccagttaaggaagcacatatcatgatatgccaattaaggaggtagataatctctgaccaacacaataggaagaatatgtaaaacagccatagttatcctgaccaatcacaaaagatcatttgctacctgtttggtgtgtttttgtgtgggggaatcatatagctacccagcaaacctattctcaaaatcaagagatctcagagctggatgttacattcaattgttaataatactatcgtattatttttggtttggtttatccctgtattgtcctagacatgaagttgcgttaatggttttattgaccttttccaatttttgaggtgctattttgattaataatttccaaacttaagtgcactgcaatacatggttgttaaggcggtaaggcgacctgaggcgacccacccacgccttaccgctatagcggtaaagcgctaaggcatggctactccttaatctacgtgattagcagcgattagaagagggagataaagaaaattagcctagcaggccagcccacaaaagctcattaaccttcataccatcccatggtgaaggaaacaaccctaatgcctgcagcaggtgtgtctctcctctcacagcgctgcctccaatgtcgcttcttcctcacgtggtcacgcctgtacatctcttcttcctcgtgctagctctgctctatatgtgctcctttctcccctgattcagaacgaatccaggtatgcttctatttgtatgtgccccttcccttgatagatctgacactgctcccttgagtcaaaatgaatctggcacaggagagagaggaagagagtggaaaccagagctgaggagtaagatggcaatgacatggagcagagaacagggaaaagggtatagttggtgctgccttcacctctctctttctctctctctgggttatggccttaagcccttaaggcggagggacaccttaacccctcggcacgccctagcgctatagggacgccatagcgacgctatagcaacaccttaacaaccatgctacaatattaatgaaactatagtctttcatgtggtgtatctagactatttacatactgttggtgaaattttaaaattgattacatggactacaaatcctttgagaaagaacagagggagcatttgaggtcccgtttgatttagattattgagtggattattgctgtggattatctacttgattatagggacaaattacatattgtaagcaataaacttaacagatatcttaaaacaagtggtctaagtagtacagcagaagaaagttttttgagaaaacatattttccgaagcttggagcaaataacccatttcaataatccggtgaataatctgaaaagatcagtagttggtccgcattttggttcacattaattattggcctgaattcttgataccgatgaggttccttgctcagatggccaatagggaactggcagtaggttaaatatacaaaatatattttacactagtttggtgaaatatcatggtgtttggtttgagttaacagatggaaagtggggcatcgttatccaatcctctttagtttaagtaatggtgcgagatggtaacatgaccaagccatccctcatggtgacaaggtaagaaactgaaaaactgggctatcctgccaaagctgtagggtgacctcaatatggaccaaatcatcttaggatgggttcactcatatgttcatttatctttgtgatactgtggagtgagcactaaatagcagaactcagataaatttctctgcactgcctgatgcctgattgagccactgttatatgattgtatgcctactgtttttatcaattgaaccacatccctatgttgaaagttaagatcatcttaaatcctgtatggctactgaaactttcaacaaatctaagtctccttctacatgtgtaggttgatgcaaaggtcggaaaacctcgtgtgaacttcagggaaactatcactcagcgtgctgaatttgattacttacacaaaaagcaatctggtggtcaaggtcaatatggacgagtttgcgggtgagctcttataaaccttgttactaataacaatttaattctcggtttaatttgtgggtgcatcttcaacttattcgcttcaaaaatattaactggcttctaatacatatataggttataatgttatatagggagatatgtatttcataaacatgataatttggaaatgtttagtgagaaaatctacttcttaccacttcatttgataaacactctctagctgagcagtttaccattcctatgattcccacttgtatgatgagtattgcatggtgaaaacagtacacatgaagtgcaccatggttggagcactgcacctaggcaatcaattacactgagcaaatgtcaaatgcattgcaaatccatctagattgtagtgttattattgccggattctgaaaaacagtaaaaaaaaatcattttagctgtcagctgcttatcgtagacggtatatttgatcaatggtttagtagtcacttaatttgattggaaggagtggacttaaattcataatttagcagtcacacttcaccaaaactgttgcaatgcccatatgtcacttatatttgattggaaggagtaaaatgtgtttttacttctgttagccattgttttgctgtcttgtatcatttggctgcaacttgtaaccatctacacatggttcatctgcacctggggttctttcaattgggctcctaggcaatccttttttctcatggtaatactcaatactggtttagttgcacatggccttggtttaatcttctatccatatgtgcttcattttcctttgagcacgtgactctttggttttattttattgagtgtttgaaatagcatctccgattttggttctgaccatgttcagtgcattgacttatatatgcttttattatttctttcattttctgctatgggtccatctttggtatcaatttctttatttttcaattcgtgcatgaaatcaaaagcctggattgggcatttcatatttgcgcataaccatataataggtgttagttgttccttatcatattaggcacttgatgatgccgcagtggacaaaatacaaatgcttgtgcccctagagttaattaaattggtgatggtacttcctttccttgcattacatgtttattttgttggtcataaatactaaaattttactttctctggaagggtatcatgatgtatgtgtaaaatacatcttacaaaagctatgtgcgtgtatcttgaatacactggtgcacgaaagaaggtttagatccgccaaactccgttagaaaatcaaaatcttctggtttactttagtccttttgcttatgccatgctatcctaagttcctaacagttgttatctggatacatttatcgattattctactgaagtttgttggagctatcaattgtcttcacaataagcaacaatatgcaggtacattgagcctcttccatcagaatctgatggtaaatttgagtttgataacatgatcattggacaagcaattccttcaaacttcataccagcaattgagaagggttttaaggaagcttgcaattcgtgagtccatgtctcccatcacgtgttaaaagtctattttgtttgcagagtgataacttgtgtttgtgtttccattctatgcactgcagtggttcgttgatagggcatcctgtggaaaatattcgaattgtgctgactgatggtgcttcacatgcagtggattccagcgaacttgcttttaagttagcttctatctatgcttttagacaggtgagacttgttatatttgtacaatcagcattctttcaagtaaacagtgacattagagtgatgaaaatacaaatcttataaattgatttgctccttttgtctctccttttgccagtgttatgctgctgctagacctgtaatattggaaccagtgatgaaagtggaactaaaagttcctacagagttccagggcacggtaaccggtgacatgaacaagtgagtgtttgatcgtaactttgcttctactgaaatgtatggttacacactcttaatcagtttcatgtgaagtgttccttttgggttcaagttaatattttcctgccattcactggaaagacagtctgttatagtgccattagctgtgatgctggcatgttgagcatagcaccgtatgcaattgacagtttgataccgatgatggtttttagcaaaatgttactttttcctcatctattatgaaaatttccttttagcaacttgtttgtcaagttataactatgcctactaagtctaagtctaatattgttttcttcatgtggaaaacaggagaaagggtatcattgttggaaatgatcaggaaggcgacgacacagttgtggtttgccatgtatgtaaaagccttggtccatatgatttaatcttgaaaatatagtgcttcatatgttatttgctagtaagatagaatgtctaggagtttcttatcgaattttatggttaacattcatcactagtaagatgataagccatattaacaacattagtggatcctacggctcttgaagagaaatacgtttcaaaatgtcatcctttgttttatatgctcaagatgtctgggaataatcctgcaactatttcaaaggtgttacatttcacaggtcacacctatttgtgttgaaaattgtccttttgtgattcctcgttctttatctagtacccggttgcaatttgtttgatatagtgtggtacttgttgtacaagtatcaaaattccttacaagatttattaacataaaaaaagttgggctgctaagaatgtggcacaaaccatagggcattatttgtcctgtatgaaaatttgcagcaagattgtccatggatagtcacctgtgccttgtaatgttgattgttataggtgatctttctatggcttgcgcaagatttgtaagaaaaacaattgaagaaatcagaataacattgcgccattgcagaactaaccacaacactacagaacttgaagtgcctttgtaatgggtaaatatggtgggctggtagcatagatattgtattaatctactcttaagaacggctagttttgcacaaaaaaagaggttcactttctacttcttcttttattgtgcaaaagtaacttcactagttcggtgatttgttcctattcaaccctacattatcacctgatgtgtacttatagacaaggaataaacgttttccatagtttgtaacatagttactgtgagaagtaccattctcattttttgttgagtttaataataaactaacgaatcacatctcgctctctttcaggttccactaaacaatatgtttggatattcaacagctcttcggtcaatgacacaggtcaaatgttattcttctatactttgtctatcttttattttattgacttatatatacccagaaaatgctctttgttttagtcagtcaaactactctgtgatagattgatagtcagcagaaatatccaattatcatctgggcagcaatggctatgattttcaaaaagagtgaaaaattgctaccagagtgaaaaattgtcccctgtatttaatagtagtgcatcattgctagtgcatcattgctgtactccaaaaataaatagacatactgcatgtgatatgttggccaaagtacatgctctgttgatgaatttctgctcttccatatagttattggtgttccaaagtacttataagtatgttcaaaagtatctactcttggtaacagaaacatgtcctgaactatgggcagttaaaactcaattcattatcgaacatataagttaggaactgatacatgaaaatagtttccttatattgaaaacatatcgttttggacataattctaagtcaaaatttgaaactttgaacatttataccttttgcacttttagttggattgaatggatgagaatcatatctatagatttgtttcggaaaaatactctcataatatttttatttcatcggattatgtgaatatgttgcaatagaaattagtggccaaagttgtattttgagaaccatgtcaaatgtttaaaacaacatgcttccaaagccagatattgtataagttatgaaaccatgtcaatgtttaaaacaacatgcttccaaaaccagatattgtataagttatgaaataatactttataatgctaaatctattctgattttattttaaataaatcaaggtagtggtttagatgacatacttttttttttactcgagagagtacgagtgcctgaaaatagggagaaccgatgagggatattttgcgtatttaatttattagttattgttgtgtcctgcaggggaaaagtgaattttcgatggagtatctggagcacaataccgtatcgcaggatgtacagatgcaactagtgaatacgtacaaggccagcaggggcacagagtaatacagaaaaaaaagaaacagtcacttagttaacgttgcattttgtggcccttaatgatgctaggacatcactagtagagtgattcttctagattacataaacaaattttggtttcactttgtatgttaacattgtattttacggccccccgttgtgatgagccatgacatcactaataggtttatacatgggtttctcgatacgacgatagaattgtgatacaataatctgcactccttatacgcaaacgtacgtgatgatcgaattagagcaagttctgtttggacaatgaaaatttcgttatttcttcaagaaatttctggttttgtgatttgttgtccagttttcttgtggttaccagggaagttgtctaactggccctggctccaaaaggtctttgccaatctaatcctgcttgcaaacaaccatgcgcatcatcaaagccaacagcttatggggtgtaggcggcatcatcaaagccaacagcttatggggtgtaggcgctgaagtattattatctgcgggaaaattcccgacgtgccctgtgtttttacctagagaaattcttttcatgtccttttgcctcatcacacacgtgtcactgagttttgattcactccgtactcattccacgtcttcgtttccttctgttggagggagattactagcagaggtgaaactagaaagtttattaatacatgattaattaaatatcaactattataaatttgagaaatagatttatttgaatttttgaaataacacttctactccctccgttacataatataagggattttagagagatgtgacatcatatttaaacgaatctagatagagagcatgtttagatacattgtactaggatatgtcacatctctctaaaatctcttatattataggacggagggagtatatagaagacttatgaaatagcttaccatttaactatttgaaaaatgtgctaaggaaaattgggaagttgaagtttggagttggaaaaaaaaacagggctgagcgtagagcaatttgacatatttggacatatgactatgagagtaaagctcacgaggggttgggtgaagatttgacgataattgtgacgagtggctttcaatgtgctccacacttttcgtcaccaggctcctatcctcattctttgatctcgtcttctcccttttttggccgtatctagtggcaattggagtgtagccatcacatctagcagtgccttacgatttgatggtggagacactatagcgacaacggtgattggcgctataggcggagcaagcgacgactacaaggtcaatgagacaccgtccgtttttttctctttccttttatttatttttttcttcatcgattattttcttcctataaagatttagagtgaatttcataaaactacagtactatgcaccatatatcacaaaactacatatttagtgtcttcgtttatcacaaaactacagtactttgcacaatatattacaaaactatagatttaaaatcttgtttcaaaaaactatagatttaatatcttcatttatcatactacagttttagtgtcctcattatcacaaaactacaggttttagcaatgttaaaatctgtagttttgtgataaatgaagatactaaggctccgttctaaagtgcagacttggctgggctgagctgaattggtagcagtctgaatagtaggtagtagcacattaacctgccactttagaacggggcctaaatgtgtagttctaggataaacgaatacactaaatttataggtttgtgaaacaaattcttaaatatgtagttttgtgatagattatataaagtatctatagttttgtgataaacgaagacactaaatctgtagttacatgaaacaatctcttaaatctatagttttgtgataaattatgctaaatacatgtagtttcgtgaaatttactcagatatttttgcaaggatatacatatccttgaatgtacacatgaaaataacctaggacacgtgaaaaatgaaaaaaaatcaagggtaaactggatcttcatttccaaaaaccaaagacaaaagaaaaattatgattcaagacggaggcaagaacataattgtccctcgataaataaatatatagtatttcgatcaatagtttctgggacaactaagccatctacacgtggcctctagagcatagtaaaaaaaccggaccggaggtcgacccgctctggtcgttgattcaccggtcgaaccgctgttttttatttattaatattatatttgatttgttttattttaaatattgaatcatcacaaattggtgaaaatatgcataaataaactagtatatctattattatatggccacaacataaaaaaaaaataaatgtagtgtggtaacataattaaaaaccggtttgattcttaaaaaccgctaccggttcactggttcacataaaaaccgtccggttcatggttttttaccggttcaattgtagggcggtctttttgttgaaccaagccgccaaggtcgctgtttccggtcttttctggatcaaccgccagcctggtctagtttttttgtactatgctacagagatgaagctcatgaaggtgaatgggccattagagtttccgttgtatcttacttctttcgtccaaaaaaaccaacatagtacttgaatgggacataatctattaatctggactagattatgtcccatccaaatactatgtttaaattttctttaggtccgagggattacactggaagcagacgtcagcaaccgactagccaccgcctatttaagctgtctcccctccctcctccctccgctgcccccctggtttccgtcccctcttcctcctactccacgaccacgcccaaacacacgcttttatcaaaccttctagatccgcgccttctgtaccactggaggtagatgtttctcctcaccttaatttcgagtttcacctctcctgcctgtgattcgagcgctcccatttcctgtctgcctatgagga

SEQ ID NO: 24497 - DNA, 1766 bp, Oryza sativa
aatttgacattactttgcattaatacaaatataaaattatatacataacacaaaataaaatatcaaagaaatgtgggggtaagataagatatgtggacattaaatagagtgataacttttgtgactgtatgtctgatgtactattaacaataaatatttgcatgccaaaagggatcaaatacactcaccacaatgcatcttatcaagaaacatgtgaagcaaattgctgtcacagtcccaacctgaaacaattaaacatacacagagttagcatgcacttgaacaaggtcagtcatacatctaaatctacaaacatttttctcatcagcattcattataatgtacaatgtttcagcattcaagttaaatgttgaagtttcacatggtttcagtgtttgtaaatgaaaaattctatgtttcagaattcaagtagaactaatctttcacgaacatagtacacaaagcaagagtacagaatctatcttcaacaacaactttaataaacaggagagcaaatgtgcatatattgcatgctaaaaataagtgtaacgacctcatagagcttctttctgcggccctttgattcaatcggaaaacgcctcagcatgaaaaatagcctaaacaaaagaaaaatatatacatatatcatcaaaatgaacaacttattgaaaggaaaaatgcaatatcaattgaacaaaataccttccaccataaattaagaatcccaaaagagctaagaatgagacaactgcaaatgaagaaagaataatcagcgagctatacagctgacaaaatgattagacaacttatcgaacagaggaaaggacagaacatacctgatataaaaattttgctcacaggctctagcagaggactatcatttgtcccaaggtatatccaaatacaaacctgcacaaatattccattagatatgttttacggttacagaatgatcaaccaagcaacaactcagatacattaaatacgcaggatacaagatgaatgcaattgactgtgcatattactttcatggttaacttagtagaacaattatcatggaaaaatcatatgaagaatataagtacctccgtccaaaataactgcagttttaggagtggggtaaattaagagggagggaaaatgacccaggtaccccctattgaatgggggatggttgggatttgggagtgaagagtagttgagggcaagatagagagaaatttgaatgagagatgactggtggaacaagtagtactatagaattgcgcttattgtgggacagaggtagtacaataatttgagtatgtaagcaccaacctggattacatatataacaccattaactgccatgtatataatccttagcttgtcagtgggaagattcttagcctattagatatataaacaaattaacaaataagtaaaaaaacacaatcatttcatggattaaaaattaaaaggaacatgaaactataaaagacatagttaaaacctgatggtatatttctgcccagaacagcacaagtagcgtgtatgtcgagaaaaatagaagaccaggaagatccaataacaccaaagtatacacctatttaaacataaagagttctgatgagcaatccagctagaacacaaacattaaaaattaggaaatccattgaaaagtccacaaacaaagctaggtgtcgtgagtagaaatataatttacacaagagtgttagtccaaaatcaattcatatactatatattataatagggctgcaggaatt

SEQ ID NO: 24498 - DNA, 2202 bp, Oryza sativa
ccatattttctcctcttaggtagacagaaaaaaaagataaaaattctaaggtagagaggagaaaatatgttttctacttatatttttttctatgtgactgacacgtgggtccaactaacacgtatgaactatcgtggcatgccacatcagcgcatggaaggggttggagctcatttgaacctatatgacaccccaaaacaagttcgaggacacgaaaatgcattttgagagtttagggacctagatgacacacccgcacaagtttagagaccgctcgtgcacttcactctttagaaaacattagtgcaaaaaaatgtaactataggaagatagcaatagcagtctcctcacttttcagtaagtgtaggatctctttgaaatgaaaaagccatctgcttagatcacatgaaatgtatactccacaagacagcataaacattttcattgaaccaactgaactcaaaaggattaagaaatggaaaaaccatctgcctttatctcacgaaacatatacatattcacttaaccaactattatctcacgaaacatatacatattcacctaaccaactaaagtcaaaggaaacttaatgtgtgaccgtgtgagaaaaagagtcctgcacaatgcagtgccatatgagcttcttggactaaaacacgagtgcataacaataccaaagcagtattccctcctagagaagaacaagaataatccaagtcagtggagcgcgcacagtattatgcagcatgaaatgcaaaacataacaacagcaaaacataaaatcccattaatattttcagctggagattaatttattttgcgcccccccacccctccccaaccaaaaaaaaactaataataaactgtttcaagccaacacaatttggccttttgtattttttttttcatttggatgacaaacaacatgaagctgtggtcatgtcacaatactacaaagggacacatagttcatacctcttttcccctcatcttggaattaacatggcaataagtcagttttttttcttggcaattgtcctccaagatctttatttgtattgattaactatttcttttagatacttctaatcaaagaaaaggaaaggttgtgtgcctatggtagcttgaatgtacataaaacatgtttctccacgttattccccaacattcaagtggcatgtgatttaaaacgaaggaggtggaagggcatacaaatgtaagacactatgcacatgtaaaatttgtatgcattgtatccatagcaaaggatttttacagttaattgaaggaatccataaacctttaggttttataaatgatgcttatgcagttgcagtcgaaatgctcaatcaaaacaataggaaactaccatgattccaccattcactaactagaatcacatgctagtgtgaacatacgcataatcgggaggaatattgaactagttccaatctgcaataaggtatatatggtatagcaatataagcttggtgagaaacggccacacacaaacacgaaacgcagtgtaggaaagcaactgtgaatgcatcagaatctaatgacacagataccgcccaaataattaaccaaacgggcatccctacccgtaacctgacacatcaaatgtccagatcaagcagtcaaacttatccacaagccccgccatgagatggggattaggcgattcgcccccccgggggggggggggggtagggttacacgaggggggttaccagcgcgacggcggagacgagcgcgtaggcggcggagagggagaagaaggcgccgtcctgccacgccggcgacccgttcacctcctcccaccaaccccgcagcgccagcgccagcgccacggcagccatctccggcgtacccgcgagcgccgtcgccgtcggcagggacggcgaggggaccagcttcctcatctccgatctcccacctctgtctctatcgccgtgtcgtggtgcgggcgtcagcgagagaggcgatagctcctcttcctcctccctcctccgcctcctgggaaggaaagatcgagtcgaggagattaggcaggcggcgtctccgtctcgaaaggcccaatcaactcgctcgcttcttcacttttgctgcctgagagttgagatgtggacgcgctgagacgtggacatgtggggctccgccgcgaccatggcccacatgtccgcggcttattcgcttacc

SEQ ID NO: 24499 - DNA, 1181 bp, Oryza sativa
cctgcaccccatgggcaggatataacaaaatgtttcttcgaggatgcgtgtccacatttggcattctaggatttgttacctcgtctcacaaatttgcatcgttttgccgtttcaatctgtgatggtgagaaatatttgtcttcggattgaaattgtaaatttgtttagccagcttttttattcactaaatggaattccaagttaattcatactcctagccaacataaattgtgaaattagtttcagttccataagacagtgagtaccacacaaaatgagaattcgaaccaatgctgcatacctgtgaacccaatgagtaacattgttccactcaaccgacccatcacctcatgtcctcctccttgatgatccttatgtgccaatccaccaattgttgatagctgctgatgcattgctcctggtttcttctttcttgtgtgtattggtgtgttcatgttaatcttagtgattttcctaaactatgttagatgatgcagaggagagctctaggtggaggatgttgctcaggagctgccgtgtttctttctttggcctaatccggtagcatgtgatttgtccttccatattaatagtatctgtgtagaatggtacaagtgtgataaatacttgactgtgtactagcactcagacttgtgaattgttttattgttaaaaatcatgtgcccctgatctgatacagtcttagcagaggctaagaaagggttcttacttgtcaccgacaagaagaatggatactccttcctctacccatttggatgacaggtaataaacagtcattgctaaagggtcacatgatgtaaggttgcatctcatttccttcattttattttgagtttataactacccatgaagtggtttgttcaagggtaagataaggtgtacgaatcgtacagcctttggaaagtgtgagcgtcaacacaattacgaccagcaagaaagacatcagtgagcttggtcctccaaatcaattttattttttatcttctattcgtcaaacatttggtcatgtcgctgcagttgtatggtgagaaggtataaaatctgatccactataatgtgttatttaggttgttggagctcttatacgaaaggttctggccgcatctacacaaaagacagttaattgaagcaaaaaaggtgccttttttatcacattattc

SEQ ID NO: 24500 - DNA, 12905 bp, Oryza sativa
tcgctccaggctcatggctagagaggagacttgcttagtccaacctgtcccattcactctccaatctcaatccttttttttccggatctaggggcagccggcagcctcatcggccaccggggcgacaacgtctccctacaccggcgacgtggcttgctccgagagagtgagcctaggcggcagctcgtgaacggagacggcgcaccgccggatctgactcctcacccgtgttgcgatgggcgacgccggcatcaacagaatgcgcagaggaagcctatcctgatcgtcggcgtcaccttcctccgacgcagccccgcacggtcgtcggcgtgcacatccgcgcattgcccctccaaatgggacaagtcccccaccgagccctgctcttgattggacgccgacaactgctcatggctgagctgggattggagctcctaccgcctctgtctctagtctccgccgccaggacccatccagtccatgcccgccttcatctgtgccatccacatccacctcctcgccaccggcgttgtttcctgcttgggagagaaaggggcatctggtctgctcgcagcgctggagcgatagggatgctcacggtgctgagaccggcgccgtcgcctcctcgctcatcaccgcgttgactaggtctgccttgctcatcttcttctctgtttgggaacagaggaagacagctccacagccgctggttttgctttctcgatctgaacgccactgagagccatctatgccttcgttcttcccgtgtgtatacatgtgattcaacacagtggagtaaaaaattttattacgtgtaaccctttttatacatgtgatgtgattcactatacatgtagactgaaaaatatgtaatgcaaaccacatatacaataaaagcctggaaactgttattgaatcgaaaaatagatatatgagattcgtccacgtcactatgagtaaaagtttaactgccaataaaaattttactcatgagtaaatttgcgagtaaaatttttactcatgataacatagacaaatcttaaatgtctatttttcaagctaatagtagtttttagatttccactacacatataatttacaccacatattttccctcctataacagttgacagtggagtaaaaacataactactgtttttaatggttcaattctatcatactacgtcgtggtcaatagacctctctgtactcatgtctatcagtaaaaaaataactattgatatttcatctgtgtaagtttttgacccggtgagattttgatttttaatagtaataaagtccgtggtaaaaaaaaactgctatccacgtattgcaataattgaaattttatatacatatattcacttgtatatataatcatgggatatgtgtattttttctcctccttgtatgttatgtagtttcttacccgggagattttttttaatgattgatatggatgagtgaatgtaaaaataatatgcatcataatcttgattgtatgtgttaatatgcacgtaaaaggaacatgatactcgtattttaatgactgaacatttttacacacatttttcaatatggaatgattaagcaaatttattactaacaaaaataactacaaaaattgatgtaataaaaatattactgcaaacaaattgagagtaatgcaaaagatttacaggagtgaaaaatttactatactcctactattatcgagccctgactttgctcagtaattacgggagtaaaaattttactccatgcaaagatagacatgatttttttactctagtaacttttttactcagtaattttttttacttatggtgggaaccgatattgaaggccacgtggagacaagaagaaggaagtactttggcacgtcagcgaggaaaaaccaaaaaaaccggaaatgcggtgctctgtgaggtagccggtaattttttaactcgagataggagaggggtgggaacaaaacagaggaaagagataggaggtggactagtagaaaacgcaaaaccaagaggaggagcgctactaattccgtagcgcgtctgtggcgctgtgtgtgtgtgtatagatagatagatagacagacagacagacagacacatatatacacacacacatatatatatatatatatatatatatatatatatatatatatatatatatatatatatatatatatatatatatcatgatatttgatgtactagtatacattaacatactcactccgtcccataatatatatttcacatccctccaaaatctcttatattatgggacggagggagtatatatgatgcatttatgtcttgtcaagctgataaatcaatcctatcctctgttttaaggacgaacgaatctcaaattaaattgatactaagaaaatacttttattttggaaagaagtctatttgaagtcaagtttattataacacttaattttaaagtgctctaactaatactacatccgtcccaaaatataagcattttctagctatgaatctgaacaactatgtgtctagattcataactaaaagttgctatattttgggacggatgtagtattagttagagcacttaagttagttacatttatttaaggaaaaatagcagccagcaggagcaatatcgagaataccacaacaatatcatctgtcatgtaatcattaaatagagaatttgctatgcctcagcaatttctctcttcatgcacaaaatggcaaaacaagaacttggtaattaaaatggatccattatccatagtgttcagtcatgtcttgctaaaaaaattagaaaggaaagaaatatattactgggactgactactgagtgctagctgcagtttcttcattactggccttccacaggctatttaattatgatcccattttcactagcaagactgctacagcctattataactgtacaaataatatcaggagttcaaaagtacgaccatcactgaagttatacatcaagttttgaagggttcctatccctcaattgttccttcagatgtttgattactctttccaactcaaccttttgggcttctcgagctgcaaacgatttctcaatcatttccctcgtcccaacttccctccttggctggtaaactccatgatctctattcatgtcacttgcatctctttcatgagcatttttcagcaaccaaattttagtaagatagtacagcgtttttgtagaaacttttgtcctgaccaattcagtacttgcatttacaagaatatcagaagaaatgccattgtttcctacaagaaagagataacagggatgcattagcttctgctcaaaaaaacagggatgcattagcaaatatcgtgtaatgtcgtgtaatactggtaactcttctttcatcttaatgaaatttggtcggcgtcattccgccgacccggcaaaaaatagcaaatatcaacttgtatcctgtttgcgttactatacatggtaacacagattaagatatccaaactgttattggaattattatacctgagttctttctgctgatttctatgcaatcttctataagagaacctgctgttgcttgatttgatgttgaatcatcttcattttctttttcagtacctttcaaagatgctaattcatccttgtctgtcttggctctattatctctctctaatgcaaacatgcatgttcccatatcttcagttgattgctgttggggagcagcacccagcaggacagcatcaagctcataaccacaattgcgttccatcataacttcatcacttgtcactagaatgtcttcaggtgttggcagcatgccagctgttgttgcagcttcaatggcttcattactgccagtactagctgcactctcaacgccatgatgtatcattacttgtccagagttgaaattgtttgcctcataggcactggcatggtcttgtgctttctgtttactttgtaggagagatatgtgttgttccattttggtgactgacccacaaaatgattcatcagctgaactatccaagactctcattgaatcagataagtattgctcagcatcttgttgcacaatcatactgttatccttccctctgatgaactctgggacagaatacttcacaacgtctgcgatttgctcttgcctagcacattgtaccataattatattgtttagcctctcaatcagaggaatctcatccagtggatcctccatggtaccaggtaaaggcacactggtgtcaacatgctgctttttgcaagaattagccccagaaagctcttcagtgtttcttttcattggaataaaaagggaatggggttctcttgtgtttgcatagttagaaacatcagtagagcaagccaacgaatatggctcccaccatcgcgcatactccagtgtcaccccaagcttatagtgtggaacaaccaatgcaaactttcgatagccaaacgtatatgttctccatgccaccttccagtttgagttagcgcgagcaatcgtcccaggcacatcctgatcaaagccaaactgccttgcaacacgatgcggatgtattgctcaatgcagcccatgccgacgagctcacattggcgcaaacatcgcgtaaaggataacagcgtattacttgtcattacatcctggacaacccaagtgccagccttagcttccttgggtggcagagcaatgctgcgactcccgtatggcctccactcaaacttgtccggtgacatgaacacgccatgaacaaactgggggtccagcgccttgtggacgccgtgccaccgagcagccattggcacacggcaagcatcagtggttgcagggatggtggtggtcgccatggcagggcggagctgagggaagcgctcccagacccagaggtggagaatgtgcatcggcgccgtcacctggagcgcctcctcctccctgtcgcgcaagtccaagaagcgcttgagcgcggagaggtcgccgtagatgccggcgagcgcggcgggcgcgagcgccacgcggatgccccgcgctagcagggcggcgatggggaacacctgaggcccaaccacgtcgaacggcggtgccgcgaagacgaagagcgacagccacatggccagaaacgccccgtgctcgatcaggtcggcgccggcgctggcggccgtctcgtcgtcctcctcctcctggcgcttaagaaagtactgcacccacccaggataggagggcttcttgtacttgctccggtgcagggcgctccgaacggccatgagcgcgtccacgtccccgacaagagcgtccggcaggcgcgcccgcacgggcttgccaaagagcggcaggccggcgagcacggtcatgtcctccagcgtcaccgtggcctcgccccacgggaacatgaacgtgttggtgtctgcggaccagaacgcggcgagctggagcagcgtgccctcgtcgcggcgtacccggtaagccgtggcgagaatggcatccaagatgccaacactccgccacaggggctcgtggcgcgggcggagcctgtcgacccactgcctccacaggccaggggagccagcccagcccttgaactccaccacccggaggaggccgtggtggtcaggaacggggccgccactgcagagcggggaggagggcaggggcgggggccggccaccggcggccgcgcgggggaggaggaagtgggccgatcggacggcggggcgggaagggtcgccgtcggagacgatcgggacggtggattcttggaccaggagctcttcggtgccggccattgcggctgcggaaaattggtttggttggggttttggtgaagtgtgaggaggaaggaaccgaggaggaggaaaggaaaatggggggcggatgtgtgtgactgtgtgagtggggactactgctagtactcctgtcctagtgtggacaagtgcgagattgtaggtacttcgtctcaactctcaagccattattgatgtgagcttccttaaatgggtattgctagtaacaaaaattactttatatatttgagtggtacttgttgccttgtactcctagggcttttctgttccgtatgagaaaagacatttatcgaatagccagctgtcgggtccaaaacatctagtcaatttaatagccaattcatacaatagttacctataaacatatactacacaattaatatctggtcttacctgtcacacatatatcttaaaatccgtgctgcagctggctacaaatatgtagcctgttgcttttctctctcatcttttatcttctcgaaatatgtttatagctagcttatattccgctattgtacctgctctgatatttgtggtcaaagcgtgggtctataccacgtgagactcaacaagagacgttgctggcttgctccttccgttccaaaataatttattttttactcttttcacacatagtaataaaaaaagatagatctgaatcacaccccctaaactattaggtgagtatgaattacccctaaaatccaaaaaccaaatatatttcgccctcaactatcaatacgtggcactctagtcagcattttttttaaaaaagaaggaaaaagtatgaattaccccccttaactataaaagtcgatcgaattacacccttaaaccacaaaaccagacattttcaccccaaactatacaaaccggacaaataacccaccgactcaatccgcggtggttttgatcctacgtagcagtccagtcagcattttttaaaaaatggtgggccccacatgtcagttttcaccctctctgtctctctcttctctctctttccaaatctatctctcttctccctcccctcccctccatccccaccggcagcggcaagctgaggatggcggcacgcagggggcagagccagttgggggtggcaaaggggggccgagggcggcggtggtcggcgacggaggcgaaggccaatcgggagcgcggtgggcggcaagcagcaagctgatggtggcttggctgcgtgcgggcgggtggcgaaatctcgcgcaatcccgtcacaccgtctgggagccgcatgagccggtgagcgccatcgctcgctcgagagcgtcgttgtcttcgagcttctaccgcgcggcgctgtcgcgggctcctcctcctcatcatcaccgccgcaatcggcactgcctcctggttgtgatggaccgcgcgatcaccgcacgccgctgtccaccgcacgtccctatgctcctctacccatcactcgtccccgcgcttcgaccgccagtctttccccgcccgtccccgtgcgccaccgcccaccgcctgtacgccaccacctgcccaagtgcttgcacgagagagagagagagcaactgggaagagagagaccgaggaccgattctccctccctgccgttcccgccaccgctcgcctagctgcgcccgtcgccgctcccgccaccactcgcctagcgcgcccactgccgctcgccgccgaccagttccaatccttgctgcgctgccgccgctcgcccagctgctcatgtccaagttccaacgccaacagcacacacagatagaagtgacttgtgggccctatatttttttttttttgctgattggatttccacgttggtgccacatgtatgccacgttggatcaaaaccgctccagattgagtcagggggggtaatttgtctggtttcaatagtttgaggtttaatatgtctagttttgtggttggggagggggtaatttgtacgatcgcaatagttcggggggtaattcgtattttttccaaaaaagaatcgatgagcctcacctgatagtttcaccctctctcgagcaaaaaaatgtacaactcacactccaactccgatgtgtcttggatcctttgaaaatttttccacccccactttctccctagtcccctctctctctctttctccccttacctccatctctctctttcactaagagggggaacgccaaagagggagtcggacgagcagaggcaatccacggccgccggcgtgcggcttgtcctcggcctccgccgcgagacgacgcagccgctggcgcacctcctctacggtggttgacggggggtggggcggaggcagtcaaggcggtggagggggagctgccatcggcgtcgagggcataggtagtcggggtgacggatggggagctgccgtcatcggcgagggtggaggcaattagggtggcggagggggaggcggcaggcagatgcagaggggggagggcagctttaggcgcagaaggggtagtcgacgacggtggctgacgggggaggggtagaggtagttggtgcggtggagagggagccaccgtcattggcaggggtggaggcagtcgggatgcgaagccggagccgaggacagtgaccaatgggccggggcggtggcagaggcaatcggggcggtggagggggagccaagggcagcggtcgacgggggcgggggtggaggcaactcggggctgccggcacgcggctcttcctcggcctccgcaacgagatgcatgcacccgctggcgtgcctcctccacggcatctgatgagagagagagaggtgtgagaggggaaatagatagtgagaagagaagtatgacaggtggccggtcccattgatttttaataaaagaattgctgactggactgccacataggatcaaaaccgcttgcaaagctgctattgttttcgggtttagggggggtaattcgtactcaccaaaaagtgtaggggctgtaattcggacttttcccataaaaagagaaggaaaagtacgaattcccttgaactatcgtggtcgatcgaattacccctggaactcaaaaaacaaacatttgacacccttagctatacaaactagacaaattaccccctagcactattgtaggcggttttgggatagacttgctggcgtggcatttcagcgtggaaaaaatattttaaaaagtaatgaacccatatgtcagtctttatatctcctctcttttttttgtacctccttcctccatctctatctacagcggcggcggcggcggagagaagccaagggcgggccggccggcgctgtccgcaggggaggtcgagcgccacttctcctcctcctctttatcctcgccgtcctcatcacaccacctgcgcatccgcctctagatctccttgcccccattgtgatcggaggtccacgtcgtctgcgagggggacgtggatgtgttctatgggaggtggtcacgccgtgaccgtccacggcggcgcgcaaatggtgggagcagtgaactccgagagggagccggaatgaggcggagacgaaggatgccgagagggagtgggtggtggtggagggagttggaggaggcggagacggaaacgaaggaggaggggatggaggcaggagggagggaggaggtgcataaggtggcgcgcggggtggtagaggggatgggggagggggagggggagtggaggtggatggggaaggggaggagatggaggcggacaaaaagaagtcgtctgggaggatgatgcggtggcgatggaaggggtggcggcgtcaccatgggggttggagggaagggagatcagacgggggcagctcccacctatgggctgtcggcaacgccgtctggccttcgctccgcctccgggccccccactctggctccctcctggagttcgccgctcccacctccgcgtctcgcgccgccacccaccgcgtgcccgcctttgcccgccgctcgacttgcggtcatgctcgacgacacgagagaaagagagggaagagaagctatgacatgtgggtcccaccactttttttttaaaaaaagaaaatgctaactggattgccatgcacatgccacctgttgacggtggttatcgatcagtttcgaccgtcaatattaccaaaatagaggagaactagtaatgcttgcaatgcatatacatgttagaataataatattccactagtattaggttcactaaccttttgcagagaataaccataaagtggaggagaatcgacatcaactcaaacgataaatcaatcggacgatgtcgagaatcagtcttatgcatgaatgggccaagaactcagaattgacatgatgaattgggccaaaattcacaagtctgtgaaagagagcaaaggaggaggccacctgccgattttgggccaggtcgacccagcccatggtttggccaaaccccccgcagcgccactcgatccagggttctcctggatggctgagatgactccccaatgatggttggtgggtattaccgacctttccaaccgtcgcaaccgtcattctcaagttataaaaagagctctcatcctcacttcactcacacacctcaagcaaagctctctcatattctctcaagtttagtttagtagtattaagctagtggaataggaatagagtagaaatcatgagtccggaagtcttcggaagagttcgggtatggatcttgtcggagatatgggcatgggggtatgtgaagtagaggggaattactttccctccggtcacatgactctgcaggttggccccgctcgcgcgtcacgcgagtcgtggaagcgccggggggggggggggggctcggggcatgacgtcacccctcaggctcttccgcggcttcgccccgaggccctcacccggtcaccacgtggcagagggagagagcaagaggggagcacaggctgaacagccataaatgtgcgatgccccaactgtccctcaccgcatttaatgcggtaagggcagacgtgcggcgtgccttacgaacccttgtccatcggatgtgaccggtctgtgaccggcccgtctccgtcacatccgatggatagggcaatcatgtcctcacgtcgcccttgtccccagtggagtgggggtgggtatgacccgtcacatccgagcgccgctcgaggaagggctgttgcgtgtcattgttcatttatgagggaatgacagggctatcccccgcgtcaggcaggggacggcgccgggttccactcgagaatcggttattgcttagcttcgggagaaggcccggtttaaagcccaaaaagtggagtggggttcccccccggtggagggtaggtagaggcggcacatgtggtatccccttaagctataaaaggaggaccctgcccattgagatagggggacgactcccagaaaacctgagctcgagaggagaaggagcaggtgcgctctctggggggaagaaacccttgtaaaactcatcaataatcccaaacacaggagtagggtgttacgctctatagcggcccaaacctgtataatcccactacgtgcaagcttgccggtaatcttagggacgagcgagtgatttccgagaggcgggcctccgcccccggccgaactcacgaaagggggggtctcacgacctcccgctatcggggggccatccctcgacagctggcgcaccaggtagggggcggttgcgcgttccgagaggaagttgttttcttccgtcccaagtttctccaggccttagccgaccatggtcaaggtcctggaagtagaggaggaggcggtggcatttacccccaccccgtccaggagtggggattccggcgagagccgaggtcctcgtcaccgtcgccatggttctcgaacccctccccgccgcgaaccttcgcggagggaggatcccactcgttcgggtggttcggctctctctccgccccctggcggagggagaccgcgacgcgtcagggcacgccgccgactcgactatggagacggcggttcaccccaaggcgcgcttcaggcagcaggcacccttctacggcatcccccggtaaacccggagccggagactcctgttcagcgctggctggacgacgtggccaacttggtcactgctgcccagcggtagttggctacgggtggccgatccactgccactggtacatcacgtacctcggtcaccctctcctcgtcggcgaggagaagggctcgtcgatcggccacgatctcgaggcggtccacggttccaacatcgtcgggggcctcgggaagccgaaggcatcatgacggcctctacgggacgcaggacgctcgagtaaacatcgagcgacgccgggacgagcgccgagctgcccgtatgggggaaggcgcctcctcatctggagcgccacgctcctcttcacgaggcggccctcctcccacactcacccctggggggacgggttgtagggccttcgtggcgagtctccggaatgtccggtggcccccgaagtttcgccccaaccttacggagaagtatgatggtagcatcaatccctccgagttcctccagatctacaccacggttatcatggcggcagggggtgacgaccgggtcatggcgaattactttcccatggccctcaagggtcaggtgcgtggctgattgatgacccagcccccgactccattcactcctgggaggacctatgccagcagttcatcacgaacttctagggcacgtatccccgcccgggggaagaggcggacctacacgctatacggcggaaggatgacgagtccctccattcgtacatacaatgcttctgtcaggtccgcaacactattccgtgcattccagcccacgcggttgtatatgcattctggaacagcgtgcgacataatcgtatgctggagaagatcgcctccaaggagcccgagaccactgccgagcttttcgggctggcagacaaggtggcccggaaggaggaggcgtgggcctggaactctcccagcaccggtgcggcggccgcggctacccccgagtctgccccccgctctaagcggcgagataggagaggcaaaaggaaaccagcccgctccgatgacgagggccatgtccttgcagcaga

SEQ ID NO: 24501 - DNA, 38132 bp, Oryza sativa
  unsure (1)..(38132): unsure at all n locations
gagtctgccccccgctctaagcggcgagataggagaggcaaaaggaaaccagcccgctccgatgacgagggccatgtccttgcagcagacgggctcacgcaggccccgcgcaaaggaaaggccaccggcgataagccgagcctcaccgttccctatggcgagggccggttggcggacaagtggtgttcggtacacaacacctaccgccacagtctcgccgactgccgctcggtcaggaatttggccgagtggtttcgaaaggctgatgaggagaagcggcagggtcgacgggagggcaaagcccccgcgacctcgaccggcgaccggtgagaggaggccaagaacaaggcccccgccgatgatggcggagacagtgaggatctggatttctagatacctcaggggaccgtcgccacgctcgacgggggggcttgcactcacacctctcgccgaagcttcaaggccatgagacgagagcttctggccactgttcccacgcatgaggtggtccggaaggcgcgctggtcagaggtgaagctcacattcgaccagagcgaccatccgacgatgctcgctcgggggggaaagttggccctggtggtctccccgaccatctacaacgtcaagatgaagcgtgtgctggtggatggcggggccagtctgagcatcatctccccggctgcctttgacgtgctcaaagccccggggatgaagctccagccgtcgctcctaatcattggcgttactccggggcacacatggccgcttggccacgtagagcttccggtgaccttcggtgactccaccaacttccgcaccgagcggattgacttcgatgtggcggatctcaatctgccctacaacgcggttctaggcagacccgcgttggtgaagttcatggccgccacccattacgcctacctccagatgaagatgccgggtcctgctggtcccatcaccatttttggtgatgtcaaggttgccctcgcctgcgcggagcagcgtgcagacaacctggcggtggccacggagccacaggcccccgaggcctctgcgtcccgcgcttccaagaagcacctcacctcggctgacgaggtgcccgtcaaggaaatgccccttggcgacgatccgtccaagaccgccaagattggcggaaccttggacgccaaataggaaggcgcgctcgtctccttcccgcgggcaaattctgacgttttcgcatggaagccgtcagatatgcccggggtccccagggaggtgtcgcgaccgagaaaaatacattttcccgaacgctagtgtattaatccctgtcccaggaaaagccggggtacaccacacaaacatgatataaaagacacatctttattatatcgataatatttgcattattacaaaggcacttaaggcctgacaatcaaaaataaatagcagcggactagcgggcctacgactccatcttcacaggcgctcaactggggtataagccaggactccacctaagacttcttctccaaagcttctcttactgaaggggggggggaagattgagcaagaatgagtacaaccacagtactcagcaagccacaccggcagatgcatgattaatgcaagggggtacaaggggtaataaataggggttaagttttgcagaaaacagcatttaaaagtcacttagttgcccaaatccattttataaagacgatcctagagttacacagtgttatttaatcaaggccgtgaaccctcacgaacctgccttaacccaaggcctacgatgattcagaccgaactgacaacccgaccctaggtcccagctcgtcccaagccaacccaggccaaccattccacattttagttgttaggcaggttttaagaattaaaacactaacttgggtacattgctaggcttgcccataaccgagggcgcggctattcgaataggttatactctgatcagaggtgtacatctttacccacaagacacatcttcctcacgtgtaaccacgtgccacataccaccacggtatacggacggaagacgtgacatagttcccaacccatcctagccataaacaagagtaccgacccaaccccacctacggccggaacctccgggacaggcaggcaggattgagcccctagcagcaggacaccagccctgtgccatgacatctcgactaccgggccgcagctcgtgtagccttcatttgtcctagagatgtccatcgacccccgacttcgtccatctccatccgtgtacttttgtttataaccagactgagccacaaactaagccttacccactagacatgtggaagtacggtagtgctttgcaacagaggcccgagcttaatccttatagtacccgaggtaggactaacaaaacccaaccacgcacctcgagcccagcctaaaaccattttaggggttttgaatagagggggaggtgtgtgtccaattccaacataagccaaccattccatagtgtccaaatgatatgagaattcccaaagtctaaagttataaaaccacctaatgttgcctaattaatcagcgaagcatctacctaaattcatactagtggaaccatgaatagagtacccactagttggggttttgtttatcctagggtgaacaaggtaataataacaatagcaataataataaggtcataacaaaggtaaataggcatggctaaataaaacagtgataacgtaggaatttaaataacgtgataatgcattaatttaaatcaaaataattttataaactgggattcaatatgctcaaggatgatgtgacttgccttgctcagagataacggccttccgaaccttcggcgacgaccgcaaaccacgcttcgggaacctccggaacgacgaagactacgcgaagcacacaagcaaagctacaagcctataaagaagcaataacaatacataaaaagaaagcacagggttctttaggttataacaaacattaggagacttgaacggatcgattcggagctcgtatgaccaagatatgatcatccgaagtttaatgctgttacatggagatttgcgtattattgtaattaggttttacaactataaaacatgtgtaagcgctagcctggaaaagacaggaaggctgcgctgttgacatgcggactccacatgccaacctaagggaccacggtggaccgggtacacagagacggtccacgggtcgatggaagcagatcccgtgtgtcaaccaaggcgagtggccgacaaacggactccactagacaccacacgggctgcacacgtggaaaccacgcagctaccgagcgggcacactaacacggtcaccacacgcacaagcgaacgactaccgacaccggtacaggggtaccggggtcgacaaccgcacaacgggcacgggcgacaccgaaaggacgaggacggggcagcgagaggagagatccttaccaccatgcgatgaggcgagggaacgacaacgacgaacgggcgcggcggagacggccgggaacgacggagacgaaaggcgaggggacgacttcggcggcgatccttggacgaaggcgagacgcggccggcacaaggcttgacgacgcggaggcgaggacgaagacgacgacggggctgcagcggcacacttgacggacgcggacgacggacgagaacggcttgacggagggacgaacgccacgacgaccaggaacgacgggaggacgacgacgacgacgacgacgaccggggccggcgaggaggcgacgagggacagctagtagcagctgcacggagacgaggacggcatggaacacaccgctgcgaatccgacgatggaggcggcgccgcgagacgacgagccggcgaggaggaacgatgacgacgacgacgaacaccggcggggttcggtcgaaggggaggcgaggccaagggcgaccttgccactgcgatgccggaggaggagatggcgacgttggccggcgcacgggcacgacggaaggggttgccgaaggaactccggcgaggcggagggcgagaccgacgcgggcgacggcgttccggcgaaaccaagggtaggccggggtggaggtcgacgcggcgacgccgagggaggagacggcgcagccggcccgcacctgagcggtgcggcaggggcggctggaggcagtacagtggcggcaacgccactgttttgccggcgaggacgcgtctccggtgatttccccgcgaaacggaggtctgaccgggggagaggaggcagctgcgaggccgagggcggcgacggcgcgaccggacggcgctcgggcgaggagggagaggcggctggaggccgaccggcgccggagagagaaaaggagaaggcggggagaggtggtgcggccacgggggagctcgggaaggggctaaaacaagagaacgcacggagggggttccattttataggtgaggggagggagccgggcatgggagagggcggaacggcgacgggaaacacggccggcggccatggaaggcggccgggaatggcgcggccgttccgggcgattgggggcgccattcaagggggaaaacgggggaaatcaaagaggaatcaatggggattaattacccctatttaattttggaatcccatgattaaatcgcacggatttgagggaggaaaggagctagggttcacgggagagggaggaggccgtgcgggaggaggaagacgaccggcgcgtgggccccacaaggtcagcgcgcgtgcaacgcgcgtgcggcgcgcgtgagggggggcggctcgggaggctggggcagctgggtggcgtggcttgggccgggcggccggcccaggaggagaagagggagtggcggcctggggaagagagggaggaggagggagctgggccgaggggaaggagaggaggcccaagagaaggagggagaggaggagagggagagaaagagagggaggaagagaggactttggccgtgggccgagagagagagagaactttgggccagaaagggaggaaggaggattatttttagcttttctttttagtaaactttgatcatagttgttgttgcttaataaatatttccggtgctctgaaaattcatgtaaaatttgagggctctttttagaccaaggagaatttaacaaaaattctctggaccacattcgaatttttctggcacgtattttagtgtttgccaatttcttttcgaattttaattaattctattattctttttagaggatgatttttatttcgggatgaatttatcaggacgtgacaggaggtgatcgagcactgccttgccgtgcggccggatgcgcaacctgtccggcagaaggtgcggcatcaagccccggagcggcaggccttcatcagggaggaagtggcgcggctcctggaggctgatttcattcgcgaggtaatccatccggagtggctggcaaacccggtggtcgtcccgaaggccaacggcaagctacggatgtgcatggactacaccgacctcaacaaggcatgccccaaagatcccttccctctgccacgcatagatcaaatagttgactccactgcggggtgcgaacttttgtgttttctagatgcatactctgggtaccatcagattcgtatggctagggaagatgaggaaaaaaccgcctttattactcctgtgggcaccttttgttgcacaactatgccttttgggttgaagaatgcaggccctacttttcagcgcatgactcgtattactttaagtaatcagatagggcgcaatgtagaggcgtatgtcgatgatctagtggtaaagacgcgccaccaggacacgttgctacaagacctggccgaaactttcgatagtcttaggtccacgcgcgtaaagctgaaccccgataagtgtgtgttcggtgtgccggcgggcaaacttctcagttttctagtctcttcccgaggcatagaagcaaatcctgagaagatacgtgcgatagagaggatgcaccccccctagcaagcttagggatgtgcagtgcgtcgctggatgcatggccgccctgagtcgatttatatcgaggctgggtgagagggcgctgcccctattcaagctcctcaagcgctccgggccatttatatggacggaggaagctgagcaagctctcaatcagctgaaagcttacctcacttccccccccatcttggtagccccgtgaccagaggaaccattgctactctacttggccgcgaccccccatatggtgagtgccgccctagtagttgtcacaccctaaaaatcccaaatatataaattgttgtctaaattggaattattagaatttattttaaaagcctagaagagaagatctagttttaattaataaattccaatataaaatggggccagataaaatttcattaaatactttgcttaattctataattcctagatttttctgggatttatttgagctaaggaagtattttaaataaatggaattgcatttcatgaataatttaaattgaaaaaggtttttaaaatcctcttttggccttgggccgaaagtcggcccaaaaccttctctctctcttcccggcccaagccggcccagtccgcccgcagcagccgcatgcgcgcgccctcagacgctgacaggtggggcccgcctgtcaggtcttcgtcttcctctggccgcccgccgcccgagccctagcgccgcgccgccgccgtctccttccaaatccggccgcccctttccgtttccgatgaaattaatagaggggaaatgatacccgggatcccctctatcttttctcttatggaatcgtcggctaattcggtttgtaaatccgtggattcgagttcgattcggatcgatctctctcctccgaaccctagaccttccttcgcgtcgccggtcgccgtgggccttcgccgtcgcctccttgcccctagaaaaggacccccaagcccgccgctacccgccgccaccctcgccttcgcctctcgtcgccggtagagccctagcaccgtgcagccgtgcgccgccgtcgctccggtcgtcgtcgctgctcggggaggtcaccgtcgtggtcaccaagtcgtcgccgacctcgtccgccccaccgccgtcgctgtcgaccgccggaacatcgccgtcgtcgtcaagccgaaggtcgccgccgcttcttcctcgacgctgtcaccgtccgttgatcttccgccgttgttttggtcaccggtgagttcgccacgtcgccctctacgtgttggtgtcctccgttcgcgtcgtcgcgccgtcgttcgccagcgagcttgcgcgcccgagccgccgccggtgatgacgtcatcgccgacgtcatcgttgccgtccgttgtagaccggtcgtagaccgttagatcttggccgttcgttgtggataggatcgatctcggccgttcgtttccgtgagccgccgccgtgcacccggtccaccgcgaaccctagccgctgacgcaataaacccctttttccttttaaaaataattcattattacgtcataattcaattaaaatctaaataaataatttaatccgatttaatctttgaaaattcgtaactaattcatcttagctcggatttagttggttcaagtctctaaatttttctaaaattgagatctacatgttaaaaatatccacatgtactgttcatgcttgtttatgtgctgttttggtgttttgcttctttctgtttagattccgacgtttccggagagtccgttttcgtaggagaagaatttgaagagttccaaggccagcaaggcaagtcacatagatcccaaacaaccctttgagcatgttgatcccgtttaaagactattgtttctattcaactattgcatttattttcgaatgtcatggggtggaattaacctattgtttgttatagcccttttgttcttgattactttattccttgatatcttgggttattataaattgactagttgagctttatatattggttcagctagatattagatatgattgcttagccatgcatagaaacattagcacactattgggataacttatgactcactattatttaatgatggcttaatgatagctcatgatggttaatcatgattggttaattaattaatttgccaactaaaacctgataatggtgggttgtgagcacatggttttgatggtcgtgctcatgacaattaaggaccggttcacgagtttcggttgtgaaacattaatcgtgccaaccacaagccagcgtgggcaacggctttaccttttgtatagcatggttcattgcggagcaccagactgagaagtggcggagataagcccacgagggtcgctggggagtccatgccttgtttataagggggtgattatgatccaggaacggtgcactgtggtggattgtgttgtgcgaggggtactgtcacagctcctttccgaggtaccgtggtggtattgaggcacatggtgacatgttgtggggctgtgtcttgtgggtacagtggtacacctctggccagagtaaaactattcgaatagccgtgcccgcggttatgggcgggtctaacaatgtctttcgtgattagtttcacacttctcaccataataaaagatgctataactggtaataatttgattagctcctggtttggaatggtatattcctggtttggagatagaactgtgcagccgggatggttgttcagaatggttgggcctatgcaacagggtatgttgtatagcgttggattaatattgtttaattactacttaactattttattaaattctgaaatgtttattaaatgttgtttatgcaaatgaaaccctactatgccatcctttgttatcctatgcacttgcatatttgctgcgtggcttgctgagtatgtcatatactcaccttgcaatcattcattagaggaggagttctacagtgatgctgatggtgtggaggattaggtgtagccctggtcaagctgcctgtggagtggagtcgtctgcgccgtttatcttatttttttttcactgcttagatctttattgattgagaggaactatctgcctatgtaatgacattttattcacttattaattagagtaataattgtactctattatcaatttgttattgtgtgcctcggctgattcctggacgagggttcacacacatgtaagcgtttggaattttggatagaaattccgggcgtgacagtagttgagtgtgaggaaggcgaacaagagggccctccggctcgcgatggcccctcatcccccgaaggtctagcgcccaaagcttccagcccccgggagggccccgaggcccccaagggaggagcgaaggctttggcaagtggccctgagcttgatgatcccgaggcagtccgggatccccccgggaccaccgaacaggtgcgccccgagtcaccagcccctgacagcacgaatcggccccgccgaaaggtgcagcggcccgtctacttcgtcagcgaggcactccgagatgcgaaaacccggtatccgcaggcccagaaaatgctttatgccgtcttgatggcctcgaggaagttgcgtcattacttccaagcgcatcgggtttccgtagtgacgtcataccctcttggccaaattttgtacaaccgagagggtactggacgggtggtaaaatgggccatcgagctggctgagttcgatctgcacttcgaaccgcggcatgcgatcaagagtcaaatcctggctgacttcatcgcggaatggaccccggtggatgaacctgttccatccgatgtccccttctcccctggagaataagaggatccaaacgccgacattcgcggcgggcactggattatgcatttcgacggctccctcaaccttcaaggtgcaggtgccggagtcacgttgacctcgccaaacgaggatgtccttaaatacgttgttcgtctcgacttccaggccacgaacaacatggcagaatatgaagggctcctcgcgggattgagggcggcagccagaatgggcatccgccatctcctggtcttaggtgactctcagttggtcgtaaatcaagtacccaaagaatatcagtgcaccgaccagcaaatggaagcatacgtccgcgaggtacggcgcatggaacgcaacttcgacggacttgagctccggcacgtgccccaacgcgacaacacggttgctgacgagttgtcgcgtgttgcgtcggcacgagccccactccccccggggactttcgaagaaaggcttgcgcaaccatcggcgcgaccgagccctttgagggaccccaacgacgcgcccttcggcccaacccctggcgacccgcgcccctcggggcccgaggaggtcaaccccgacccctctcgtcaggttgtgtggatgaccgacatccgggcgtatctcgacgggaatactcttcctgaggaacgcgcggaagctgaaaagctcgcacgcatctccaagcggtacatcctcgtagagggggccctctaccggcgtgccgcgaacgggatactcttgaagtgcatttctcgggagcagggcatcgagctcatagccgacgcccatcagggtgagtacagagcccattcggcctcacgaactttggtcggaaaagccttccggcaaggtttttattggccgactgcattacaagatgcccaagaatgggtccagcggtgcagggcatgccagttccacgccaagcagacccaccagccggcccaagcattacaagtcattccactatcttggcttttcgcagtctgggggctagacatccttggaccgttcaaggcggctcgaggcgggtatcagcacttgtacgtcgccatcgacaaattcaccaagtggcccgaggcctacccagtcgtcaaaatcgacaagcattctgctcttaagttcatcaggggcatcacgtctcgattcagagtgcccaatcgtgtcattacagacaatggcacccagttcaccagtgagctgtttggcgattactgtgacgacatgggtatcaaattgtgctttgcctcacccgcccaccccaagagcaacggccaagtcgagcgagccaacgccgaaatcctcaaaggactcaagaccaagacgtacaatgtcctgaagaagcacggggattcatggcttgaggagttgcccgccgtgttgtgggcaaatcggaccactccaagccgcgccacgggggaaacaccatttttcttggtgtactgcgccgaagcggtcctaccctccgagctttccctgggttcgcctcgtgtcgcactgtacaacgaggccaaccaagatgaccttcgccgcgacgatctcaattatcttgcagaacggagaaggtgagcggccttccgcgccgcgcgctaccaacaaagcctgcgacgctaccatcaacgccacgtccgggcccgatcactacaagttagcgacctcgtcctacgccacgttcagtcgcgcctagggctgagcaagctctcgccaatgtgggaaggaccatacaaagtgatcggagcgccccggccaggctccgttcggttaaccacggaggacggcacagagctgcccaacccctggaatatcgagcacctccgtcgtttctatccataaaatcgagattttttgctttcctagcgctcaggccagcacccgcacaacccctcggtttgtgcgggactggccgggggctaccactatatatccttttttcctttcacaagcaatgatttttttctacttcttcgcgaaggccgttttttctccccttcctctagcttgtcccgactcaaggaataatccgcgtttattctaaaaccctaagtgctgtaaagcggcctgaaaaccgccgaaagggagcatgaacgcgggccgcgccccgggttgtgccgaaccccgggggatcggaagggcctacacacggtcgtccccgacccctggtcgtcgcagcctcggcctggccagtcccactgggcggctcccttggggcgatggtcttgcctatcaccacttaggttccgtggaccgaacgcgggtttaccttctcgctagaacaagcctgaggggggggaatggggccaaaacggcatatcaatcgcaggctgtctaattatccatttctgccttggttttttcttctctctatgtcacaggcatccgatagaaaaagcaaaagagttaaagggttttcagttgcagaacaagacaggatggcacgatggcctaaatacaaaaagtgcctgctacgggcacacagcaaaagggaataaaaagcgtgagcggtcacggagtgcccggccccccgagaccggcgccactaacgatgtcgtcccagtcgtcgtcgccgtcgtcgcccccgcttccgctctcctcgtctgaggtaagcccggaggtgaaccggggggccgacccctcgaagctcgagacgatcgcgtcggccgcctcccggacttgcacccgggcccttgcttcggtccatgggggaaaatcttcaagcgcacgccacggctcgaagtcggggtcgcgcgcttggtggctcgtaaggaccagctccaccgcagcccgcgccaaagaagccgacgaacactttatggttttgccgacctcctcctccagcctctccaggtccgccgccagcccgtccagccgaagcgcgagtgccggctgtgtgggcggaagcttgctatcccggcgcgcggagatgccgactcgacgccccgcgcgctccagccggttgactgcgttggagagctgcccgggcccgagcttgttggtgaggcggagggccgcaatctccccatcctcatcctgcaccaggcgctccaggtcggcgagggtactctgagccgtggcaagctggctcgccaactccgcgccgccggacggcccgctcactgtcaagtccttctcccgggcctccagctcggaggccttcaccgctatcgccgcgcgctcagcgcgggtgctctccagatgacgagcctcgcgcccggcgacagcctcctcgcgtctcgcgagttgctcgctcagccggcgcgaggctacctcgcggcggcccacctcggcttcgcgcttggcaagtgcagcatcccgttccctgcatgcctcttcccgcagccgtagctcttccgcgcggtgatccggtcacgctcggccgcggcctcttcacggaggcgaagggaagcctccacctccgccgccgttctctcgtgagtggccaaggtggactcccgctgatctagcaggcgcgctcgctcctccagctcctgggcccgccgcgcctgttcttcactgcgcgcgttttgctcgcgctggttccgatcgaggacttcgatccgccgacggatcgtggcttcaaactcctgtgcggagcgagcacggtcatccaaggccttgcgctcagcctcgagtgccgtcatccgagcccgcagagaggcgttggcctccgatgcccgccgctcatgggcagcggctgcgtcgaggatgccgcgtgcatccctgaccctcttcgccaagtcctcgacgtgagcctcatactggaggcggatgtcgcccagcgcttcgtccagggcgcttgaggcaatcagcgctgcctgcagctcctcctctgtctcccgcatgacggagtccagcgcctcctcgcgcgcctggatttcggctagttgggtttggcgcattttgcgccccaccctcaccatgtcatccacggtgcgacgcccctcttcgactcgcgcacggtctacggcgagcggtgcctattctgcatccagggccgtccgctcttccgccagggcttgaatttgggtgttcagccctcttgtacggtggagtcggcggcggcgagcacctgcagaagtggctccatgctcgccggagtcagggaggaaaaggccgcggtccgtccccgggacaatggggtactgctggatccaccgcgagactgggggctgctctcggctccccttctacgagacaagcctcgagggcgccgcaagcgcaagagggaacggctgtctctctcaccccccacttcgggtcctcgggtggattcagcctcggcctcaacctcgggctcgggaccgccctcagcctcggcctcgacctcaggctcgggaccggcctcggcctcaacctccgcctcgggctcgggaccgccctcggcctcagcctttgcctcgggctcggggccacctctggcttcggctcccgggccgcgtcttccttcaccccccgatcctgggtggtgctccgcgtgggccctggtcctggagctgccctcgagacgagcgtcgccactcctgtcgcccgcggtgggtcggattcctcctaagggtcgctcgggatcgggcccggtgtgtgacctctgggccccgccgcgaggctgcgaaaaccccgcggccttggattggctgggcccagattaccccgaccgttcggactttttcccacacgaggggcctgaccctgagattccctgagaaggaatctcgctacaagggaacccagatcatgttaacaaaagaaaatgaagggacaagagaacgggttgagtaagagcaccgaagtgagcgccaacaatcgtacctacggggagggcggttgaaggtccacttcgggggctcgatgaagctcccccggcatggctccgtttgccctatcttccggagccgcttccttttccgcctagtctcgggctcggctggtcgtttgtggcccactagcgaacgatctgttgcgcgctcggcaccccctacacgcgggggagagggtggtcgggaataggtcaccttccgtttcccctttgggtcaccggcggaatcgcctccgggtccgcggctcgatccgggcgcccttgagccgccgccgcctggaccgccggcacggcttccgccagcagtcgcaccaccgccgcccccgccgacggcgctaccgctggcgccgcctcggctggaccggctcctgccggcgccgacggctaacatcacggccaggatgctctcccggtcgcggtcgcagcagaggggaagaatcccatcggggattagtgttggctcggcggagtctaggcccaacacccaccgaatcaccctcttcgcgtcctcctcaccccagtcccagggctcgcccacatgcgtccacatggggtcgttgggaccagtgtattcccacactccacgggatcgttcctggagaggtgcgatgtggcggcggaagtaatcgccaaagaccatcgcccccatgaggcccaggctccacaagcccctgaggcgatcccacaccacgtcgtattcctcacccaactccgacgtcgccaaccatgcggcagacctttcgggagggccagcgggaatttgaagtcgcggatggtccggcaacgtagtgtagaaccagtccttcttccagtcctcccatttcttgtggagctagctctcgatgtactggcccgctgtgcccggtcggggctggaagtagcatcccccaccaactgcgccttgcagcagctgcgggatgaagaaggcctggaacaaccgcatcgtcggtcgcaccccaatgaacatctcgcacaaatgcgcgaagatggccagcgtcatcacggcattaggtgcgagatgcaaggcgtgaatttcgtacaaatccagaacttcatgtaagaatctggagaacggcgggatcaagcccgccatggcgaaggacaagaggtgcacggatcactccagatatcgcggccacagcctcgactctcccgcccgcacgacggcaccatccggcatgatcttgcgaggaaggctaaggtgcctgtctgccgtgatgcgggaggaagggagcactgtgtcgccggcgtcttgggccatggcaaccggcggagaggtgatggagagcgtggagcacgagacagtgtggggtggcgaaaatgttagggttcgagaagcgaaaggacgagtgggcggttggcgaaaggaagaaggcagagtctccttctccgcccccttttatccttgcctcatccgcgctcgcctcctcgtttcgcgcccccataactgcccttacgatcctcgcgcccgcatttgtctcttcgcatcccgcgcccaatcatcacgtcgcccgttgtatccgcttccgcctttagtgtgcccgtcagtggcacactcgaggtggagtgtgccacggccatgagcgcaagttgggcaaactgtcaccactaccgctgtaggagtagcgggcgagagaatcgaggcgtggtctaactgaccccccggttatcgcgcctcaagtgtcttcatcatgagcgcaatcagaggcggtcaaaccgctgttgtggttagtacgccaacctggccacgcggtgatatccttttggattccctgccgggcccacaaccccagctcgaggagtcgtgaggcgccatgtcagaacgatcccaggaaatcgatatctgatatagcgccgggggctactgtcggagatatgggcccgggggtatgtgaagtagaggggaattactttccctccggtcacatgactctgcaggttggccccgctcgcgcgtcacgcgagtcgtggaagcggcgggggggggggctcggggcatgacgtcacccccttgggctctcccgcggcttcgccccgaggccctcaccctgtcaccacgcggcagagggagagagcaagaggggagcacaagctgaacagccataaatgtgcgacgcccaaactgtctctcaccgcatttaatgcggtaagggcagacgtgcggcgtggctagtgaacccctgtccatcggatgtgaccggtctgtgaccggcccgtctccgtcacatccgatggatagggcaatcatgtcctcacgtcgcccttgtccccggcggaatgggggtgggtatgacccgtcacatccgagcgccgctcgaggaagggctattgcgtgtcatcgttcatttatgagggaatgacagggctatcccctgcgtcaggcgaggggcggcgccgggttccactcgagaatcggttattgcttagcttccgggagaaggcccggtttaaagcccaaaaagtggagtggggtccccccccctcccgatggagggtaggtagaggcggcacatgtggtatccccttaagctataaaaggaggaccctgtccactgagatagggggacgactcccagaaaacctgagctcgagaggagaaggagcaggtgcgctctctgggggaagaaacccttgtaaaactcatccataatcccaaacacaggagtagggtgttacgctctatagcggcccgaacatgtataatccgactacgtgcaagcttgccggtaatcttagggacaagcgagtgatttccaataggcgggcctccgccccatgccaaactcacgaaaggggggggtctcacgacctcccgctatcagggggccatccctcgacagctctagtagttttcctttcctcttttgtaagctttacttttattagaatactcttctatatacatttatggtattgaaatactttccgagtatatgaatgcttactttacattatgttcatgttatactaaatatactgctagcttatctgggagatgctttggtgcgggtataatgtttgcttatgcaattactctatgtcatgacgatgatattggagtagtatctgatagtttagacgtggtgtctagattacgggatatcattatttggggttatatgctgcggatgaaaggtgggccgctgatggtgacaactcagtacgggtattcctccgtgcttatatataattctaagttaattccctggggagggtactcctccgtatttagccccggttgtatggtcatgacgggctgtcgtaaggaactcgggcagtcaggggtggcttctcgaagtaccaggagggcatcggatagagagtattagttagtatatcagatgactagaatgtatgtatactatgaatattagaagtataggaatagattatctttttcttttctttccacttagcttagatattttagtatgagaatgagtagctgatgcttgtgtgtcactctacccttggattatcttaacccctgcttagactttgattatcacaagtaacatataaattattaatcaagttctctctacatgatctttccacgggataaaataaatacgatacccttggaatactctcgggtgaaatgctacaatggtatatccgtgtgcttgcagatgaactctgtaaccataatataccaggagtatttctgcgtcgttgttgggaattatatttctagtattgtcgttaagaaataccaacaccacctaggacaaaaccactctgaattgggtcgaggggggtaattcgtctggtattgaaagttcaggctgagcgatgtttggtttttgggttggggggtaattcttaatttttccaaaaaagaataacctcattttatcaaattccagtgcaattattaatcactctatttactccaaatgtatttattcctactttcgtaagctctgatgcagtaattacttaatatttttttcttttgggacaaatagaggaactaaaaatcaacttattctaaggatggatggagtatgtctgacttaataataaaataagtcctcttttctaacataagttaactttttatagaatagagggataggaataaaccattttatttaccttcttatttaatgaaaaaattctactacatgtacaacaggagttaatttctagtgtttaaaatatgtcaaacaaaacaagttgaatttgaatttcgtacatactctcagccaaaactattaaatgagttttatttgttgtacccttactgaactacctgacaatattgtttttacagtttagtctttttcccctcgtcactaattttttatatagaaccgcaccaaaaaaagaagtattttataacaagaaaggtataatacatgaacatcatgtgatgttgtcctttattcagagagaactactacgttttactatactccctccgttaaaaaaaatgcaaactctatcaatgtatttagacatgatgtatgtccagatacatagctagctaaattttgcctattcttgggatggagggagtattaagcaatgttcaagtgagcaacatagtgtgaaaatttcactttttctatgcgcatatttcctaaactgctaaatggtatttttctttttgaaaaaataatctatagggaagtttttttaaaaaatagattaatttatttttaagtttaaaataattaatacttaattaatcatgtgctaatgacccacttcgttatgtgtatcttaacaatcttttccgatccgctcctttaaatacaatccgtctattctgcttgaacaacttaggcccctaaactaactactccctctatcccaaatattatcccaaatataataacttgtattcaaaatataacaagttctctacgtatattatcttcttaaccaataaaaatataagaacttgagtgaaaaatataacaagttctctacgtatataatgatccttaaccaatcatatgcttccaccattcaaattctccatctgcttacatataccatgtatggaacctaggtattatgacactcatatttaccaggtctaataccattattccaaggcatcacgcccattgatgccgtaacgacaggtgcaaatacatcctggagccttttactggctgcacgcgttaacacgatgtgataccaaccgatatcagcgttggtacttatgaatattagcatgataccgggtttcgactaataccaattggtattagatcccgtaccaatggtatcgtatggtaccgatatacttcctccgtttcagattataaaatattttaactttggtcaaagtcaaactatttcaaatttaactaattttatagacaaatatagtaatatttataatactaaattagtttcattaaatcaataattgaatatattttcataataaatttgtttgaaaatgttattattattttcttcaaacttagtcaaacttaaaacagtttgattttgaccaaaaccaaaacgtcttataccaggtctagtaccttggtatcatacctggtacgtatagcttggtacaagtcggtaccacatactagtgaacaacaaataatggaacacacatctataggtaccgcccaattatcacaagtgccaatcctcttaagcaaatacaagagccatggatacgtactactccctgaatgaaaatcaaactcgatagcttttgactaattatcatacttactatatctatactaattagtattatgcatgttatatcactatattcatattttgaagtacttttcatatgatgctaattttatatttgttgggatcatagaatgaaataaaatattggtcaaagtatattattgaagattatgtaaaaaaatataggttttataatttagtacagagggagtattaggactagaatttatgtggtgttgcattgctgcatcgctacatgagaccagccacgtcacatgcatacattcaactagcaacacagccatgccatgagtagatctgtagaacactgccacatgatgatcgaattaccgacatgcatgcaatagtcattcagacgatgattatatataccttccttcatcgagatggccggcggcggcaagccggcagcggcgaggtactgtggctgtacatgacggtaatgtattgttgcagggaaaggaacaaatggacgaactcgatgtgagcgacatccgatcgaagtggcggccgacgcacgccaatcaggaagagtcgcgcgcatggctacacgacctgttggaagcttgcgtgtgggggtggggtgcgcaacttcggggatatatgtacgtgggagtaattcgacggtgggctgttgccccgagcgaagcaaaggaccatgggatcatgttcccatggtcctcaataaattattttcattcattaaattagatctatgacagtaatccctctgtcctacgaaccgtctaatccctccctatatacacacacaactcctatgtacgtacatacttacgctagagatatagaaagaaaataatagagtttgtatatgatctttcccatttggtagtttacttttctttctagctctatggttttttcccaaattaagcatatacatagcgaccactcctatcgaggtggtaaaagaagcgacaccacgatgtcatctcacgtcacccgttgttccatccttttctcgtcaattccttaaaaagtttttttttattaacgatgtaaaaggcaatcctaggagctgatataaattcatccagatgcacactaggaatacatatatgtacaccctctctatatgatagataaatattcgtctaaaaaaagaaaaacatacgtccataccagatactactattcggaaaaaaaacatatgtttaattacattttatcccttttacgttgttttcatccaaagtgttgagaattagcacaaatatttttgacaaattccatcgaatattaatccccacgaacatatatgtgaattagatgtataatacaatattaaaaaaaatcaaaatccatattaacttgaggatcatagtttgagcaaatacttttttacatggtcctcgccactttttagctattagatttttaagtaaactcgaatgatcaatcctactaatttttaaatgagaaaattatttatgtaccactaaaatcaattagtattgattaacatcataaacaaattatatctactctatataataaatcgaatccagacataaaaaactactttcgtcacctccatcttctttcactcattccctaaagggcgccaaacatgaatctcaactagctacgttgtagtaacttggcaagagtatgcatcattgagttgagatggtccgagtaagaggttaccgttaaaatagagctcaactggcctacttaccgatacaatcctatataaaattatgctccatgcttgtcttgaggagcacaagtatatcaatgtaggagccatgaatcaaggatcgaagaaaaaaaccttagtggctacagtcggcttcacccagatgttagtggggtcggcttcacccagctgtaagtggggctacagtctgcttcacccggtttattttttgggtacatatgtaattctatctattaaaaagacatccatatttcaagataatgataataaatagtagtgataggtgacgacaaaaagttcttttcttggatatgatagacattctgattatttttgagtgtaggtttaaaaaaaatntttattggggtcttttgtttttttttataaataaaatgctcgcgtatctgcgcgagttttctttttagttatattaaaatttaaaattgttacatagtgagaaaataattactactagacccaatccaaaaggtcgatattacaacttggtatttactaattccgaattcaaaatttattccggacctgaaaaattgcagaaataactcaaccacttgctaacgaacaagcgcgctaaaaacaccaccaccattagatcatcacagccgccggagcaggagcggcgactgcgcgggccggcgagctccggaggacggcagccggcgacggcctcccgcgccccatggtgaaccctcgcgttccgtcgggcatcctcggcccctgcggcgcgtggcgggggctcatcatcatcagggagtccaaatgcccggccgcggcggcggcggcttgcggcgccccgccggcggcagcgtgcggcctgcttccccgccctctcccccacgacttcttaccgtgctgatcttcctgctgccaatcgaggatccagctgggtcaggtgttggtccgcaacaggtaagaaggctcagctggttgcgttgcttacgtgatggtcaggcaagtggtccgccattggcgaatccgacgacgcctgggattgcggcgagtgatcgtcgtcggagatcatgaggtggtcgaagtccggccgcttcaatcgcatcgctgatttgggctacgaacacaagaatcaagtgactattcccattttgtggatgcattgccttctacaacattaatctcaagtgcatagtcttattaaaaaaattagtataaatttgtaaaattataaattaagactagagtttcttctatgagaaataattcacaacaaaataaataatatttataatttttaaaataaaataaatgttcaaacgttataaaaaaagtcaacaacgtaatacattttaagatagggagtagtttgcatgggcgtagaggaagaatttcagattaattaccgatcgacgtagcaccgggcgaacgcggagcccctttctccagttgcgctcgtcgttgagcttatcaacctgtcaaaacacagttacattccttcagtccagaagaagaatagtagtactgaaacgatagtaaattcagggaacttactgcccgatcagcttgctgcgaggtctcatactctataagcgcgtgcaactttggaaccgggaatcaaacataatacaagatcaagatcagtgtcagcaacatgctcaatacatgatacacattttttttgcgtattgccaaaaaaaagaaagaaaaaaaactgaaaattaatgtaagtaccttgttactgattagcgcgtcagacttggaagatctcgcggagctaggctcttgcgggtggcatatcctgatgttcttcacgctgttcaattacggaacggaactccacacaagttaatggacatgccacaagttacacatcaacagttaaaccgatctgtcggtctgaccttcctatgatgccgaagatcttctcgaggctgttcctggttgaatcctcaggcaaattctccgcgatgaccattcgagactgtgaaattaatgggagttaattggccatggatggttcacaatgctaaacttgtaataagcatctgaatttcgcataaggaataaaatcttgccgctgacctgcaattcttctttgtgtcgctcggtgaatggctgtgctcgtcgcaccttcttaccgtcgtcactcacaacctccagagaaggaaatcatgaatcttaggattcaggcaataataagaagagattacagttagcaacggcgacttacgagctttgaggatgttcttagagcattcactagcagttggttggtcacccccatagccttgattttcttccaggatgaaatgacagacataggaactgtccagcacatggaaaggaacataaatttctgttaagattttttcctcggcgatcaattacctcatgtcattttttttcttatagacaatagttgtctgatctcaaaatagttcatcagtgtagtggtgtgtaaaactaatggacggcactatgcttcggacgcctgatgaaaaggcaaaaaaatcggacgctcaacttgtgcccgttgtcccattgcatggatgtgcacgcaaactgttgtatgcagatgtacgcatagggtgtgtttagttcacgccaaaattgaaagtttgattgaaattggaacgatgtgacggaaaagttggaagcttgtgtgtgtaggaaaattttggggtgtgtttagttcacgctaaaattggaagtttgattgaaattgcaacgatgtgaaggaaaaattggaagtttgtgtgtaggaaagttttgatgtgatggaaaaattggaagtttgaagaaaaagttagaaactaaactaagccttgatgtgatagaaaagttggaagtttaaagaaaaagttgggaactaaatcgggccatagtatgaatctggctctagtacatgctttcagtagtgtatcttttcacttttattttctttactttcttgtaaatctttaaactgaatttttctctaaattatttatccgatctgtaatctaattacaccattgtatctgttgcaatttaatatttacaacaagatctcacataactatatttctttaaaaagaataaatcttataattattgaaacataaaaaatacttactgaaacattcaaagacaaccatgtgaaacatttacatataagctaatgaaatatcacaaaatacttagtcaaacatcgaactagcaccatgtgcaacattgacaaataaactagtgaaacatcaaaaatacttagtaaaacatacaaataacattatgtgcaacattaaaaaaatccattgtaatatagtgcaacatagttgaatcctagttgaaacatcttattctgataaatgaatcacaaaatcttaacggttgaaacatatatatatattaattaaaatatagtcatatgtgatcttgttgcaaagatttaattatacgaatataatggtgtaataaaatcataaattggatcaataatttaaaagaaaaaatcgtttgaagtttgttaaaatgtggttaagacgagtagagaaagcaattcaaactacgtaaagtaggagagtgaattgaagaaccacgcatgtaacgtaagagtaggaataattgcattcagaagcacacatgcacccattgcatgcagcgtcagatttatttgataaaatcggttgaccgatatagagtattatccaaaactaatggttgttttctattaccatagcactcaggatccttgttcatgatcttcatcaagaaatcgtttgcgaccaaattcgtgtcactgaattggtactcgacctgattccaagaaacagagggaggaaacattgttgaattcaaagagagcactcaaatcagtaaaataataataaaaaaagataacgctcaatccaacccaaaatggcatcatgttgaaatgtaaacctgcttgatgatcttctgtgcaatgtcggccggacttgcccccttgggctgcccattgccgccgccgatcttggcgtgtccaaagtccggcaggaagaaggtcggatctgggtcggcgaagatgctccagtccgcgccgagcccaatgctgctgcccggcagctgcaagaacggcgagtagtagccggcggcggccgcggccatcgggctggcggccggcgacctcggcacgaactcgggagcgtggacgtttagcctgaagggcggcgtcgagcactcgccgctgctgctcgcccccgcagccgtcaccgtcaccgtcaccggcgccttgccggagctgccgcggctctcctgtggcatggcgaccggttcgatcgatcggagtggcaaggggcacagagatgtgtcgagatccaaaatgtgtgtgtgaattggtgtacaagagcgcgccgagtgtgttggtactctcacttttatgcgcgcggcgcctcgggaggctttgaccacttcttcgtgggcacttttgtgaggtgagagtgtttcttgggcagcttttttcgcgcatgtgtggggcttccagccttccatagtacgtaccgctactgtaggagcgaggccgctgaccaacggggggcagagttagaaagcgggaagcacctaatctttccgtgtacacattgtatacatctatatctatatctatatctactagcaaaatgtctgtgtgttacactgggtaatgtcatattgaataaattttagctgaacaattttttaagcagtatagtatgacaatcataattacaaattattccacgtgtacgtatatgatatgaactatgttcccgacacgttattttcacgcaaacgattgtaccataggaggaacaaacggtgaatggcttaggttactttcacgcaagagcatattgatgaaaatttgtgtgaataacaaaaagaaaatctgtatttaaaataggtaagtttatcataaaacaaatgataatcaggacagataaaaaatacttttgcatatttactcatagtctcgtagtggtgacgcgtgctttctcaatctgtaaactcgttcaatcagacacccgcatagaacaaatcttttgcaaggaaaaaaatttcctaggttggatagattaatctctatatataaataatacaacttaatagaaaatagtcctattttttttattttttaatacaattaaaaaaagaactgacattcggaattaaaaaataaggaatattgaaagatgagtttagagtccaaatagaaatactattagaaagaatgaaattcggaatttaaaaataggaatactaagaaggatctatatatagtccatatagaacatgaaatgacaattaacgcgcataatttcataagaaatagaaatactattaaaaagaatgaaattcgaatttaaaaataggagtactggaagaataatctatagtccatatataacatgaaatgacaattaacgtgcataatttcataagatatcaatttatctcaccatagggtaagaaatgaggctaagtgtccatatgtcaccaaaattaatatgagcattaaattgtacttcataataccattaggccaaaatgaatcaaaattgacattagtacccgaataatgaaaaaaaaaatcctaaatcgtaacttccgttgggccaaaatgataaaggcaatagcttaaatattttagccaaatttctcgttcattccatttagctagacatgattttatttgcataagaaaatttataatgcaattttatgggatcaaataatggcttaaactgattaaatttatttatgtaaatatgaaaacattaattcgggcaaaatttgatcaaaacctcttttaggctcgagagctggccgcggcccagaaggcatgcaccggcccattcacgcgtgcggaagcgcacccggccagtgagaagagtgttgacagctgttaaatacaaaatttaagccatcaatacctacataaaaccataaatataaaacatccaacatagtggtagggtttatttctaacaatttacacgagtgttggtgtatattcgtatgcaggtgacaaactacctaaattgagaaaaaaaatacatgaaggaggaggagaatcaaacgcgtatccgaatatatggagttttggacccagagacccaattaaacacctccaaataggccttccatccataccaatgaatgaagggcccaaaatgagtatccaggccgaaaaccggagcgaaaggagccgtccattacggaggccgctggcccaggcccaagttcagttcggtagtgctccgctctccctatgatggttatggcgttaaaaccggtagaaaccgtcattagaagggacacttggcatgagaggagtaaaaaagtcggaggaattctgaagttgtcggtaatcctcttcatatttcattctgctctatttattactttgattataattgaaatatcttttgagtaatttagttttgctcagtgagaattatttcttggttagttcctattcagagtacgggatcatcgttcactacaatcaactataatatggtgattgctttagtgagttataaacactaaagtagtaattaactgcgtagacgtggtgtctaggtagttgatttccagtgtttgctccgcatcccacagtaggtgtgaggtgggtgtagaggtggtgacagccctcaagacactgaagttctccctgtccgggtgcgcagtagagcgatatctgggagcagcgagctggctagtgcccgaagtacctcattagaattaaagttaagcttttcgtagacactgttcttcaccggtgaaactcctctatcctttgcctatccatagcttcgtgtccttggatgaacctgaaccggagttagcacacatattccctgtggaaaatcgatacctgagaatactctcgggtgaagtactacatcggtatattccgtgcacttgcggatttatctgtgatcgtaagaaataccaataagcatttctggcgccgttgccggggaacggttgttgtttatctccgaaccttgttcatcctcgtatcctttttatttttctttcttctaccttcacccctgctatcctcgagaagcattccagtaaaacattctcaatcgatggagccacaatctattttccaattgtctgctcctcggggtgaaatttaagagccacctccttcatcggagcctatttcaacacttggctatgaaattcgtcacgaattcattagtatggttagggagaaatctttctctggtttaggccaggaaaacccctaccatcatctgcgggaattcgagcagctttgctcgggccttaagattcgaggcatgaagcaagagactgtttggtggaaattgtttccgttctctcttcatgagagagcgaaacaatggtacacatgtaccgttgggtgtgtaaacggtgacagggagaaattgcaagacaggttctgcctcgcatttttcccaataacccgtattactactcttcgtgcagaaattctgagtttccaacagataaataaagaatcgattagtgcagcctggtccagataaactaatttagttcagtctggcccaaccctatctatacccgattacgtgctattgcagcattttcatgcgggtttagatagggagtctgcattctaccttgacataactgctggagggtcattcatgcacaaaactcccaccgaaggcaaggaaattctcgatcgcatatcaaaaaatacctcctttgtcgggcagtgtgttgaaccccatccagaggcatttgtgtcaggaagggaggacgaagggagtatgctttacaaaatgttgagatgagtatgtactagcactatttttttaaaaaaaaattgagaatatatgttttaataatttacgtttatttatatgcatgcatgggaagaattagcataaatatacccctataggggaacgcataacggggacgaggggagcgctacgtaatcgaggcttggatgtgggaccgccagctgggtcgttatatttagtatctttacctattactagtaagtgtgcacgtggaatccacgttgctaataaaataaataaaacacaggacggccttcctctggagagcccccaacggcgcgccactcctctcctctcccccgccgccgtgccgcacgccgttcctctcccctctaccgtgctgcgcgccgttcctctccaccaccgagctcgtcgtcgcgactgccgtgtctctccgcctctcccgctgctgccgcccctactccgcgcgccgttcctctctgccgccgagctcaccgtcacgccggccgcctctcccgctgccgccgcccttgctccattgaccgcctcacgccgagtttgctgccgcgcctgctcgagagaaggagagaagagaagagaaaaagaacagaaagggtggggcctataccattttctatcacttacatatggggctcacatatttattatattttatttttactgactaggatgccacatcagtgaaaccgagtgtctatagtgccttggtatgttttcttgaatggttttacgtagttcagggtatacatttcttgtattgcggttaggggacctcaggcagactcagcgtaaaattgagggacgtcaggtgaacttattcccaagatgaatgacctctgatgtactttttcccaaaaaatcactgcacatgggccatgcccgccttgagcccaaggctgtggtctagactaacgagcaaaacagcgaaaaccccaagcgccaccgcttcactccccgtcggcgaccagccgactttccccaatgccggcgccgcccgccgcttcctggcgccggcacgctgctgccgccgccgcctcctcctccacgcgcaaaaccctcctcctcctcctccccgtcttcctcctcctcctcctcttcgtcctctccagggctcctgatctcaccctctcccccgcggccgcctcctcccgccacctctccgccggggttcgcccgttcgattgctacgcgtcgcagcaggcctcgccggtcttcgccagcctggtggagggcgtgccccaccccttcttctactccctcgccgacatgggggctcttcccgaccacccccacaagaacatcgctcgcatcctcaagggcaagcgcttccgcaagcccgacatctccgagacaatccagcagctgctcggggggaaggtggggatcggatcccgtggtgtggtggtcgacgtgggtgccaatgttgggatggcgtcgttcgccgcggccgtgatggggttccgggtggtggccttcgagcccgtcttggagaatctgcagaggatttgcgatggggtgtatctcaacagggtgcaggaccaggttgtggtgtaccatgccgcggcttctgatcgagttgggaacatcacaatgcataaggtaatagatgagtactttacattgctgcctgtagttttgatgttcacatgtctattatttttttaaaaaaatactttgtgtgcaatggctgccttctatgttataaaattaacaaggtttttactgattgggagttcattgtacaaagttaatcattagaggtgataccagaaacaacaacaaaaaaaaggaaaaaaaaaaacaatgtgtaagctagtatggcaagctctcattatgcaaaaaatgaacctttgaagtattcttgggcatgtctcgagttttatcgggatccgggaactcattttcgttactaatggaaagaacagtcttcttacagagatgcatgaatgagtaagttgcaaactagaacaaacccagtatatgtttccatgcagatgtgattgtttcatttctgcattgtctctaaaaggatcatgaacattcctatgactttagttggtcctttcaatttcatagggaaagttttcaagattgtggtgctcatctgcagaaatgtttgaagctatatatgcataagtctgaaatgtttccttttcctttaacattttaactcactgttgggattcggtgtttatctattttctattattgctataatttctaaatgatttagaaatgccacaactttatacataaaagtcatttttgtaataatgtgctctaatgttatcaatgcaactcattgaccatttcattagagactaactttctcaaagaaatacataccatattgtatagttatttaatggtccagttgatagttcattaaatgcatgctggatggcgtaactaatgctttagataaattgccttgcattatactaaatgccttcattagctagttatgtttgaaaatcattgtggacaaggttctaatttcttgtttaccttagaacttcagattatgtctatagagtttttttactccccctgattcgaaatgtaagttgttttacaatttttagtcacttttcatctccttgttcgccattgctgaataattcttcttctctcacaagtcacaaataaatgacacttctttccctataacaaatgaacggtagcaaagtcatttgtgctgctttcttagttctcgtgcacaagtccaaattacttacattttcaatctgaaagagtatcgctgtgaaacaataatttcattgtgcaatcatacatgtgcaaacatattggaatcagtatgtaacttaaatgattcaaacatgtttcattttgccattattctgacttgtgcttccactggaaagtactctaattctttgaattctccaattgcactctgtatccagatactcgatatttttttaatttattcgacagcttataaataattattttggttacctaggtgattggacgactcgacaacagtgctatatctgcaaccggtgcaaaattggcttttaaagcaaatgaagaaattgctgttgaggttgctacaataccactggatgaagtcattctagatgcagagcgagtggttttgatcaaaattgatgttcaggggtgggaataccatgttctgagaggtgcatcaaagttgctttcaaggaggaaaggtgatgctccctaccttatatatgaagaagatgaacgcctactgcaggcaagcaacagtagtgcacgagagataagggcatttcttagtagtgttggttacaatcactgtacacgtcatggcacagatgctcactgcacgaaaaactaggcatgtgctttttattcatgtaagttgatgatcatctatgaacagagaaacattcatatatgatgtgctgatctgtagaaaagcattttccctctcaggcagcactttcatgaataaaaatagttagtcaacttttaattcatggcttctttcttttgggttagattgttgatggtcgagttttagtatcatgttgatttctctgatgttatgacgatgtagctatgcctgttaacttttgttgcatgttttgactctgttgtaaatattagtggatgtagtcaggcagtaacgattttcttattgtgattatgcttatatttttatcatgttgagaatttattccaaatcagttatgtttggtatatgcctgatgccacaatgacccccccccccccctctcctttcttttccttttttaggagtgcagtacagttgattgaaagaaaaggggtgactagattctgttgtttccaatatggtttagcttgtctatgctattacggaactaaactaatcttgtataatttttctatagtatttggttggcgtccaaattggaccaagtttcagagtgagcaaatgcaaatatactgcttgttcccttgcaatcactgcagaatttcaccatctatctcaacccaagggatatgcgcaatctttggccagtcaatgccacattcttttctgagtctatccttgagcactgggttacagagtgcgacttcaagctttctaagagacagtggcagctgctcgtctgggagtaattccaactcagggcaattccacaagattaatttatccagggactccaggctggacaatgaggaaggcagcgattgtagattgttgcagccacttatgcagaggctttgtagtgatcttagatgtaggaagacatcctcattgtctgcagtgaaggtggtgatctctgagcaatcttggatgtctaggttctcaatgtgctcaagcctttcccttaaaagagggcatgtgagtattctcatatgatcaacgataaggcttctaagtgactgaaagcttgctacaactccattggtcactggcgaggaaaatctggcaagtagcttggggcaattgaatatgcagagagatgagacagtggtgacagtggtcaattgtgtcatcttcacatcatgatggtatggaacccagaaccctttttttgcaattgtcagctctgtaaggcttggaggtagtggaggcagctctttgagcttttggcagtccttaatcacaatattgcggagattcatcatttcctggcctgtccatgaccactcatttagttcttgcatgtcatcaagaactagctcctctaatgactggaaagccacatgtgaacttctattgccatatacctctaggcctatttgcctcactgttttcaaacgctgcaaccaaatagtcctgacagatggaagctgaccaagtggtggaagctgctcccaagcattgcaaccactgaggaagatgagctcaagattgattagccatttgctttcaagccaactgggggctttgactcccatccaaccgatgatgtccagcctcttcagatttgggtgtggctggagatactctaacacctctgcttccttatctgagtttaccaaatctcgagcaggtgcccacatcagctgcagcattgtcaggtttactttcttacacaacatggcttcctttgcctcatcaggagcatcaatgttctcaaggttcctaatgtggagggatccacgaagctcttgtagataaccaagctgaattatgctgtttgtttcctcactggtgaccttgaaaatgggcaatctctgaaggtatcttaggcttcctatgtctgttatagtggaaagaatctggttagctgctgtcagatgccgtaaactgaccaggttgtttatgcttgaaggtaacttttcaagcctgcagcctgataagtttagaacttgcaagtggtaaagtttacccaagtattctggtaacatgttgatggcagttgatgagatatttaggtatcggagatgcacacactgtcgtatactgtcaggaagtctgtcaatcttgcaaggtgataaatccaagacacgaaggctttgaaggttatcaagaactacttgtgggatggaaatgttgattggagccaccattctgctcgtaaagaaaatgagagtgcgcaggttcatgtatggtattgtctcgtcaagcattgaaaggctatctagatggattgatagatggcgtacagaggatgggatccttctctgttcatcacctcctattcggaaacattcttcggctgaaactgatttggcaagtttgtgaataacgggaggcatcacataatagctgacaaattgtttcttctgaatggcaaaaaatgaccgactacataactcatcaacatattgcttcccaatgtcttccattctcctgcaaccatctgggtatacataaccttgtgccatccacatgaggatcaactgctcagcttcaaattcccagtccttggggaagatactgcaatatgcaaggcattgttgaaggtgcactgggagattctcatagctatgctgaaaaattggcatgatttcatcccatactgcatttctctgtaagacttgtttccactcatctgtggtgtgtttacatttcagctgtctagcgaccacctttgcggcaagaggtagaccattaagtgtcttagcaatctcgctcccaatattcgccaactgtgaatttataagatggttcgtatcatcaaacacaatcatttttatcagggaccagcaatccttatctgacaagcactccaggttagttatatgggctgactgtagcatctccgccaccatactggatcgggtggtcagaagtatcttgctcccatttgctgcagcctttaggggagaaagaagcttctgccagttctcgtgctctatcgccagagttatcttgtcattgctccagacatcatctaagacaagcagaaaccgtttggatacgagccttgctcgcagtgccacctgaagcctgttgaaatttgttatgctgtcatgcctaaatcgactgctggaaactgactctagcatctctcttgtgatcctggactcatcaaaggcatcagtaacacagatccacattctcatgtcaaagtactgtgctactctagtgttgttgtacacatgctgtgctagagcagtcttgccaacgccaccaactccaacaatggaggcaaccgagactggattatcaccatcaacctgagagcttaaaagagtacttaccaactgttggatttctgattctcgcccgaagatttccccatgggcaactgagcttgtcatgatgctgtatctgctgtgcctgggcttccttggtagactgagtgcttcactgactccactagcaacctgctcaaggcgctccaacagatttaccatctgattcttgaccctggttgatctatcccagtgtggctctagaccagaagcttgggccccttgattgcgaaacctggaatgcataaaggcgctgattgggctactgttgctctctgttgaacttgattcctgcatttgatgatggaggcggttgtactcaagcttgtctaggaggtcctctgcatggtacatgacatcccggagctcccgcatccatgggagggagccgtaagacagtgaaggtgttacctctgccccatggaggacagactgcgtgcgaagcagcgcgacacgaagtctgttcatctcatggctgatgccgcagtcggccgcccagctctgaagctggtaggacagatacttgtcaaaaatgacctggatgaaccagccacctacagctaggtaactggacatgtccatgcttctcttttcttgaactttgttatctccggcaaggactaagaatcccttgaatattttccaaactagctaagtccatcttcaattctaatgggaatcccctggacacctaagccaagtcttcggccaagtatttgcaaagacttcttcaacttgaatgttggaggttctggacattttgaaagggacacattttgaggacacattttgagctctgaattacaaggaacatttccgaaccttactatcttccttttagatatgttgaacatctgtttcgacgtgaactttccaagattcccaaaggtgtaaaatcgcacgctgaattttacaaaggtgtaaaatcgcacgctgactcctgagacgttccaagcgtcccgaaagtgtataatcgcacgctgaattttacatttttggtgtcttgatttcttgatgaatttcggtctaatatattcagagagatttacaagtagggcaatttgatggatatactgccaacgttgctttcatatagtgaagaaaagacaaggttatatagaaatttcttgtaaactatatatggtttatagtagagaagtgtgtttccgaaaacgagggaatagctaagtctattgacggaatcgaaaggcaaaaacagtcgtcgtccattcgtaatcgttggctgacgaatgaactcattgcattgtttaatagcttggcttcggtgcaactacatgcgtcagttgattttttttttccttctagcatcaatgcctgtattgtgatggaatcgattctaagcacagcacttctaacatcagtgaaatgcagcactagactagctaggctaggctaacgccgtaggatgataatgtggatttgggtttggtctgaatctggataggctgttcgacgcagctcaatatcgtaatggatggatgggagaggaatgcatcgtatggtagttgaatccatctttgaagcataaaaacacaagaatgaggtggaactggcttcaaggaatctttgcttctccctctattccaaactataataacttctagagttcaaactttataccaaatatagcaacacaatacttgtaaaaggtgattttaaccattaaattacccataat

SEQ ID NO: 24502 - DNA, 4617 bp, Oryza sativa
tgttgccagaccagatgatcaaaaacatgattgtgccactcaagcactcaaattagatcagcaacattcattggcatttcatcaatctgtgtgctgtagtactgctcaatatctctcaggatacggatgtcttcctttttgacaaaattgatggccacaccctacaatatgaaatgattatttagtcattagaatctgcccaatcaaactgttacctatatagtatgcagtcagctagctcgtgataataatcatttcttatggctggatgcatggagatgtattgaaatcatctttcctaaacttccaaaaaaaattggaattcagagagtaaatattgtttaatcatttctagaatctaaagataatgtgatgaactgttgggtgtttggttggtagccacacttagccacatctttggcaaggaggtttaccaacttagcctagtgtttggcttgccacaaaaacatatccattaacccgcatgtcgtatacagaaactttaacaagttttacctaaatcatggccagcaatttgttaaccacacattgtgtttgtgtcaacagtgtgaagtcagaattcctgtgttctaatttgtcatatactgacaacaaaaaaatgtcaaagcatttgatggattattattgatgatcattatcggtgaatgtgtgattgtgttgagcaaaaccatggtacatatgtattagtacaaatgtatcagtagaaagtgtagcatgcgtccaagcatttgatcccatttgattgagttgtgtaggtgtagcattaccttgcgaccaaaacgtccagagcgaccaatgcgatggatgtaaagttcacgattatttggaagatcatagtttatgacaagagagacctgaaaatgaaaataataatcaatactccacgcgcagtaaaatcaatagtcttcaaacaaaaatcacaacaatcttgcctgctgaacatccaggcctcgagcccacacatctgtcgtaattagaacacgggttgcaccagacctgaattcacccataatggcatccctttccttttgaggcatgtcaccatgcatagctgataccgtgaagttattgctgcgcattctttctgtaagccaatcaacctgaccaaaggaaaccaaggatataaaaaaaaaaacatcaataacaacaagtgggcatggttggaacacagtgcaattcaaaatagttaaaaaaaatagcatgattgttaagtcgtaaagttgagtcgaggtacccctggaccgacttgtcaacttggtcgaccagtccacaacttggtcatgcaaaaacagggtgcaattactaccattatactgtactaagcaacgtatatagtataaactatggagtatggagtagcaagtaataagacaaagtcaacaagaaataataaaactaaattactaaatataataagccaattagcatggtgaattgctgatttgctacgactcatcacgaataatctatgaccgcctttacgactaatctacaactaacaacaactaatcgcacaacttgctatttggtggagccatggttctctagtctagtcgactagcttgaccaactttacgacaaatctacggctaatcacgactagtcgagcgacttgataacagtgaaacatagcaaactaaaagtatcaactcgtgcaggattgtacaaacaagtaaagtttcaagagacatgctgtaatagcaactgcccagatggcaaaaaacaaaaggtgtttgaaagaactacaaaggagctatgaccataagatagcacaacaatttggtgtagacaaacaacactgaaaggatcaaaaaaaaaaaaagagcaccatatattacctttctcttcgtgttgcagaaaatgacagcttgggtgattgtcagtgtatcataaagatcacaaagagtatcaaacttccattcttctttctcaacagcaacaaagaattgtttgatgccctataaacatgatatgaaaaaatgaacatattaaaaccaacaaagtaaaatacataatgaagatcatcaagtttgtttgataagcaaaacaagtaatgatgttttacctctagggtcaattcatcacgctttacaaggatccggactgggtcagtcatgaacttgctggtcatttccaagatctcatgtggcagagttgcggagatcaagcaaacctgtaaaaatgaaaaagatgtgctggtagattagtattgggatatgactacccaggatatgccatcagttattgacatcaagttcaagcactatgccatcagaaaacaagtcatgcattacagaatccaaacagatacaaggcagcttagtctgttcgtatgatgacacgttacaagaaaccatcaaaacatggacagaatagtgtaacacaaactgcaatagagatggaaaatgctctccctatcccaaaatatgaggacttataagttaggcatgagtattaaggagaagtctaaaataaaatgagggatggttgtgattggtttagacagggaagtaggtcaagatattaaatgctccctctgtcccaaaataaggacttttagagtcaggcgcgggtattatggagaagtctaaaataaaatgaaggatggttggaaggatggttgtgataggttgagacagggaagtaggtgaagaaattaagtggaagatgattgtgattggttgagacaaggtagtaggaaaggtagctatattttgggacaattttaatgctaaaggtagctatattttgggacgagggagtagatgttagatgttatagactagtgaggagctaaatttaaaagaatcaattcactgaggggtgaacattgaaacacaagacaaactatcagtctagtacagttttaatctgtgattgacctggagctctgggggtagatatctgtagacatcatatatctgatccttaaagcctctgcccaacatctcatcggcttcatcctgtaattgaagaatgttattctccaaccatttgatcaaaccaaaaaaaggttccataaaacaacatgagaaataaactaaccagaattaggagcttaatggctcttgtacgcaaggtccttctcttgatcatatcacagactctgccaggtgttcctgacacaacatgcactccatgctcaagctttctaatatcctcaccaatacttttgccaccaatacaagcatgcacttggatattgatgtaatcaccaatggccagcataactctttctgtttgtgcagcaagttctctagttggtgagagtatcaaggcctgaaccctttaaaatgaagaaacaatattaactaccaacagacataacgattaatggaacatagaaaatgacagggaataatcattaataagtagaacaaggcatagaaaaattcatataattaacatggatgccatcactacattatacaatacctagtttctttttctttcaaaaaatataaattcctagccctaattattagccgacgaaagatcaggaaagaaaatattatagcaatagcaatatataaggtaaaaaacagataaaaacatgagccttgacatagaaagtcagaatacaaattgcggtgccctgaatcaaatagctcggaggccaagtcacaaccatagcaaatctacacaaacgtcgagagttgcagtaaggaataaaaatgaatcctatccagacatttatttaggtcctaattactgcactgtacctaacagctaatctgaagtaaaataaatcgcgcattcggaaaagggcgcaaacaagtaaaatgtctggcagctagtagtgaaaaagatgggggtagtaagagtaagaggaggcgtactctcggacggcggtgtcgacgatctggcagacggagagcgagatcatggaggtcttgccggttccggactgggcctgggcgatgacgtcgcggccgctgatgatggggaggacggcgcgctgctggatggcggagggcttctcgaagccgtaggcgtagatgccgcggaggaggtcctcgcggatccccatctggtcgaagctgctgatgacctcgaccccgggggaggtctcgaaggtgaggttctcgtcgtccatggcgccggggccgcgccggacgtggtggccgccgccattgggggagacgaagcgaaaccctagaaaggggaaggagatgggggtggtcgtcgtgggtggggagacttcctgcctgtggatgctaccgctgtcagtatgttttaatccgccgttccgttggataggtcggtttggtcccatttctgagttgggctgcgccaccccaatggcccatgccttacttggtgtcatctcgactgggccttgcctacggttacaattcagccctgctcggcccactaacgtaaccttcttggaataagttcacttcaggtccctcagtttgacgtcgagttcgaataatatcctcaaaccacaataccaagtgcctgttcactttgatgaaaaaaaaaaccttaccaaattttggcaacttcttatataattaccaaaatttggtagcaaactaaatgtagccactttttttaaccaaaatttggtaaggttgaaaatggcatcaa

SEQ ID NO: 24503 - DNA, 9621 bp, Oryza sativa
cgacccgcatgtcagtcgaagcatgaataacctgttgagatggttcactttcggcggcagcatgcttaggacgtcaagcctcgcgagcgctgggagcgcggcggcgtcgaacgggccaaaaaccttgagccatgctgcatgatccgacctcccgcacatgagtctcgccggcctccccacctcctccaccccagtgtcagcgtcgaggatgccgcataacatgatgtcgtgcactcgtgtgcccgtacattgacacactaggatttggcgacagagatgaaccgaagctcgtccggtatcttcaccccacaggcgtggcaatgcacatatggcttgagaaggaggacggagagggacctcctgtcctaccgctcgtcgaggtcaagctctgcgtggatcttgccacctcgagggccacggtggctaggccaccaatggagattgggggcagggatggtacagtggagattggggacaggggcagcgaggtggaggttgggatgtaggcggcgtggcacggtgagttggaggttgggggcaccagcatagttgtcaaggccaaatctagtctggcgtggtcgtcgccgcgttgcggccctccctcccctcatcttcactgctttactatgagcctgctgaggatgttagcggggtgaactcgtggagaccaagaatgaaaccagcgagctcgcagaggacaccggtgaatccggcaagcgtcagagaagggaggagagggatcaagaacattgaacgttgcgccgccgccgctagctccaaccttgcagcgttgcctccacactgccgccgctgatgaagatgccacatcgttgctcctgccctcctctcgcccgacgaccgcctccatgatgtcctctttttggttttgtctttttttttttggctaagagaaaggaaggagagatatgacatgtgagcctaatatcatcattattgttattaagctgactggatcgtcacgtaggagcaaaacctctccagattgagttaggagataattcgaccggtttaaaaagtttgagatgtaaaatgtatggttctgtattttagtaggtaattcgtactgtcgtaattttctgggggtaatttggacttttccgaccacaattggtagcagcaggatcgatcgagtccccagtggctatgatcgcaactttgtgcttgactgcggtgaaggcaagtctggtttgtgcccttcggtggaagtaaactgatggaccgtacccttccagcttgagggtccttcacatttgggcagatgctcctggtcctggagtgcagttctgttctatacatggcatttgtctacgggaagcactctgcactccctctgtcttcccaaacgctgtgaaccagcctcggtggtcgttcaccctggtgacaaacgcttctagtcatatgatgctgcttgagttctcaacaaaacgatccagttcttgtagatatacgttcttgtctttcggcctttttttttttgcgaggttgatgcaatggtagttatatactgatttcatagggttagataacagtgtagcaaagttagggagcttacgacctacgtacacaagatttccctgtgtctgctcaatgtacataaaaaaaataaaaaaacaaatgcattgtaatttgatgaagtggatggtaagtgcataatgcattaggatttgctaaaattaaaggtattctagccttttaaactttggattgatttgtatatcatgagataaaaatgaagtcttttgatacggaggtagtgctaagcttacttaattttagaattaatttaggtttcttaattgttttctagcttttaaccttgaattttgatccgctaaaaagagaagtagaaaagtgttactccctccatcctaaaatataaggattttaagttggatgtaacatattctaggactatcaatccggataatttttttttcatattcatagtcctagaatatatcaaatcaattccatctaaaatcaggacggagagagtactctaaaattgtcttttcaagctttgttcacattcataaaaaataccttccaatcgagaaaatggacatttggctactttcaaaacatggtttcgctaaaatgtcatctcgaaaacgcgtttcgttaaaataccaatatggagcgcgtgctcaccgccactttgccatcttggccgttttgtgtattttcgaaatcatcttcgctcctccatcgagtgacgagacaaaattgtccttcatgtcctccgctaccgcctcgtaccacgagcagctcactgtcttcctcctcgtcctcctccatggatggcgtccggagcggtgctatctgggagagcccagacggcgagtcctctgacatcttcccctccctcgacctcaccacctccaccgactaccttgccgcggttgacgacggcatcccggaggtcgctgactacctcgccgcagtcgacgacgacggctagggtttcgaggcggccccatggcctcgcaggcctccgcaaccacgaggcctccttgacgacctcgcctccgcctccgcctcatcggtgctgtctggcggcaacgggcaggggcagtcgccggtggttccatcgctccgtccacccgcgcacccgcaggtgcgcctcgcttcgccatacccccagatgccctcgctggcagtggcgatgggctcatccggcggcgctgccagggctgccgccacggaaggggaaggatggaagggcaatttcgtcaaatcacccaccgaagaagcaaaaatgatttcgaaaatgcacaaaacggccaaaatggcaaagtggcggtgagcatgtgtttcatattggcattttaacgaaacacatttttggatgatattctaacgaaaccgtatttttttgaacatggccaaatgtccattttctcgcttccaatcaggccctctgcactaccagtctgttagcatcgtttatgtccatgttggaaaaagcgcttagaaagcgactctatggagaagcaagcagacttatttttctcttagggggtgtttggatccggaggtgtaaagttttaacgtgtcacatcggatattatatagggtgtcacatggggtgttcgggcactaataaaaaataattacagaatctaccaataaaccacgagacgaatttattaagcctaattaatccatcattagcaaatatttattgtagcaccacattatcaaatcatggagcaattaggtttaaaagatttgtatagcaaattagtcgcaatctgtgcaattagttgttttagcctatattttatactttatgcaggtgttcaaacgttcgatgtggtagggtgtaaagtttttgtatgggatctaaacaggcctttagtaacacagttgatataaaatatttattaaatgtttttcatagttgcgttgtctcatggttgctaatgactagcaggtagtgtttcacaactatattttgtctaactcttaattacatggcccacatgttataaactctattttttttgcctaactttattttagtttagtttatcattttgtttaccacaaaagtatgacaagactaagcttaaccaccttagtaaaaaatatgtggtaccatcagttatcaaccaaacatgcccaagttcaacgctgtccttttcaccttgttattttagttgccatgcctaatcttgtttcttgatttatttttttttcagaagactagtttgcagatctaaaaacggaaattaggtttgttctttgccttgtacgcgctgccaattaacatagcctatcaaaattttgcatactgtattgtctgcatcactgaaatttgcaattttgtgctatacactagctaggagttagatagtattaattctatcagtagtcttttcttaggaccaaataatccacttcaataattaaagtagtaattctgccagatggcacacatgtcattacacagttttgaccctgaacaaaaatcaaagaaagaagacgaaagatgagagcaggacgaacatgcattaggtaccctgacattctgttcttctccagatctgatctgatatgatgcaaatggcctgcacgaaaatgcgtattattgaggaagagaatggccctcatcttgccccagatgctggtacctgaccctggcggcgccggtggcctccgccacctccgccgacgagcaaatgctgggcaagaataagtaggcccgccgcccgcgccctccttcaacggcggccggaccttgctcctggtcctggggctccccacgctgccggtggcggcggcggcttgcttgcttgctgctgctgctcatgttcttgccgtggtcgtggctgacgacggcgacctccatccttcggaagtactcgacctcgcggcacaccagcgagccgatggtgccctgcgcgccgacctccaccggcgccgacgccgccatgcccggagggtagtggtactatgatgtcatcagatgggaagagagatctgagtggatgaggattgtacagggtttagaaaacaggacttcccatacgagaatcctgattcgcgcacccctggcccatacagcccacgcggcgcgcgagattttttcttcgctaaccatcgccgttttcttttttatcgctttccttttttttctgttttttccagattactttttaatcttccagcagcaagtgttttcaatttttttttgaaagtttttaaatcttgacttgaaagtttttaaatcttaatttaaaaatttttaaatatcgagttgaaagttttcaaatttcgagttgaaagttttcaaatccgagttgaaagtttcaaatcttgagttgaaagttttcaaatctgggttgaaagttttcaaagttgagttgaaagtttttcaaatttgacttaaaaaatttaaattttgagttgaaagttttcaaatctgggtttaaaattttgaaactgtgacttcatatgtagatttctttttaatttgttagttaaaaaaatctcacataaaaaataaaatcttatctactactacctacgccccaaaatatagcaattattagctatgaatctagacacctgtgtgtccagatttatagctacaaatgcttatattttgggacggagtaacatcattatcataaactgttattatctaatatactagtagattagtatttttttagagaagggtattttttacccggcctctacatccaactaatatactagtagattagtatttttttagagaatggtattttttttcccggcctctacatctaaccggatatatgcggtcattaaaattaggaacttagccccgcaaacaacccaatctaaaattcgctcatatgaaaatttgaactcaggaccttggggtactactcaggtgactgcaaccaccaggctacatgccctatcgtagtagtagattagtagaactacttaggccgaaaaaacgagcgacggcggcgcgtacgcgtcaggtagccccttcccctaaccgggcaaaaagaaacggttttgctaaaaaccgtcccaagaaaattagggaggaggacaatttcgaattttggaccgccggatatgcatcaatattcatgattaggagaggaagaaaatgtcacaagttttctctccatgcggacagcagtgttagaattcacgttgtcaacaatcaaacaagcacacacgaacacacggacacgaaagtgaagggcaatcaactttattgatgtttctctctctgttacaagtattactttgccctcaacctcactattgtatttatacccacaataggatgtcctatatggatacatacatatatatttggtataagcccacttcattaataaggaaacagaagaatagaaggaggaggtaccgtgatcctcatgatcacggtcctataaatccgactccttcgggagatcagtttcataacactcccccttgggtgaataccgtgctatacatatgcctcatcaaaactccttccaaaaacccagtgggagaaaaatgaataggagaaagagtacatagtacacgctacttatattgcactgttgcctcattaaaaacctaaatgtgagaaacttcaaacaaaactcactaaagggaaaaagagtacaaccataagctaatctactggataactctatcattcttcaaggataactctatcattcttcaagaatgatgtactgatctgcatgatcaatatcaacggaacacagtcagggaagtgctcccccgatttgtgcacatctctcatcctcctcataccgatgccatgcacaagcttctcaaaaacactaattggcaaagacttagtaaataaatctgtgagattttcactagtcttggtgagagtcaccttaatttcttctttcttttgcaattcatgcatatagaagaatttaggcgatatatgttttgtgagactcgtcttcacataacccgtttgtatttgtgcaacacaagctgaattatcttcaaaaataatggttggagttggtgtgatattcagcccacatgtattctgtacatgttgtatcaccctcctcaaccacatgcattccttgctcgcttcaaataatgctataatctccaagtgatttgttgatgtcgcgaccatcgtctgcttcgtcgacttccatgagatggctgtaccaccacagagaaacacatacccagtctgtgacaatgctttatgggggtctgacaaatatccagcatcagcatatcccaccatggtcaaatcttgattttttctaaagaataaaccgagatcttgtgtgccacgtaaataacggaagatttgcttaacgccattcaaatgccgtttggtaggagccaaactgaaccttgcaagtaggttaacagcaaatgcaatatcaggcctggtaccattcgcgagatacattaaagctccaatagcgcttaaatatggacattcaggtcccaataattcctcgttattttcctatggtctaaatgggtcactctctactgctagagatcttactaccatgggggttctcgtcggatataaatccttcatattaaatttctccattatcttctggatatatgcagactggtgtaacaataccccttcatgagtgtgctcaagctgcagacctaagcaatatttagtcttacctaattctttcatctcgaactccgtctttaggtaagaactagcttccttaatcacctgtgtggtcccgatgatattcagatcatccacatatacagaaataatacaaaatccatgttctgatttttttgataaacacacagggacagtcatcattcttgatgaatccttttccttctaggaattcactgagccggttgtaccacatcctaccggattgttttaacccatacaatgatctttgcaatttaacactgtatatgttgtgtttttttcttcaggaacttgaatcccatcaggaactttcatatagatttcaaaatccaatgacccatataaatatgcggtcactacatccatcaactgtatttctaagttcaaattgactgccatagatattaagaaccggaatgtaattccatccattacaggtgaattggtttcatcgaaatcgatgccaggtctctgcgtaaacccttatgctactaatcttgctttataccgaaccacctggttgttctcatcccgttttcggacgaacacccatttatatcctacagaggatatccctacgggggtacgatcaataggaccgaataattttcttttattgagcgagattaactctgcctttattgcttctttccatttgacccagtctgaacgcttttttgcattctgccatggactttggttctggatccagatcaatgatcttagcgatcttttcggcaaagtatatgtcgacaatagtagtctctctattgtatgtttcacctgtatccacataactggtggatatttcctctattctttcacattcctgatcttcattgtttcccgcaatgtttaagtcaggaatttccggtctcctagtgctagtagtaattgcgcgcgcattctcactgggttcattgccatccgggcatgtcactgcaggtggctcatctacctggtgagctccttcactattctctggtgctgtggtattctgtccaatctgttgtttcgtaggacgtctcctagaaactttagtttggttgtgtgcaaccggtggtctccccttcttcctagaagttggggtagatgtagaaattaatttgaaaaccagttcctctgcgtcaggaggtatttctactctttccggtgcattcacagcaggtatatgagatttcatgatcccctttaggttagtgaaggcttctggcagattatttgtaattctttgcgaatcaattatggtctaaacttcctggtcagattccttagtacgtggatctaaatgtaggagatttttagtttcccactcaatttcgcggcattcgaccttctgtaggtactttcctccccctaatgccgggaaatgatcttcattaaatatacaatcagcgtatcgacccatatgtaggtctcctgtcaatggttctaaaaatttaatgatagacggagattcaaatcttacatagattcccaattttctatgaggacccattgacgtacgcttaggtggcggtatagggacgtatacagcacatccaaatttgcgtagatgggaaatatttggtgcatatccacgtgtaagctacataggggatacaacattgtatgcagtaggtctgatttgaagtaacgccgctgcatgcaaaacagtgtgtccccaacatgtagttggtaggttgctatgcagtagcaatggcctagcgataagcttaatcctcttaattaatgattcggcgagaccattctgagtgtggacgtgtggtacagaatgttccactttaattcccaaagccatgcaatattcattaaataccttagaggtaaactccccggcattgtccattctaatggattgtatccggttacccgggaaactggctctcaactggattatttgggaaataagccgcgcaaaagcgtggtttctagtagaaagtaagcaaaaagtgctccatcgagttgatgcatcaattaataccataaaataccggaatgatccggacatgggattaattggtccacatatgtctccctgtatttgttgcaagaatactggtgattctgcgttcacctttagattagagggtctaacgattaatttccatgttgcacaatcagtgcaaacaaaatcttcttggtttgggaaatcgttaggtcgtaaattatagccatttgaagttgagatgattcttctcatcatccctagacctggatgtcctaacctatcatgccatattctgtatgactcgggatttttaaatattgttttcagtgcaacattttcgggttttatatgagtgtagtacaggccagatttcaaggaagggagtttttcaacaatagtcttacgatttccgtctaatttcgttatgagaagaaattcgagtttattctcatctttggtttctacatgataaccattagcacggatatcttta

SEQ ID NO: 24504 - DNA, 888 bp, Oryza sativa
ctatttaaaagatccatacctttagcctttaagcctttagcagttgcagttcaatatgaggcacctttagcctttagcatccatagttcaaagatcctgcacaaaggggtgctgtcatattcccatttatcattatttttcccataaattcataactatacatcgcattaatacggtgataggtggcgatgtcatcatttgatcctgatctatctcttgaggttttggatcatccaatactggatttcttttactatatggtaagtaccatcaaaagctcattgtccctaattctgccccttgtatattctaatacattatttcctgctacagttaacggagatactgccctctgctcttgtcctattcatcctccgtaagcttccaccgaaacgagtatcagcacagtaccaccctattcgttagaagggctggttttgtcgtcacaagcattccaaaaacttgtttcagagcgagaattgtgatatttgagctgagcttcaagtagttttgatgggtcatctatgtcatgcttctgatgtggaagaggtttttttgtcctctcctgacccatttttctgggctttatatttcttgagaccagaatattatcagatgatttatactttgttctgcctaacaaaacttaccgttgggagttaattacatcagtaacttataaatttgaataggtgatgttgataaaatcaggttgtgcgtgatctttcacaaacggatgagcattgttgtgatttaagtcggctcctacttaaatataggtcatatctccacccctatagaacgccaataaccgatgtcttgttgatccgtgtgctgaaagcagaaggtggttgtaatgcgttgtaattggtgggacgtgatcagatg

SEQ ID NO: 24505 - DNA, 652 bp, Oryza sativa
  unsure (1)..(652): unsure at all n locations
aattcctgcagcccaccgagagggtactggacgggtggtaaaatgggccatcgagctggctgagttcgatctgcacttcgaaccgcggcatgcgatcaagagtcaaatcctggctgacttcatcgcggaatggaccccggtggatgaacctgttccatccgatgtccccttctcccctggagaataagaggatccaaacgccgacattcgcggcgggcactggattatgcatttcgacgggctcccttcaacccttttcccanagggntnggcnaagggnttgaccncngagaaaaggtcacgttgacctcgccaaacgaggatgtccttaaatacgttgttcgtctcgacttccaggccacgaacaacatggcagaatatgaagggctcctcgcgggattgaggcggcagccagaatgggcatccgccatctcctggtcttaggtgactctcanttggtcgtaaatcaagtacccaaagaatatcagtgcaccgaccagcaaatggaagcatacgtccgcgaggtacggcgcatggaacgcaacttcgacggacttgagctccggcacgtgccccaacgcgacaacacggttgctgacgagttgtcgcgtgttgcgtccgcacgagccccactccccccggggactttcga

SEQ ID NO: 24506 - DNA, 2541 bp, Oryza sativa
gctgatctcggcgcttcttacagaagtgaaaggtgaattggcttccccgggcagatgcaattttgttaggaacgccatggagactcacgatcctaccgaagtagagctcggatagtttgttccctccataggtggtcttcacaagaataaaccgagctaccttggttagtcggtccacaactacccatatagaatcatatccgtcttgggtttttggaagtccggtgatgaaatccatcccaatttcatcccatttacattctggtacttggagaggttggagaagtccggccggtcgttggtgctctgccttgacacgctggcacacatcattcgtaaagcaacattctgaacccctatagaaggcatcggtgtaaaaacaagaggaacttccaatagccgaatccgaatcaaatccttccacatcatctgtgtcggctaaggaatcctctcccaagccatcagcaccgaagaacgaagaatttcaatcttcgggatgcgctctagactttagggatggtcttcataacgatcatgagaacaccttgacggacatccctcctggtaatgctcccatagaggaagtaatggcgattctgcttcatgagtcccctgaatcccttttagaacaggatgtttatcatttcattcaaaaagaagattccggcgagacccttgaagtgttatccatagaaccaccatcgcaacctcatctcgagcctaaaccttgtccctctggccctcgagatgttgttcttgatagttgtcaggaaacaacctcgatcatgcacgacacatcctttggcaaggagaaccttcaggccatggacaagcttgagacatcagctctggtggacaagagaaatcactccacaaatgagcatgaaaccttctctttcaaaatccctcatgattcatgctcatataaggaaaccccagactcctgttcgattagtactaccccctcgtgcaaggaccacaaccactttacaatttttttttccacatgttaaaaaaggggtctggaacctttatttatcataaatctgcagatctcgtatatgttttcacactaatcttacatgatgatgtcccaaaggtaagcttaagtgtcacgcccggaatttctatccaaaattccaaacgcttacatgtgtgtgaaccctcgtccaggaatcagccgaggcacacaataacaaattgataatagagtacaattattactctaattaataagcgtataaaatgtcattacagaggtagatagttcctctcaatcaataaagatctaagcagcggaaaaataaattaaacggcgtagacggcttcactccacaggcagcttgaccaaggctacacctactcctccacaccatcagcctcattgaagaactcttcctctgatgaatgattgcaaggtgagtatatgacatactcagcaagccacgcagcaaatatgcaagtgcacaggataacaaaggatggcataatagggttccatttgcaaaagcagcatttagcaaacatttcagaatttaataaaacagttaagtaataattaaacaatattaatccaacactatacaacataccctgttgtataggcccaaccattctgtacaaccataccggctgcacagttctatctccaaaccaggaatataccattccaaaccaggagctaatcaaattattaccaattatagcatcattcactaaggtgagaagtgtgaaactaatcacgaaagacattgttagacccgcccataaccgcgggcatggctattcgaatagttttactctggccagaggtgtaccactgtacccacaagacacaaccccacattatgtcaccatgtgcctcaataccaccacggtatctcggaaaggagttgtgacaatacccctcgcataacacaatccactgcagcgcaccttcctggatcataatcacccccttataaacaaggcatggactccccagcgacccccgtgggcttatctccgccacatttcagtctggcgccccgcaatgaaccatgctatacaaaagataaagccgttgcccatgctggcttgtggttggcatggttaatgtttcacaaccgaaacttgtgaaccggtccttaattgtcatgagcacgaccatcaaaaccatgtgctcacaacccaccattaccaggttttagttggcacattaattaattaactaatcacgattgaccatcgtgaactatcattaagccatcattaaataatagtgagtcataagttatcccgaatgtgtactaatgtttctaagcaagctaagcaattatatctaatatctagttgaactaatataaataaagctcaactagttaaattgtaataacccaaggtatcaaggaatgtagtaatcaagtacaaaagggccataacaaagaatatgttaattccacccaatgacattcgaaaataaatgcaatagttgaatagaaacaatagctttaaataggatcaacatgctcaaagggttgtttgggatctgtgtgacttgcc

SEQ ID NO: 24507 - DNA, 3005 bp, Oryza sativa
ttcccctgtatcaattcggccggagaaggaaagggacggccggattggaaagcggcggcggcggcgcgaaactagggtttcggcccgaggaagacgacgggcctgacaggtgggacccacctgtcagcgacagcgagggcgcgcgcgcgcggcagctgcggactgggccggactgggccgaggagagagagagcggttttgggccgactttcggcccaaagccaaaagagactttttaaaacctttttcaatttaaattatttcttaaatgcaattccatttattaaaaatacttccttagctcaaataaatcccagaaaaaatctaggaattatagaattaagcaaagtatttaatgaaattttatctggccccattttatattggaatttattaattaaaattagatcttttcttcaagacttttaaaattatttctaaaaattccaattaaacaacaatttataaattttgaattttcagggtgtgacaaacctaccccccttaaacagaatctcgtcctcgagattcggaagaactggcgaacagatgcggatgagctgacttcaattcatcttctcgttcccaagttgattcttcttccgagtgattactccactggactttgcaaaaacggataactcgattcctggttcttctctcatttgtttccaagatacggattggtttctcaacataggtcaaatcctcttggacttctatctgctcaatattagcttcttcggtaggtacccttaaacactttttcaattgtgacacatggaacacattatagactcctgccaaagattgaggtaattctaactgataagcaacctctcctcttctactgacaatcttataaggtcccacaaaacgcggtgccaattttcctttggtgtgaaaacgatgaactcctcgaagaggcgtgacacgaagatacacataatctccttcttcaaaactcaaatctctacggcgattgtcggcataactcttatgacgagactgagccacacgcaatctttcttgaatgatctttaccttttcttctgcttctcttaagatatccgtcccgaaaacctgacgttctcccgtttgatcccacaaaagcggagtgcgacacttccgaccatacagtgcttcgtaaggagccatctgaagactagcttgataactgttgttatacgagaattctgcataaggtagattcttatcccaacttccaccgaaatctaaagcacaagctctcaacatgtcttccaaaatctgattcaccctttcggtttgtccgtctgtctgtggatgataagcagtactaaagttcagcttagaacccatttcttcctgaagtttcttccagaaatttgaagtaaactgactgcctcgatcagacactattttcttagggacaccatgcaaacacacaatccttgccatatataattctgccaaccgacttccggaataagttgtctttaccgggatgaaatgtgccactttggtaagtctgtcgactattacccaaatagagtcatggcctgatgacgttctgggtaaaccagtgataaaatccataccgatttcttcccatttccattcaggaatcttcaaaggctgcaacaaaccggcaggtttctgatgttctgccttgactcgctggcaaatatcacataccgctacgtattctgcgatttcacgcttcatacttgcccaccaaaatctttccttgagatcctggtacatcttagtactaccagggtgaatggagtataaagtatcatgagcttctttcagaattgcatcctttaaatctttgttgtcagggacacaaattctctcgcccaaccatacagttccttgctcatcctccaagaaaccgatagcttttcctcttctcatattcttcttgatctcttgaatatcaggatcactaatttgagcttctctaacttgatcaattagtgtgggcttcgcttctaaggctgcaacaaaacctctactgacaattcccaaatttaatctttcaaattccttgcataattccaatggcagctgtcatccttcggtagcattgcaataacctttcctgctaagagcgtctgctacaacattagcctttcccgggtgataatgaattcccatgtcataatccttaattaattccaactatctcctttgtctcatgttcagatccggctgagtaaagatatactttaaactcttgtgatcggtatacacctctgtacgagtaccgaaaagataatgatgccaaattttcaacgcatgaactactgcggccaattcaagatcatgagtagggtagttcttttcatgcggacgtaactgacgagatgcataggcaaccaccttcccatcttgcatcagaacacaacctaacccaagtttagatgcatcgcaatacacttggaaacccttctttggatcaggcaaaatcaaaataggagctgatattaaacgacttttcaactcttgaaaactctgctcacattcttccgaccacttgtacttcacatatttctgaagcaggcgtgtcatgggcttagcaatcttggaaaaattctctataaaccttcgataatatcttgcgaggcctagaaaactgtgaatctctgaaactgtctttggttgcttccaattggttacggattccacgttagtaggatcgacggcaactcctccggctgagatgacgtgaccaaggaatttcacttcagacaaccaaaattcacacttgctaaacttagcatacagttgatgctctcgtagcttctccaatgcaaggcgaagatgttcttcatgctcttctttggttcgggagtagataagaatgtcatcaataaagaccaccacgaacttgtctaggtattccataaatactttattcatcaagttcatgaagaaagcaggagcattggtaagtccaaaagacatgacgtacattcgaacaacccatacctagtggtaaaagcggttttaggtat

SEQ ID NO: 24508 - DNA, 2845 bp, Oryza sativa
gaccatcattgctgatgagagttacttttctgttggcacagtctatcacacctttatgtttggctaaccagtccatccctagaatgacgtcaaggtctttagattctaacaagataagattggctagaaatggtaccccttgaatttctattctgacagaggggctacgttgcagagagagtgcttgattacttggggtactaaccatcaaaggacgtctaagatcttctacttccatcccatgatttcccgcaaaactcatagataagaatgaatgtgtagcactagaatcgaaaagcacagttgcaggaactgagttaacagggaacgtacccaaaatcacatctggagcatcttgagcttctgcagcagcaacatgattgacacgggcctttgatgctggtacagcagagttattctgggcagggacaaccttcacgcgtcggggcttcggacacttgtcagcataatgtcctgggtctccatagttgaaacacaccacgggcttgctgccttgcttcctcttggcaggttgttgctgtgtcgaggcagcaacaggacgtgggacttgattacggatgttgttgccagcattgttgttgaagaactgacgctgcggacgaacaatggacgaagaacctccctgtggcacagactggggtcctaaagtaagacgcggcttctgattactcccctgttgtgccttgaagtgagcaatccggcgtttcttctgctccatgcgattgtacttgtcctcctgacgtatagccttatccactaatttctggaaatcaggataatctccaaccatgagtgggtaagaaagctcatcattaagtcctcccaaaaacttctcctggcgctcttcatcattgcgcagatcttccggagcataacgagcaagacgattgaactcgtgcagatactccgtaacagagcgagatccctgggtgagcgacctgaactccttcttcttgagagacaccactcccgatggtatatgcgtcttccggaaagcagcggtgaattcaagccaagtaataggttcagcagtaatcctattcaggcggaagtgatcccaccattcagaggcagggccaagcaactgatgtgatgcaaatgagaccttctcctgatcagtgcactgaagcaaatccatcttcttctctatggcatgcaaccaatcaccagcttcaacaggattagtggtactagagaaaataggcggcctcacacgaagaaattctgctaacttgttctggggaggtgcatggttatttccttggttttgctgattctgaagttgctgcatcatcatgttcattaactgagtctgttgagcaagaacttgagcaagtgttgggttctctccattgttgttgttattgttgctgttggggccattcccgttgctgcgagtgagcaccatctggcagggcacaagaagagaaaccgggggaaactacttaggatagagaattactttaacttttattgatcttaactgagtttcattattacaaactgaagactctcacaccactaaactcaccaacttcctaacactcaaaagcaaacaaacgcatgcacttacatcccaccactgatgtaaatcacatgcgagacacacacaagcaaacttaaagcaagcaaactaacacaacgatctaagacaacgacttaacaagtcactctagttcttccgagcatcggaggtcgattgtaggctcgttcggctcgtcttcatcatcttgagttgctacccactcaatcttggaatgggtgcgcttggattcttcttcttcatcatcacttatgatgatgaccggaggatctgctggggcaacttctttctccaccacacgaacttttggcgccaattgatagcgagggacaaatagagctctcttccttgcggtaagacgaatcctggccttctgcggtggtgcttctcccttcaacgcggctagttccttctccaaacgatccaccttgtcttctaacttgcaaatcttaccacgattccaatcttcacgatcttgagccgctaacacagtctctgcacggctttcatccatagcccacagcatctcaactaaatgccttgtggtagcatcattctcaattccttcagtctcaaggtagctgccacggtcacttccctgtggttgacgaggatggtagcgatactcagtgtcagccaaccgatcactgtagcgatcacggagctctcctatggcgatccttgccacttcctgacatgcatggatgtagtttcttcctccagcttcgaacatcactgaggggacatcttcactattactattcaaggtgactttgactcggcacttctcttcatgacgatcatgaggaatctgagcataaaaaggggcagtcccaaatcctatgacaaaggacatcgtacgcaactcctggacaaaaccctcaacaccaaacaggtactcaggcttgtagcgcggcatctaaagacaagtgaaaggagggagttaagacatctatccaattaacagcacaagtttttggattaatttgaataaagtttagaaaaatcagagtaaaaaggtaagtaaataaagtaaaccaaacttgcaagataagttaaaacagttggaaacaaggtcacaaattttgtacttttgaataacaggtttcaaaagaaataaaagaaagttataaaatcaacatgctaactttattttattgcagcaagattaaataaaacaatattgtaaaacttttgctgataaataagccattagtacagtaatagatgtacggtactaataacactggaataaattttgaatgagaaccattaaaaggg

SEQ ID NO: 24509 - DNA, 28452 bp, Oryza sativa
  unsure (1)..(28452): unsure at all n locations
ttaaatgaagaaaatcgcaaatattcatttaaagagcatagaaacttcaaatggccataacttgaccatttgaactcggaattggaccgttcaagtctctaatttttccttaagaagtcaagaacccatttttgtgctttgtttctgcttgttatatggagtttattagagtaaaagccttttcttttccgttggtcgtgtagacgctgcagcttcgaaagatccgctcttcgtggaagttgaagccgacgtttgggaaagcgagcaaggcaagtcacatcatctttgaacatattgaatcccagtttgtaaaattatgttgatttaaattattgcattatcgctttatttaaattcccgcgttatcactgttttatctagccatgcctaattacctttgttatgaccttattattattgttattgttagtatttccttgttcaccctagatcaaacaaaaccccaactagtggacactctactcatggtaccactagcatgattttaggtagatgcttcgctgtttaattaggtaacattaggtggttttacaactctagactttgggaatattcatatcacctggacactttggaactattggattatcgtggaattggcttcacacctccccctctattcaaaatccccaaaatggttttaggctgggctcggggtgcatggttttgatagtagcacctcggccatataaggaccggtcttcgggcctctgttgcaaagcactacggtactttccacatgtctagtgggtaaggcttagtttgtggctcagtctggttataaacaaaagtacacggatggaggtggatgaagtcgggggtcgatggacattctccagggcaaatgaaggctacacgagctgcggcccggtagtcgagatgtcatggcacagggccggtgtcctgctgctaggggctcagtcctgcctgcctgtcccgggtgttccggccgtaggtgggattgggtcggtactcttgtctatggctaggatgggttggaaactatgtcacgtcttccgtctgtataccgtggtggtatgtggcacgtggttacacgtgaggaagatgtgtcttgtgggtaaagatgtacacctctgatcagagtataatctattcgaatagccgcgccctcggttatgggcaagccgaccaatgtacccaagttagtgttttaattcttaaaacctgcttaacaactaaaatgtggaatggttggcctgggttggcttgggacgagctgggacccagggtcgggttgccagttcggtctgaaatcatcgtaggccttgggttaaggcaggttcgtgtgggttcacggccttgataaataatattgtatagtactagattcgtgtttgcaaaatagccctgagcaactaaatatctttaaatgctgtttactgcaaccctaacccctttatagtataactcctttgtactcccttgcatttattcagcacttgtgggtgtgtcttgttgagtacggtggttgtactcagtcttgctcaatttttcccaaacccagaagaggagttcctggaggatgaaggctttggtgtctagctcgtgcctgccgtcaagtgcctgtggtcgtcgccctagtcttccgctgtttctcgtgtgtctttgtgtgtgctgggccttcgctgcccatgtaataaattatctatttacgcttccgcttgttaaactctgaattgtatcaacttttggtgtaccttgcctcctgggacaaggattaatgcacgcacacaaggaacgcccgttgggtcagttccggtcgtgacataatgtttctaagcaggctaagcaattatatctaatatctagttgaaccaatataaataaagctcaactagtcaaattgtaataacccaaggtatgaaggaatgaagtaatcaagtacaaaagggccataacaaagaataggttaattccacccaatgacattcgaaaataaatgcaatagttgaatagaaacaatagctttaaataggatcaacatgctcaaagggttgtttgggatctgtgtgacttgccttgctggccttggaactcttcaaactcttcttctgcgaaaacggactctccggaaacgacggaatctaagcagaaaagaacaaaatcaccaaaacagcacataaaaaagcatgaacagtacatgtggatatttttaatgtgtagatctcaattttagaaaaatttagagacttgaaccaactaaatcggagctaagatgaattagttatgaatttttaaagattaaatcggattaaaacacttatatcggcttaaattgaattatgacgcaataatgaattatttttgaaaaggaaaagaaggtttattgcgtcagcgggctagggtttcggtggaccgggcgcacgggcggcggttcacacgaacggacggccgagatcaacttgatccaaaacggacggccgagatcgatcgggtccacggcggctcacggcggacgaccccgatgacgtcagcggtgacatcaccgacagcggcggcggctcggcggaggagacggctcgaacggcgcacgctcgtcggcgaacggcgatgctaggacgcaaacagagggcaccaagacggagaggacaacgcggcgaactcaccggtgacctaaacggcggcggaagaccaacggacggtgacggcgacgaggaggaagcggcgggaaccttcgggtcgacgacggcgatgctgctccggtgatctccggcgacagcgaagaggcggacgaggacggcgacgacttggcgagcacgacggtggtcttcccgagcgacggcgacggctgaaacgacggcggcgcacggctggagcggcgacggcgacggcaaagctagggcacacggcgctagagcgattccgacgacgtgaggcgaaggcgagggtggcgacgggtagaggagacaccgggggtccttttaaaggggctcggaggtgacggcaaaggcccacggcggccggcggcgaggaaggaaagatcgggaagaatgaatccgagacaaactcgaatccaacgctttccaaaacgatttagccaaagattccaaaggagaaaaggtagaggagatcccggagatcatttcccctctatcaattcggccggagaaggaaagggacggccggattggaaagcggcggcggcggcgcgaaactagggtttcggcccgaggaagacgacgggcctgacaggtgggacccacctgtcagcgacagcgagggcgcgcgcgcgcggcggctgcggactgggccggactgggccgaggagagagagagcggttttgggccgactttcggcccaaagccaaaagagactttttaaaacctttttcaatttaaattatttcttaaatgcaattccatttattaaaaatacttccttagctcaaataaatcccagaaaaaatctaggaattatagaattaagcaaagtatttaatgaaattttatctggccccattttatattggaatttattaattaaaattagatcttttcttcaagacttttaaaattatttctaaaaattccaattaaacaacaatttataaattttgaattttcagggtgtgacattaagaccataaacaaagcactgccgggagatacccggattatctttgtaagttttctttccaataaaagcaagaaactgtgtttaagatagtgtacacattcgggtattcttggtcgctaaccatttcacgttgagattaagagcgagggtcatacgatgcctaagaacacgggagccacatcaaccgtacaccatggtgatccttggtaatgcgatacgctttataagaggccccagtatcacatacttggtttttgacgtctcatgacacaaaagaccaagtgtgggggagggaggtctacgagcttgcatgaagaattccatcaaccaagaccatcttggtttacagttggtgttagtcttaccttgctgaaaaaaggaaaaaaaagagaaaaaaaaaggagagacaacaaaaaaatgaaaaaaaaagatgggagaagaggaagagagcaagagagctgacgggctacatttagatcaaagaatgcattatgtgtgagtctttaaaaaatggctatacaccttgctggtagcgatcatgatgcctggctacacccagcctctctcttgagctcatgtgttgccttggcttagccttcatccactcctagctgtgcacaactcctcactcttgcatcacctactcgcacacaagcaagaggagatgcactcttcttttctaggtgttttctgctccactccagttggtacttgcatatttgctcaaaaagagatgcatcctacgtctctacaacattgtaccaacggagagaatttaacttccaatctcttcacccagcgaaataaataaaataagatgtgtgggcgtgccagtgtactaagtacacaaaataaaatagaagaaggaaaatgcattttattataattcttgaagaattacaaaaatacaaaaatccttggtcaaatgcgctccacagctcattgacgaggtggatctgacttggcgactgtgttctcatggttcccggggtctcggaaaacacccggttaattactctcgcgggttagaccgcgagacacctcaaattaagctacgctggtcgtcgtcgtcggtcttcgcttcacattctcccatgcatgattgtgatggtggtgatggtgtcgatgtgtgtgggcgctagtagcggttcacggcctcgtcggtccgtgcgccggtgtaggtgacatcgacttcatatagactccacttgtccgtgccatttagcctcatcagtcttaaaaagcgtatgtagttggcataggttttttggttgtaagcactaggaggctggtacaactcttcttgaccgtcttggtgccatgtcaatagtgggagaataattgggagagaacattgaccaatcgttttgctcgattatcgtcgcggtaggtctctggctcggtgtagaggtacatgttggtatggccttcagtcgaccaatcaccgtgacactcgggatagcgctgcttttctggtttctagcacaatggctgaagatcattgtggtacaggagtatgccttccgatcattgcactgcacactcaagattaagtgattttaggggatgttaggggcgtagcctagcccgggaacgatgagatacgttctaggaactgggtggccctcttgtatatgtgcctgacaatcggagccgaacccaaattttgttgggtcgcctccgatcgtagtggcttaactcgggagtgcaccgacgacggccacgacgaaatcatacgtcatgtgtatgggcgttgtggagtgagagacatcggtggggatgccgaactcgtgatcactagatggtgaggtgaggattcatgtgaggatgacgccagtggcagcgacaagttgaagaacttcgccggcagcagtcgagcagcagacggtggtgcatatgcatagatatatgtatatatatccaagaatttcgtcattggacagccggggtcgtcgagcgtgacgacagcgtgagacggacgcgaggtcattaccagcccgcggtgatgccaagaatgttcgtgaaaacagctagtggctccaaacttgcacgttggcgacgaatgcacgattggtaccggcaacgacgacaagaacgggcttgtcattggcggagaaacaatcagtgcgggcgatgatgaccagaaacaggttcgccatcggtgatagccgcaaggataaatgtatgccaatgatcgttgaagatgacgaggatacgtcctgtttgtggacgagatcgcatcaccggcatcgatgacaatcatgaagacgcctcggcggtgcgggtctgagagtatgatcggcgacggcaacgattcggcaatcatcgtcgatggcggtgtacatataaagattttgtcatcgagcggtcaagaccggcgagcatgacaccgtatttgtgggtatgaggatgatcccgacgtgccgaagcgaaagcgtcgtggaaggatggcacgacgacctcagccagctaaagcgaagggatcatggctggacttggcgacgatcgtgcaagcaccaagcaatggcgctccggcattcttctcaggtggctcgacaattataacatgaggaagatcatagcattggcgaggatgatttagtagacatcggcggcaacccgcagaggctacgatgagcgtgggggacagagggcgtcaccgattagtagtctttgtggggcatctctgcccagcaaggctgcatcatgacaggtgccggcacatatagtctgacaataccatcgcggcttgtggatgatatgttaacgacctccgggtatcggcaaccaaccccttggcaacctgagaatggccttctccggtgggcatcggatggtgatggggacaagcgttagttggcaacgcctcatcgtctatggatttgggcggcttagcggcgtccacgggacaacggcaactccaacgagatggctcaagacgcaaccagagctaatgacgcctttgtcagaaaaaaactcacgcgaactggctctcagtctctctaaaacacacactctgacgcttgtaggtgcagctacagctaactgaagaagttccgaaaatacagagtcgtacagaacaactgacgaacagagttggcgctgcgtaatacagtgcagctttttcggttttctcttctatttattcatctccacacagattttgttacatgtataatagaatcaaatcatgacaatctcggatcaactactgaccgcgccatcccacgatccgagccgagtcattgcagctaaagaaggaagcaaatatgctaaaacagaaaaatgctattctactggctagaattcagactccaacagaactctacatgcaacgaaacaaaagagaatataaatgctcaagattacaatccaacaattcaccccctaatcttgaagcatcagactggaactaatcccagcttgcctctcaactccaaaaatcgaatcttaccaagaggctttgttaaaatatctgcatgttgctcctctaaccttatgtattccacctccacccgtttctgatcaacacaatcccagatgaaataaaactttgtatcaatatgtttactgcgatcatgaagcacaggattcttcaagagacttatagcagacttgttatcaaccttgatcagtgcacaaccaggttcttggccttccaactcacctattggtcgagccagccacactccttgtacagcagcagttgcagcagctatatattcagcctcacacgaagatattgctaccaccttttgtttttgtgactgccaactgatcaaactgtctcccaatttaaatagaactccggttgtactctttctatcatcaatatccccagccatatcactgtcactatagccattcagctgaggaacctgttgttgcttctttctgaattccaccccgagattcagagtacctgccacatacctcaaaactacctgggtggcctgcgcaattgcgcggctagcacccaaacaaaatcatatattttttagtattattctacttaaaatttattaaatagctatctcattgtcttaagactttgaaagaccaaaccttatcatcctcgtgtttctaattatatagtttttaaaagttacaccagtatcatcctcgtgtttctaattatatagtttttaaaagtcacaccagttgctacctcctatgtcatctctttctttatttgcttactcgatctatcactatttctattcattctttctggaacctttaaaatttggattttatagttttagagtttattgtcatatagggtttcgtttttataatttccagatgtcccgtcaaacgttgcgattatactcctctacgacccgtccactgtctcttctctttattgtcattgagatttgtcacgtcccaaaacgaccctaaaatatatcctttaaattatgcctagaataattaaaatccgtgtgaaagcctccaaaaattaaaatgtgcaaagtaaaagtcaaacaaggcttagaggatttttgtatatttcctaaaagcctgaaatgtgtaaataaattttagtggaattttcggagcacaaaaaaataattaagaaataaataaagttaaaaaggttttataaaaaaagaaaaaccctaaaagtcccccttccctcctttgggccggctcggcccatctccctctcccccctctctctctctctcctctcccccgcagcccattcggcctccctccccgcgcgcgcaccgctgacaggcgggcccgcccgccaccctcactgacgggtggggcccacccatcatccccgtcctcccgccgctcctgccgccccgcccgcgccaagcgccaccgccgccgccaaatccgccacataccgtcgtccccgcgtgcaataaagtggggggaaatactccccatgattccctctccctttccccccatttttccctctctcgcgttcaaacgggcggatttgcccccgcaaatctcgccgccgccattgatggcggccgaacctcccgcgccggtttccttcctccccagccgctctctccccttccaaccctatttaaacccttcccgcacctcctccgttcgtttccgcctctcgccgcccttcctcctcgccggattcgagctcgcgacgtcgctctctctctccgccatcgccgccgagctccggtccgccgccgtcgtcgccccggaccgcctcccacctcggcgccgcctccttcggcttcgccgcatccttgccgacctcgtccacctctccgtttcggtcgccgaccgccggagcgctgccgtccccgtcgacccgagccttgccaccgcctccctccgctctggccgcctcctccgtcgccgccgtcgcctcggggtgagttgtggaccgtcgcctcctttcccccttccctcccctctctcggccgccgctccgccgagctgatggtctccgggcgagggaagccgcctcccgtcgaccgcgccggcatggccgccctcgggcgcgccgagtggctgccgcgtggggcccggctgtcagccgcccgcgcgctcgggtgcggctgacgtgtggggcccacggcgccggccggcgtgagccagggtgcacccggtccaccgtggaccgtgaggctgccgcgtgggccccactcccatggacccggtccgcgcaccccctccccctcggctgacgcaataaaccctttttaaattaaaatttaaataaagaaattcgcaaatattcatttaaatagcatataaacttcaaatggccataacttggccatttgaactcggaattggaccattcaagtctctaatttttccttaagaagtcaagaacccatttttgtgctttgtttctgcttgttatatggagtttattagagtaaaagccttttcttttctgttggtcgtgtagacgctgcagcttcggaagatccgctcttcgtggaggttgaagccgacgtttgggaaagggagcaaggaaagtcacatcatccttgaacatattgaatcccaatttataaaattattttgatttaaattattgcattatcgctttatttaaattcccgcgttatcattgttttatttagccatgcctatttacctttgttatgaccttattattattgctattgttattattaccttgttcaccctagaataaaccaaaccccaactagtggacactctactcatggtaccactagtatgaatttaggtagatgcttcgccgcttaattaggcaacattaggtggttttacaactctagactttgggaatattcatatcacctggacattatggaatggttcaattattgtggaattggattcacacctccccctctattcaaaatcctcaaaatggttttaggctgggctcggggtgcatggttttgatagtagcacctcggccatataaggaccggtcttcgggcctctgttgcaaagcactaccgtacttccacatgtctagtgggtaaggcttagtttgtggctcagtttgattataaacaaaagtacccggatggagatggacgaagtcgggggtcgatggacatctctagggcaaatgaaggctacacgagctgcggcccggtagtcgagatgtcatggcacagggccggtgtcctgctgctaggggctcagtcctgcctacctgtcccggaggttccggccgtaggtagggttgggtcggtactcttgtctatggctaggatgggttggaaactatgtcatgtcttccgtctgtataccatggtggtatgtggcacgtggttacatgtgaggaagatgtgtcttgtgggtaaagatctacacctctgatcagagtataacctattcgaatagccgcgccctcggttatgggcaagccgagcaatgtaccaaagttagtgttttaattcttaaaaccttcttaacaactaaaatgtggaatggttggcctgggttggcttgggacgagctgggacccagggtcgggttgccagttcggtctgaatcatcgtaggccttgggttaaggcaggttcgtgtgggttcacggccttgattaataatattgtatagctctagggacatatttacaaaatagctttgagcaactaagtgtcttttaatgctgtttactgcaaaccctaacccctatattatggctcccttgtactcccttccatttattctgcacttatgggtgtgtcttgttgagtacggtggttgtactcagtcttgctcaatttttcccaaacccagaagaggagttcctggaagatgaaggctttggtgtctagctcgtgcctgccgtcaagcgcctgtggtcgtcgccctagtctttcgctgttttttgtttgtcttcttgtgtgctgggccttcgctgcccatgtaataaattaactatttacgcttccgcttgataaactctgaaatgtatcaacttttggtgtaccttgcctcctcggacaaggaataatacacgcacgtaaggaacgcccgttgggttatttccggtcgtgacaagattttaaaaatcaaacataattatcgtttgggttcatttttactttaagtcccgtcaaaccgtcagcggctttgctattgtactcttctacggctcgcccgctgcctcctttctttattgtcgttgagattttaaaatcgaacatgattatcattaggtttttttactttttggaagttccgatcctttaaaatttgaacgatgccactatgcccctctacagcccgtctgtcgcctactctttattgtcattgtgattctaaagatcgaacataactattgttgaaattcattttttattttctataactcttatacgcccgcccgctgcttctccttttatgtcattgaaattttaaaaatcgaatatgattatcaatggggtttatttttttactttctagaagtcccggcaaccgccttacttgtttgcttcacagcctgcctgacgtccctccttttaatcgtcattaggattctatttgttgttttattaacatttctaatttcagaacttatttttttaaaaaaattagttaataccgtattgtgttctttaaatgtttttattttttttatttttaatttcagttgtttcaaaattgtattcctacttaaactctcttttagtttttcaaattttagatattattttattttttatttgaaattttaattaatctcgtattgggttcttatacggattcttctttcaacattgcttatttttaattccgaatttcagctaattttaaattgaatttctacttgaactcttcttttattttcttttgctaattttgaatttatttttatttttattctgaattttaattaatctcgtattgggttcttatatggactcttcttttaatattccttatttttaattccgaatttcagctatttttaaattgtattccaacttgaactcttctttccttttctaattttggattttattttaattttatttcgaattttggttaatctcggattgggttcttatatggacacttcttttaatattgcttagttttaattccgaatttcagctatttttaaattgtatttctacttgggctctcctttccatttctaatttcggattttttttatttttattccgaattttaattaatctcgtattgggttcttatatggactcttcttttaatatttcttatttttaatttcgaatttcagctatttttaaattggacttctacttggactctcctttccttttctaattttagattttattttttttattttaaattttggttaatctcatattgggttcttatatggaaacttctttcaatatttcttatttttaattccgaatttcaggtatttttaaattagacttctacttggactctcctttttctttttttctttttcttcgattaatgtgggaatttctagcccccacagcgaacgtggtgcctcctttcaaggctgttttaataatataatagatagatatgtttcatggcagcccaatgttcagaggtcggtttctccataaacctgctaacataaccaaccgaataacttagatgaggtcttgtgttcaccaagtacctcaagctcccaattatgcttctgaattgagtttcctccatacattctcctccctcctttctcaacttcaaccgagcatccatgggagtctgacatggattacaatccctcatcccagctttgtcaagtatctttgctgcatatgcaccttgagacactgtgatcccttcctttgcatgtttcacctccatcccgagataataagagagcagaccgagatcactcattttaaaaagagcctgcatctgctccttaaacttgtttatttccatcagacttgctcctgtagtaatgagatcatccacatatacaccaaccacaagtcatgagttcttctctcctcgagtatacacagcacttttgacaccactcttgacaaaattcaggctcacaagactagaatccaacttcgcataacatgcacgtggtgcttgtttcagtccatatagggccttcttcaatttcaacaccttgtcttcttttccatcaacaacaaaaccaggtggttgaaccacctaagcatcttcttccaattccctattcaagaaagctaatttcacatccatctgatgaacttcccatccctgatgagcagccgttgcaatcagcaatcgcacagtctccatcctcgtcactggggcaaatacttcatcaaaatcaactccttgttgatggacatatccctttgccaccaatcgagctttgtacttcacaatgacatctttggcatcacgtttgattttgtaaacccatttcagtcctgttgctctgtggctagagggcaaatcatagagagtccaggtgttgttaccttcaattgattccatctcttcaagcatggccttcctccagcagctctcctgctcagcctccaagaaacttgctggttcctctgctgccataaggcattgatcactgtaattaaaatctaggattggggtcaaggtggcaagcgtgttcaccactgttctgtagctcctgggcccttcatcagtcccttcactagcatcagttggaggggaacagaattcaacaccagatggcagagttgttgcagttccggtgcttgatgttggtgatgttgctagcatggttggagtggctgctgcatcctgggcatgtgtctcactcccttggactgggattgtgaaattctccaccgtaaactccacatacgcgtcctgatctccttcttcatcagtgttgctgccccagtcccagaacgtcgtctcataaaaaaacgacgtcgcgtgacacacacacgcgtcgcaccacaaaatcatacatcttgtaggcttttgatccttgctcgtagccgatgaagaccatcctcgtgctacgatcatcaagctttctcaagtttggcttggctgtcttaacatagcccacacactcaaacacacgcaggtgttcgacagtgggtcggcgaccataccacgcttcatacggcgtcaccccatcaagactcttcattggtgatttgctcaagacatagacggctgcaaccaccgcctctccccagaaatatgccagcatgtttgccgccttcagcatggacctagctgctgccaccacagtctgattgcgccgctccacgacactgttctgctgccgtgagtagggtgcagtgatttaacgtttcacccctgtgtccgcgtagtactccatgaactctatagaggtgaattcacccccgcgatcagtgcgcagcgccatgagcttccgattgctatccttctccacgccggcttaatcgctgccgatgcttcgtgtttggcagagaggagtcgtatccacatgtgatgactcatgtcatcgactaggagcaagaaatacttcttgccccctgtcgtcgccggcgtgattggtccgcagaggtcaccgtgcaccagctcgagcgccgtctgcgccctgtactgcgcctcctctgggaacggtgtgcgatgttgtttgcccgcgaggtacccgtcacacaactgatcaatgtgatcaatttgcgggatcctgcggaccacgcctccttttgccaacctccgaagtgccaggaaattcagatggccaaatcgtgcatgccatcgccatgctagctcggagccgctcgctgccatacagattagtgtcgcaaggttcaacttgagaacatacaggtaacttgaatcacgatttaccttagctagctgcatcccttccgggtcacgcaacgtgaaaacaccatgccaaatgtgtgcgtcgtagccgcgcgcatcgaggcgaccaacactaacaatgttttttctcagcttggggatgtagtacactgcctctagtgagcggtgatcaccattcttgctctgaaacaccacagttccgcgcccctagatgtcaaccactgagccatcgctgaatttaaccgtgcccacaacaccagtgtcaagctccgcgaacgctgagcgtgcgcccgtcaagtgattcgtggccccggtgtccaggaaccactctccagtcttctcctccttacgcccatcctcatggtccagcacaaccttcttctctgtgagatgcacttcctgcacacaaggtgttcgaccaacggccgcttcgccggcgagcgacacccccatcacgtgtgccatgagcagagtcggctcttcctcagcctggaccagatttgcatttgcctctccccgacattggcgacgcggcatacggcactgcttcgagtaatgaccgtattcatcacaattgaaacacttcaccttagagatgtcacgacagccatggccgctggtggccatctcctttcccttcggtgaatcgccggccttgcctcgacggttctggttgccagagcccgcccggcccttgttgctgctgccagatccctcctactcccgctgcttgacaccggcctgccactgctccttagtgaggtacaatttgccaccgtcacttgcctcctcatcatcactgtaggagtcgaccgtcgacagccactcgatgagctcctccagggccatggtcttcacgtcgaggagctgctcgagggaaattgccaccggcttgtacttcttggggacaacacgcagcagcttcttgttgatgtgttcgtcttccatgactccgcccatgttgcgcatgtccgcaacgatggcagtgagccgcatcgcaaattcctccggtgtctcaccgtccttgaagcgcatcgcctcgaactgacggcggaatccctgctccctcgcctcgctcacgcggtcgacaccgacccgcatggttttaatggcatcccacgccgccttcgccgtgtcgtgctttgccaagccgcgcaacatctcgcggggcacagcttggagaatcgccgagagcgctgcacgatcctcgcggtactccgcatagcagggatcgatggccgtccagagcccctgcgcctgcaggttgacgcgcatcaacagcgctcagtctatataatttgtcctcgacaggatcaagagacgggcagtgtgccctgcatcgactagcgggagtgatgccgcagccgttgtcgcttcccccgccgccaccgccaccacgacggccaggcggtgtgtatgacattaccggatcgtctcagcaaagctctgataccaaatgtcagaaaaaactcatgcgaactggctctcagtctctctgaaacacacactctgacgcttgtaggtgcagctacagctaactgaagaagttccgaaaaaacagagtcgaacagaacaactgacgaacagagttggcactgcgtaatacagtgcagctttttcggttttctcttctatttattcatctccagacggagtttgttacatgcataaaagaatcaaatcacgacaatctcggatcaactactgaccgcgccatcccacgatccgagccgagtcaacgcagctaaagaaggaagcaaatatgctaaaacagaaaaatgctattctaccggctagaattcagactccaaccgaactctacatgcaacgaaacaaaagagaatataaatgctctaagattacaatccaatagccttgcaggcaccaagtagtggtgctccggccggcgttctcttcaggcagcaaggcaatgaatgtgaagaagatagcagcgttgatgagggggagcggacgtcgacggcgttgcagagaagaggccgaccagcaaggtgacgacgtccgagcatctcggcgacatctcctcgccatatagaaacatcgtcttcaacatcgccgcgccatatagaaacatcgtcttcaccttgacggagacttgcagacgacgtcaactctggcgactctgacgatggcggtgcatccggcatcttctctgctgaggagcttcataccggcgtgcatgcgctgaaatggagcaaagggatgataagaaaataggctagttacccatggcagtgaactggagcggcatcgtctccctggtgatcgtctcctccttagcgcgcttcctcagcggctcagcgcacgcgcctccttgccggacgccgaggtacggcagccgatgtcgccggccgcagagcacgctcgttcccgcaggacgccgagatactccggccaagacgacgtgcgtgatggttgccgatgagcagcctgtgtccgctctccttgtccttgtgtttctgtgtttctctcctgtgtctctgtgtatgtctctctagggactactgccaaggctgggcatggcggcagcggcggcgtgaactgcaggccctcggctcgtgcctctgtactctctctgctgcctccccccgccgtgaaggaaatggcctgttttatagtggcgatccggccgtatcagagatccattgatgtgcgatcactttccaatcgactgtggcgcaaagagagcatttccttgtatttgtatgcacacgcgcgtcccagccgcgcggacatatatagcaaggatctttggccaaaacaatattatccaccgtatttattttaattccatgcaaatgcatattcgaaatctactgttgattccaaatgagttagagcccgataactatccaactaaagaggattttttttagataatggaatagatcatcccggcctttgctcaaaagagctacaaccaattattacaaactaacactctaaaacaagtaaagttcaaaaaaaaaaataggacaccaatttaagaagtaaaataaccaaaataggataaggagtacacatttattgaagcctatttgtgaatctccatccatagttggtaaaaagttgtataaccgtcgtctcaagtttacgacatgcaacctttagaagatctccgtcttcatcacacctttataattgtgcccaaaatcagagccaatatgttgctctgaaaattatctgcatatatgtaaaagatgatgatttgttaaaaaccatatcattcctgctcaaccacagcgcccaacatattgtagaagctccaaccaatagaagtttactctttttcttgtccacccctaagagccacccatcaaaaatatgagaaatgctagtaggaaggtataaaccaaaagagaattgaactgctctctatataaactttgcatgatgacaattcataaatagatgttaaatagactcatttttcatacagaaacagcatcttaaactgtcattccaattttgtttagtcaaattatctttagttagcactaccactttaagcaagtaccacataaagatcttgatcttaagcagcatcttaagctttcaaattatcttgtttctctcaatgttgccattattaatcaaggctagatgcatcgacctaaccgagaatcgtccactctgattaaatttccaaataaaacaatcaaaagattgattcaactgaacatgtacaatagaagcacacaaatcatgccaagatacaagattatgaccaaccaatgctctcctgaacgaaacattaagcggaacagagcccataacactagcaattgaagaatttttccttctgataatagcatataaggatggatgcttatcttgaaaagcaagttccctaaccatttatctggccaaaatcttacttgttccccattattcacattccaggaacccatattcaagaaagtactcttaactttcatgtggtctaaccaaaaatgagaatcaccttgtttcctatcaacttgggttatagactgattataaagatattttctcttcaataagtcctatcaaaccccttgctcatttattaacttaaacaaccattttctcaaaagacatttattttgtatttcccaattatgacccctcatgccgccctgatctttgggctggcatataatatcccatctagcaagcctttactttttcttatgatcatccccttgccaaaagaagcgtgatctataataatcatttttttaagaaccccttttggtatctcaaaaaaggatatcataaacatagctaaacttgaaagtacataattaatcaaaaccaatctacctccgacagacatatgtttacctttccaactactaagtttcttttcaattctttgtgcaataactttccaatccttgttactaagctttttaaaatgcattggaataccgagatatttgacagggaagttacctaacttacaaccgaagatattataatactgatcataataatcctttgcgtgaccaaaacaaaataattcacttttgtgaaaattaattttcaggctagatagctcaatttcagcttttcaaagaggatattgtgatggaatgcttccattccaaaattttctagcatggaatgggatcgtgtgtgtttccattctgctttatatacgcattgtattgcccagcagagagcatgcatagctgccgatcgattgtcccatatatattgccattcatcatcaggttgacctgtgaacccaggtgatcaagtatagatgcatatggcactgataaagatgtcagacaagcaacccctattactttctggtgcatttgtgcgtccttgtcagtaatcacttcagttaagactaattaccgtgtttaactaatcatggaatttacgcatatagtgaaaacttgtgggaaatgcacacagcttgtttgtttgttccttcgattggcacattcatgatttttagttttacttaaaaaaaatgcacaaaatctcgtccaacacaaggtaaagggttcttgcacctgagatgtgtgcataaccgaagcactcgcttgagttggcgtgatcaaagtgccttcctccaccacaacccgcatcaagacggaggagagatcgacaatcacatgtgatcatgctaccgctccagagatttcaacatatgcatcatgccggcggtaaggtatacaaaagacagcaaatgattcaccatttcttttacacatacttgtctttagatgagtttggcttgatcatacctggttatgcgtcctcagtccattttcgtatgctatggtttgggtggtcgtcgacattcataggctttttaaaattaagcatgatgcttaggataaatagccttctttaattaaagttgacgtggtgtcaagtttgcttaaatgaaccgtaggtccagtactttcatggacttcggatgtatatccttcgtgaactaacccctgcagggaatttttcaaattgacgagcgagtcctcaagcacgagtcacactggaggtaagacagagctaggagaaaaatcagttgctaacataaaaaggagaaacatatcacctatcaaggtgtacggtgcgcatatttctaattgctcctttagcatgttcatgcaaatttaccttagccctgtatgagttttgcttaaatgaaaatttggtgaacaataaaaaaaattgaaagaaagaaagagaaaaaaaagaaaattttgttttcaaagaataaaagaagcgtctctcgattaaaaaaatttgtctctggagtaaaaagaaaaaaagatgatgacaaaataaaattatggcaaatttgtgggatccatgcttattaagaatccaattccttgttagcatggatgtgaacaattaatcttcaggctatgataaaatcttttcaattttttgttgtccctcgggtatttgttatccactaaccttttgcaggaaataaaaaagacaatagaggagtagtgtaaaataactccaacattcataccacgctccttagtctatgagaagacagatgcttaggaaaccaagcagaacaaatgcaaagttgtgctgtattcttgcatccaaatcaaagcttggtaagacctatctggtaataattcgaaacacctcgtgcatcctcgcctcacatatgtccaccctgctaagttacccatcacctcaattgatgccataataaaaataaaaataaaactataaaaattataaaatgaaaataaaaataaaaacaaaataaaagtgaaataaaataaaagtaaatttaggcacttcatgcgcctagagttacttaaataaaatttggctcaccgatattttaccccggtagaagcctattttgctttccatcctttttgttgaataaagacaagccacaacacaagtgtgggggagtcttttcgaactctcgacgcgcaacagcatcgactcaacatgacactgtgatgaacaccagcctatggccgcgcacaaaattcagcagtcatatatgattctcattgcaaggcaatactcctcagcgactatattattaactaccaaggccatatatgattctcattgcaaaacattacatgtataggctgactgacattacattgagctttctcaaattattgtgacccatgtgagatgctttttgatactttcattatcaagatcacgtacactaaacttacaagcacgtaagctaaatttctacactggaagctagcatccattgtccatcatttattttatccattatccacaaaataaatactccatgtcatttatgcctcatcctccaaaattctttcaaaaaaaaaagagagagagaggcatggctacgcaaaataaagaaaaataaatttttgctcatagaaaaatggagcattgaaaagaaaaaaaagagagagaaaatcttgctcatataaagtatggggaatgaaaaaaaaaagaagaaaaaaacggatagccatgcactctctcaaattggacaatgagagaaaattggaggaggaggtatatcaaaggagttgttatcatttatttttcctttttccacccacaaaacaaccatacacatatcacacacatgcacattcttgatcagagagtatgacttgcgatctccttaggtctggtcttttggcttggtgaaatatgtgatgcaggtatgccccgattgatccctaccaagctccacatatacaaccttgtagaattgggacaattcagcaaaatatgccttggtgagaatccacaaatcaaaccacacgagagacttgagagaaagtcattcgaggagtatatctactttgaaaaaatatatgaaaacccaagagattgacaggaggaacaagaaggacttgagccacgacagttccattcatcaattacccaagatggatagttagacactggaaagttcacaagtacttgtatggcttagaataaattgtatacctgtattatatcttggaaagttttattccacattcatccttaaccattactcggaacgagtaaagagctaagtgtgggaggttttgttgatggctgttaaatacaaaatatatgccgtcaatacctgcataaaaccataaatgtaaaacatcaaccatagtggtagggtttatttctaatgatttccactagtgctagtgtatatttgtatgcaggtgacaaattaccagagttgagaaaaaataaacatgtaggcagggggattatacttcccgttggagtccatggagtgatgagcccacaaaccatattaaatcattatttattgggccaacgctggaagaataataaagagggacccaaatgtcaggagatagaagaaggccggaggcagttgggccagcccatggttcggctgaaccgccatgaagcccaattcatcccagccttccatgtgggcgtccaggattgctccctaatgatggttggatggtgtttgggacatttcccataatgtaactatcatatgaagcctataaatagagctcctctccctcattccaacacacaccaagacgtagagctgaattacaagaggctctaagtatactttaggttcattatatgttctatagtacacttagaatagggatagagtaaagtagaagaagtcggaggaatcccagagttgtcgataatcctctctttattcttgtactttgttaattactctggttcaatagaaatatcattctgagtaattaagatttgcttagcgagaattattcttcgttagttcctaattagcatatgggattattgttcactatagtccattaattatatagtgattgctttagtctttagctagcactagagtagttattaattgcgtagacacggtgtctggataattaatttccagtacttgctgcgtatcccacaatacgttagacgtgggtgtagaggtggtgatagccctcaagagcacttaagtcctccctgtgcgggtacatagtagagcgacatctaggaacagcgagttgctagtgcctgaagtatcgcgttaggattaaaattaagctttccttggacactttttctcactaagaaatcctctctgccctgtgcccatatttatcttatgtccttgatgaaccggaggaagagataatcacacacgttcccttggattcgatacccttgaaatactccgtagggaaagtcctacatcggtatatccatgcgcttgcggattctatctgtgatcgtaagaaataccaacaactggcatcccgccatgcctcttgaacgatgctgacctcgatcttgtcggtgatcaggagatgcaagcctactacatgctaaaggatcagatatttgctcacacgcgggcatacgatccggagctactaaaaaagataggtatggatgttaattctcataccatttggaaagttgttggatggcagagatttgcggtggcagatgagcctggttctcgtttgcttactttacaatttcggtacactttgaaagaaatagaagatggaatttcctttcgctttttccgtaaagaatttacacttacatggaaatgattaagtacacttctttgttttcacgatgactataaaaccgttcttcggaatttctgggttcgagaaaaacagattttgggaaaatatttctggtggtccaatttgcaagaaacctagaacgaatgacatccataatcctacacttaggcttatgcacaaatggattgttatgactttgtttcctagaggtgatcttaggcctataagagaggataaattgattatcatgtttgtcacagttaggaagattaaagttgctcctgtgaaatgtgcaatggttagagagtataaagtttactgctcctgttgagtgcacttccctaattactagcatagcatacagacttggggttatttctaatgatcagattgcttatatttcaacccctcatccgtgtgttgacgagaattatttagtgcaaggtcatattcttaagcatggagtagatggatctttgatattctttttccccggttgtacaaaaaaaatcccattacctaactcgggatatcatttgtacaactgtcatgaactaaccattcccgtatagaccatagaagaatcttgtgcaggtggatcatatagggacacacgcaacatggcgagaaatgaacaagaaggttcaacatccgtgcaaatgtacgaagccggttaggaaccaactggggatgcacccggatggacccaagctctacaccatagcctcagaggctcggtctggaagagtgccagcgagagccgacagagagcatctcatgacatacactggggaacatgaacattcattccctcagatcaagcagtatgccttcatcccccaatgaatggtgaatggtgctcaagttcctctcgttaggacttgggagaaattacaaggaggatggataaaattgacatgcaaacgggagagatccaatacaacctcgatgtcgatttctaggatcggcaatatattttaagaggtgcgctagatcaaggagagatggtgacgcagggattatcctggttcaagccctctgagagaggaaataccgtacgtccagtgtgttctttcttgtgtatagtggaaaaatggtcggagaagctagacagaagagtcgtggagatgattcgacctcctctagggaccccttccccctcttatataggatgagggggagggttacaaggaaagtatctagttgattgcaactagatcaacctattctatctataaaagatatgcaggatcctcgggatttatatcttatcccgggaatctctctttctttatttacaagtatgacgcatggggcntaggacacttggcccaccccatgcagtgtggcccaagggttgtcattgggtacccgggtaccgtgtaccccccactcgatgaacacttaacacagacgcaagaatgacaaccgaatgttgatgctcagttcaccaacaccaacaacgcaacctgatgcagcaacagcatgacgaccttcaagcgtactttcgcttccaggggttcaatccttatcaaggaccctgagcgaaaggcaagcttggtgggagacgtctctccccccgctgaggtaacttgtatcacattgcatgtttccctttccaaatgcatgttttattttcattgcatcttataaactaaaaacaacataaaaattgcaaaatagaaaataccaaaaaaataggttagactttattatgctaggtaagacaactttttttttgactagaaatactgccaggactttgcccagcagtgtagttttatagaactcaaaaaatgttttcaaaattacagaggaaagaaaccacacaaagactataaagtttttaaccaatcagaaacaatttgttttaagggacatatgtagaagaatttctttcacaaaaagtgatctccaagcttggaaagatggctgaatattctgtaaagtaagacaacttagttctctttgttgaaatgatgaatagttgctctgttttatatctctcatatatggggtcatggttaaatactctctcaaaagtcgaataagagtagccaacaaatatccgggagcctaagggaagtgagctgcacttgctgatttgagtctaagttgttgtgagatatgagatagtaaataagagttgttatgaccctagtctgaatttgacttgaattccaaatgttttctttttctaaaataataaactcatgaagttcctcatttgatataaatttctaccaaagccaaaagtattcttattggataaaccatatacattttggttggctgtaattccattgaactttatcaaatttttgtgacttgtgtagatacttttcatgctctatgattaagatcatacacccacatatatgcacatgctaaacttctacactggaagctagcatccatccatttcatcttgatattccttcataccaccatccaaataaattctccatgcttaaatgtgctttcttctcctagaaagaaaatcctttcttaaaaaaaagaagagaaaataaggagggaaaggcatggctatgaaaataataaacttatgctctctcaaaatataaatcatgatgatgaaaaaaaagtagccatgccctctccatatttatgaaaggaggattttggagaagaaagtaagcacaaaggagaagcattttctttattttccacattccattttccaccatataacacacacactttgcacgatcttgatcttgagaatgtctagtcatctattttagtccaagtttttgacttagtgataaatgtgagtacaagtatgccaatgccatcgagatcatctacagtatcttcggtgtagaaatttgaaccctcaacgacgccctcaaaacaacaattagggctctccatctctaactggttgtatatcacaatcggacacttttagataatctccatcccaaacttttccagataagcaatcaactccatccatctcccaaatagtcaaatcggcattaccaacattaactgacttgtcggctggcacgatttctatctggtctcctttccattggatcaagctctggtgcatggtcgaaggaatacaacaatttgcatgaatccaatcccttcccaacaacatactgtaagaacctttcccatcaatgacaaaaaaggtagtagaaattgtcttgctgccaatagtcaactccactttcaaaattcctttggttctgaaggattccctccaaagtctttgagcaccatcttagtcttgatgagatcatctgaattcttccctaacttcctgaaggtagaataaggcatcaagttcacagcagccccaccatcaactaacatcttggagatcggcttgccattgacaaatcccttgacatataacggcttcaaatgccgatgccctgttccttctggcttctcaaagatagcttgcttaggtgacagacccaacttagccaaagattcttccatgatttctgcatcggctggtttagcacaatattttgctggcaatataaagaccatgtaaaccaatgaagaagcaacagccttccctttggctaaccatctcgccttgtcggcttcgacctcatcagctgagacaaccttgctcttaacacgccactcattccttgtcctctttagccgatgattgatctcttctttggcctcttgaatttgctccatgttcctcgtcctttgaattcttctcttctggttcttagtgaaaatgccagaaggacaccattggggtttcctagtttcatcttcatcttcagcatcctcctcctgaaacgaatcttgatgagttggacccaatctctggtgaacaggcaactttttctgcacttgccgatcctctctccttgcatgtgatcgacttgaactcccaacatatctccttctagagccaccacatcctgggcaatcttctattgacggcaatctcatcccctcattctagcagaacctgaaaaactcgcaactccaatgaggatcaaaattgcaatcatcttcataatatttttcttcttgcatctcatgcttcctctggtattttgtcgcgtcccaaatcgactctaaaatacatcctcgaaattgtgcatagaataagtaaaatccatgtgaaagcctccaacaattaaaatgtgcaaagctaaaagtcaaataaggcttggaggatttttgtatatttcctaaaagcctaaaatgcgtaaataaattttagtggaattttcagagcacaaataataattaagaagaaataaacaaagttaaagtggttttataaaaagaaaaatccctaaaagtccttttcccccccttcctctcttgggccggctcggcccagctccctccctctctctcctctcccccgcagcccatcggccttcccccgcgcgcgcgtcgctgacgggcgggcccgcccgccaccctcgctgacgggtggggcccacccgtcatcccctacctcgcgccgcgccccgcagcctcgcccgtgccctagcgccaccgccgc

SEQ ID NO: 24510 - DNA, 10580 bp, Oryza sativa
ttatgggcaagccgagcaatgtacccaagttagtgttttaattcttaaaacctgcttaacaactaaaatgtggaatggttggcctgggttggcttgggacgagctgggacccagggttgggttgccagttcggtctgaatcatcgtaggccttgggttaaggcaggttcgtgtgggttcacggccttgataaataatattgtttagttctagaatcgtgtttacaaaatagctttgagcaactaaatatctttaaatgctgtttactgccaccctaacccctttatagtgtaactcctttgtactcccttgcatttattctgcacttgtggatgtgtcttgttgagtacggtggttgtactcagtcttgctcaatttttcccaaccccagaagaggagttgcaggaggatgaaggcttcggtgtctagctcgtgcctgccgtcaagcgcctgtggtcatcgccctagtcttccgctatttctcgtttgtctctgtgtgtgctgggccttcgttgcccatgtaataagttatctatttacgcttccgcttgttaaactctgaattgtatcaacttttggtgtaccttgcctcctgggacaaggattaatgcacgcacgtaaggaatgcccgttggcttatttccggtcgtgacatatttgcttatcatcctaacaaaattaaactgaccagactgataactcttccaatcggcagctcccccactcgtgtgaaccatgttgacagtaaacggattaccatcaatcttcatcggcttctttggatcatcaaactttatccttccttgttcaatagccgattaaatctgttgtctgaaatgcaatcattagtgaaatgagatcctgtgttatgccacttgcaatatttcctcttccccaattcattagccgatgggattacatgaccagcgggaagttgaatatgtttttctcaaagcaacaaatcaaaaatcctatcagctttagtaatgtcaaaatcaaacttcacttcccttccagaattcctaacccattgacaagtaacaatcttcttgttcctagcccactcagttgcagctacttcgggatcatcttcatcagactcagaagcatattgatcaacattattgatcttttcttatgccttcctagcctcatggaatctttgcttatgtgctgatactttttgggctagatgagctatactctcgaaggcttgaactaaaaatatctctttaattggtgtcaataagccttggaaagtaagattggctaactgagaatctgtcaaagccaagatacagcatccattcctcatatccctaaatcattgaatataatctaggacagactcctttggcttctgcctgattgctgtcaaatcagacaacttcatctcatgcactccactgtagaaatacttgtgaaattgcttctctagatctgcccaactttgtatagaattatttggcaaagatgaaaaccatgtaaatgttgatccagacaaaatcaaaggaaacaacctaacttttaacgcatcattagccgatgcttctccacactgaacggagaatcggctaacatgctcataagtggacacattgtcttgtcctgagaattttgaaaaatctggaaccttgtatcggtttggcaatggaaccctttcaaagtactctgggtacggatgccaatacaaattaccaccgtccttgggcttaagaccaaattgttccctcatcacattggctatcatatcaacccaaggttgctgtcgaggtgtccctcccaattgctgctgcatctgatgtaactgattgtattgaggcaggtattggggttgaggtgatcctcttggccgatattgtacctaaggtgaataaggatgtttacattacctcccatatgatgttggggagattgatgtgccaaatggatggattgttcagggatgaactaagtaccaggagcctaagacatccccatctactgctgctgtggaataaatgatggttgccctataggaatttgctgaatcggctcaaccactggctgctttgtcttgaacaatgcagcaacttgttctagagaaagatgaggtatattgtgccccccatgctgaggctgttgcctgaacaaaacgttaggaagaaactctggctggccatgatccgatgttgatgcccccaactttcctagagccgatgccgatgcaacttgttgtttcgggatcactcctgatatatacaggctactgtttgccaccaatcttagtattgagggttctgtattgtggaaaattgccttcaggaaggaatactggccccttaacttggtgctcagctatcgtaccatcaaccacagtcttgatcatattggttaaggtgttgacaagcactcccgactggttgatcaatccgtgataaatagctgaatcaatgcgatcttgcaaagtatggaactcctcagtacttcatttagctttctcatctttacccattatatccttaggagagcttgccccttcatcatcgaacggtaacgtgaccttgtgtctttggattaccgtaccgtgccgagtcaatgtgaacgaatgtagatactgattttgcaactgattcatcatctgttccagagtcgccttctgctcctctgtcagtttatctagcatcaccgggatgatgttttcatcatcgatatcatgttttttatcaaccatgatgaagaactaccaaaggttgtcccactaggcgtgccaaaagcgtgttgatgcaaaaaacacgcactggcctgagagatttgctttactctagtgcaggtcctaaatttgcttttgggttcagagcgtgccagttggtttgatcctgcaatcaacaagaaacaaagaaaccaaacttaaatccatcaacgataaccgatcatctggattgctgatgacatatcgtctgagagcaagccgatgcggtatatttcggatcagcagtgatatatatagtaaacaaagggctaaatttactttatcggctttagataataacaatatataatctatacttcgaaatgtgtttaaaccaagcgattgggatagatcggatggctgccgagacagtataaatcacttaagtttaaaagtacttcaaaggaaagattatttatgttcattgcatagctgataggtaaatctagtgtgtatcggctattgctccaatacatctttatactaagatatcattatagattaaatatattaaacaagtgtcggtctactattaggaagacccaagtagattgagatcaagcttaatatgtttagtcttagcgagatcttaatataaatggcagatttagcatgtcaagtaaataaataaagaacaagataactaaaccaggtaagatcggctgaaactccgatactatctctattagcaatcatgaagcaagctagagattatggttctaaatattacttattagatcaaacttaattgatgtagcattaagcatagagagaaacataagatctagtaaacaagccaatgaaaactttttcgagatggtggatatactatatgatctaaaccaatgatattacctgattctatcggctgatttcgatgatagagacgagccgacaagaccagatagtaaaatcaatctagattatattgcatttatgataactcgacgattcacataaacaagattagagtgtcataaagatgtgagcactaatcccgagaacgcaagccgcaataacaagttttacctctcgccggagatcgaaaacgatgcagcccaactagagaacaagaactcgtcgaaacaatgaaagtagaaaaaggtcgcgatgcgccgaaagtgtattgaactgatgtcacgtcctgataaattcgtcccgaaattaaaaatcattcgctaaaaggaataatagaattaattaaaattcggaaagaaattggcaaacactaaaatacgtacaagaaaaattcaaatgtggcccggagaatttttgttaaattcgccttggtctaaaaggagccctcaaattttacttgaattttcagagcaccggaaataattattaagcaacaaaaacaattaacaaagtttattaaaaataaaaacctaaaaataaccctccttcctcctttgggccaagtctggcccaaagtcctccctctctcccctcggcccgcggccgaagtctccctttcctccctctctttctctccctctccttctctccctcctcttgggcccccttcccctcggcccagctccctcctccctctctctcccgggctgtctctcccccccccccggcctgccggcccaagccgcctccccctcctctcctcctgggccggccgcccggcccaacccgagcggcgccctcccgcccgtgccgcgcacgtgcgcgcgcgtgcgcgccgttgccgcgcgctgaccgcgcgcccgaccgcgtggggcccacgcgtcaggcgcgtcgtctccctcctccagccgcccggccacctctctctctctctcccggaaacctagctcgctccctcctccaaatccgcttgattcaattggccaattccaaaattaattggggggttttaatccccattgaatcgtcttcaattgcccccaaattcccccttgattcgtgccttcaatccccgggaacggacgcgccaagtccggtcgctttccatggccgtcggccgccattcccgccgccgttccgacctcccccgtggccggctccctcttctctcatataaaatgggatcctcatcccccgttctctcgttttagccccctcccgagcctccccgtggtccctagccatctccccgccgccctcctctctctcccacgccgccggccgcctccagccgcctgtgccgcctcgaccgtgcgccggccggccgcgccgtcgcctcctccagcgtcgccgccacctcctccaccccggcctgccctccgtttcgcgcggtgaccgccggaggcgcgttcccgccgtcgcccttctctttcctccgcgccggccgcctccagccgcctctccctcctcgccggagcaccgtccggccgcgccgtcttctccctcggcctcgcagccacctcctctccctcggtcagccctccgtttcgcggggaaagcaccggagacgcgtcctcgccggcaaaacagtggcgttgccgccactggtccacctccgggcgccactgtcgcgtttcccgtgcgccggccgacgtcgccaccacctccctcggctccgcgacgccgccctccaccccggctggtcctcggtttcgccggaacgccgtcgccgcgccggcctctccatcctcttcgtcgccggcgtcctttcggccacccattcctcctcgtcggctcgtcgccccgctaaaccaccaccttctccaacatcgcagcagcgcgttccacgccgtcccctcctccgctcagccgctgctgcctgccatcatcgtttcctcgtcaccgttcgtcctcgccgatcgacgtcccgtcggtcgcctggctcgtcgtctcgcggcgccgcctccgtcatcatcatcgctgcggcgtgttccacgccgtcctcgtccccgtgcagccgctgccggctgtcctcgtcgcctcctcgccggtcccggtcgtcgtcgtcgtcgtcgtcctctcgtcgttcccggtcgtcgtggcgttcgtccctccgtcgagccgttctcgtccgtcgtccgcattcgtcaagcgagccgctgcagccccgtcctcgtcttcgtcctcggctccgcgtcgtcaagcctcgtgccggccgcgtctcgccttcgtccaaggatcgccgccgaagccgtcccctcgccgttcgtctccgttgtgcccgtctgtctccgccgcgcccgttcgtcgttgtcgttcccgcgcctcgtcgcgtggtggtaaggatccctctccctcgctgccccgtcctcgtcctttcggtgtcgcccgtgctcgttgtgcggttctcggccccggtacccgtgtaccggtgtcggtagtcgttcacgcgtgcgggtggtgaccgtgtagtgtccgtgttagtgtgcccgctcggtagccgcgtggtttccacgtgtgcaggccgtgtggtgtttagtggagtccgtttgtcggccactcgcctcggttgacacacggggtctgcttccgtcgacccgaggaccgtctctgtgtacccggtctaccgcggtcctttaggttgacatgtggggtccgcatgtcaacggcgcagccttcctgtcttttccaggctagcgcttacacatgttttatagttgcaaagcttaattataataatccgcaaatctccatataacagcattaaacttcggatgatcatatcttggtcatacgagctccgaatcgacccgttcaagtctcttaatgtttgttataacctaaagaactgtgtgctttcttttttatgtgttgttattgcttctttataggcttgtagctttgcttgtgtgctccgcgtagctttcgtcgttccggaggttcgcgaagcgtggtttgcggtcgttgccgaaggttcggaaggccgttctctctgagcaaggcaagtcacatcatccttgagcatattgaatcccagtttataaaattattttgatttaaattaatgcatgatcgctttatttaaattcccgcgttatcactgttttatttagccatgcctatttacctttgttaagacattattattgctactgttattattaccttgttcaccctagaataaacaaaaccccaactagtggacactctattcatggttccactagtatgaatttaggtagatgcttcgctgattaattaggcaatattaggtggttttataactttagactttgggaattctcatatcatttggacactatggaattgttggtttatggtggaattggacatacacctctcttcctctttcaaaacccctaaaacctgttttcggtggggtttgggtgcatgccagttgtgggaagtagcaccccggccactataaggattaagctcgggcctctgttgcaaagcactaccgtacttccacatgtctagtgggtaaggcttagtttgtggctcagtctggtcataaacaaaagtacacggatggagatggatgaagtcgggggtcgatggacattctctagaacaaatgaaggctacacgagctgcggcccggtagtcgagatgtcatggcacagggttggtgccctgctgctgggggctcagtcctgcctgcctgtcccggaggttccggccgtaggtgggattgggtcggtactcttgtctatggctaggatgggttggaaactatgtcacgtcttctgtctgtataccgtggtggtatgtggcacgtggttgcacgtgaggaagatgtgtcttgtgggtaaagatgtacacctctgatcagagtataatctattcgaatagccgcgccatcggttatgggcaagccgagcaatgtacccaagtcagtgttttaattcttaaaatttgctcaacaactaaaaggtggaatggttggcctaggttggcttgggacgagctgggacccagggtcgggttgccagttcggtctgaatcatcgtaggccttgggttaaggcaggttcgtgtgggctcacggccttgattaataatactgtgtagctctaggatcgtctttgtaaaatggctttgggcaactaagtgacttttaaatgctgtttactgcaaaacttaacccctatattattatccccttgtactcccttgcattaatcatgcatctgccggtgtggcttgctgagtactgtggttgtactcattcttgctcaatcttttcccccttcagtaagagaagctttggagaagaagtcttaggtggagtcctggcttataccccagttgagcgcctgtgaagatggagccgtaggcccgctagtccgctgctgtttatttttgaatgtcaggcctgaagcgcctttgtaataatgtaaatattatcgatataataaagatgtgtcttttatatcatgtttgtgtggtgtaccccggcttttcctgggacggggattaatacactagcgttcgggaaaaggcaattttcccggtcgcgacaactgatgttaattgtttacaaagactcgggcatatatttatacccaaaatacatgatatgtccatatcggacacgactcgatttgtattacaactctaaaagacgaacaagtcccttaggcgaactcttaccaaaaatatatataaggaaactattaaaatatcctaattaatatagacatttgccttcttctaacgtgatccatgcctggcaatacttttgcaacatttatattgagtccgacaatgactctaagcccctttgtcgaaatcagctgcatcggcttctccttatccgatttggtactagccgatgcagagtgcagccgatgcacactctgttttcgggaataacgaactccctccaaacccgcttcggttttgactccaaattcaacctatgatttaccaaatttggtcgttaacaggtactccttttagagcttcccctcactctctacctactctactagagcaatgcctaagtatgaaagtgagttgtactccactttattgtgtgttgagagttaagtgagctcccccttttatagctccaaatgactacggttaaagtttgtaactgctgaggaaaccgccataaccgtcattggggaggcatgaggaagcgacatgtggaagatgggggggcgatcagtcgaaccaattttactgcctttctcccccattctcgcttgagtcactgtcctgtgggccctcataacggtgtatgggggttggcctcaaatatgtcggttttgctatggtttgtgggccctccaatccgagtactcgcatctgattgggcggaggtgtgtttcttcacatggcgggtggttttcatccataattcacctgcatacgaatatttaccaagacttgtggaaatagttagtaataaccactacccgtaagtttgatattctattttgtattctttcattttcttttatgcaggatttgacggtcagatttggtacttaaagaccatcaatatacccagaatacccataaaggaaatataagaaggaatgatttgccagtcgctctaacattttatcagcgaagggtagcgtgaagttgttcttcttcgtagccttattgagatttctatagtcaatacacatcctccatcccaagatatatgttatgggatcaacttgttcttcgagttttcaacaactgttgttcctcccttcttaggcactacctgaactgtactaacccactcactatatgacacaggatagattatcctggcgtgtaggagtttcaagacctctttttatttttacgacctctctcattgtattgtttagccttcattacggctcccgaggggacgcataagaaggatctaaagggatatggtgtgtgcaaagagccggactaatccctttaagatcttgaagagagtagcctagaacaaagcgatgcttttctagcacggccgtgagtcgagaggtctcatatcaatcaatttgtaacttatgatgatgggcgactccgtatcaccatgtagaaaagcatagcgaagaactgaaggaagtggtttgagttcaactggaggccgtaaagttggattggttttgggtaactctaccaactctgcaagattgtcatcttccttgacgagtgcattggcatcatcttcgaggagggattcaggggactcaaaaggggagaaaaccaacacttcctcactagtccctccaccacttgacgctcgtcggtgcaggaagaagatgggagaaagaaggaataaaacggaaaaaaaagagatggatggaaaacgtgacggctgtgacatgtttttaattttataaaattttactggcacagctatcaaatcagtaattaagagtggcataacacaaccagcaataaaatctaaactagactattacacctagccataaatatcaaccacaagaaggtccagtgtgatcaactatgaaattgcagtcaataggcaatacttcatctgtcccctaatataatggattttgatattttggttacgttgtttgaccattcgtcttattcaataaattttgaattattatttattttatttgtgacttattatccaatgtactttaagcacaatttttctttttttatatttaaaaaaaaatgaataagatgagtggtcaaacagtgcaaataaaatgtcaaaatcccttatattaagggagataagatagtagatgagtagtgacctttcagcttggtcgtcggagagactcaccatatgtccatttcaacataggttagtaaaatataagcgatcgatatatgaagtcctgaatgaaaggaagtgttcaaacctaaaccatcccaccatgcatattctttcagagttagtacgtacaaacaactgagcgaatagaaaatgaggttgaacaggatattcgaatgaacctgacttttagcagccaaatgaaataa

SEQ ID NO: 24511 - DNA, 3437 bp, Oryza sativa
tcctttatgaaacacttccaaacctgactaaagtgaaatgcaaaagattttcttgtgcctcgcaaatgttgtagataaacgaataaacaatatgattcattcattgggttacattatttatggttcaacatgtgcagacaattgtcatccttgggttgatcttacaagcaaaacaagttcaccaacaaatatcagaaggcagaccaatttcttgcaaggctccattctaagctaaatctataaaaaaaaacacaaactaggttgtgtttcagatcttgtactgttgcaaagaacctgtgagcgttgaaaaatccttgaactttgaaaattttggcatatttaagcaccatggaaactaggggaatttacatgcatgcttggttcaaatcctgactcatattttgttgtcatcctggacaccagaagcaagtcaatatactctaaaatccaaattcataatgttgggacatttagaagattgaggcgattatagaacggaaaatcgagttaccgttaggatgcaagcgggccgacctgcgagttcacttatagatcaaataaatgataattcataggttttcggtttgtggtccggtttgctacatctagatatgcaagtgggtcgatccataaacccatttacaggtcaaattaataggtaacccgcgagttacatagaaattttgccaacaagtgggttcacggacaagtccacttacatccctagttaccgtcgcctccaaaatgatgccagtaccgtagccatggaacgaagtgggctaaagtagaaccctggtaatcttgacaaagaaaattgcatgacatatcctttgtcacagagaacagtagaaaataggctgacgtcaacacaaatcactaagcacattaataaatttatttaaattcctcagaaactgtaaatcaaaatcatagaacgattaccaaaattctagctaccaaatcaggagtcagatgagaactccacaaggataacctgcacaggaaaatttttgccttgaataacatcgagaaatcttttgcaaacttagtatcatgttttcttgtcatttttcttgataatgcattgattagcatcctgtacagtgaggaatccaaacttgccatctggaaaaatggttctttccatgggtactccaatactataaatacatgaaaggaaatgaaacagaaagtgccagtacaaatctgcatgatattaagggatataacagcagcaacacttcaggatcatcattggctcactgaaaatgaaactaaatgtaacaaatgggaatgcatgatccacggttcagtttcaaacctttttacatcacttggtatctaaaggagtgtctaaagttattcttaggaaaatatgcaagaaacaaaaatggtatgctatatcggtggagtttagttgatcactggttggtatcgaatagtattaagcatgtaaatttcacactgaaaaaaaaagttgaatttcagaataacttgaacaattttattgtgaagcacaaattaaagtgcaaaaccaattgagcacacgaaatggcacgtcatctttcccaaattagctattaaccactatatagaaacagatctaagagtgcaatcattaatctccaaatctgtggtatataaaaagtctcaggaaaaaaaattaaattaagttttcatgcaccaatgaaattacagttgcaaacagggagaagtaatattattatataccactgcatctaggaagataaattgaagaagaagcatgtgtaaacaacagggagaagtcacaaacataacagttatgctgaagaaaaggaggaaccccaaactgaaatgctatggttaacttgataaaaattatgagaccccagacttctttgatactgtcctagtcacctcgtgatccccattagtccagagacattttcctgaacaatatatgatcaaattcatgaaaaggcaagagctcagatttcaataatcccagatctttgcatttcagtatgtcgaaatgataaaattagaacttaatatttatcatccccatgaagtaaaaaggctctaaaagtgggtggtttctgattatagtgatagggaacataaagtagctagttttagtacactggtatttctcacaacatagacatatgaacaaaataaaaacagtaatagttactgctagtataattagcttgttaatggctcaaaatttgtaaagtgaagagaattgatgaaattgggtgaccaacagaacaacacattagtcaattgtttgtcggtgtgccagttacacttacatcaaaacaaatataagggaacgaaattttaggaaattgatggaattttacactgtttgaaccaaagaaaacaatcataagtaaccagaaactttgcactatccaagaaaaacatagagaaatgtagcatttaagtttgaaactagcattaatagctagttccaggactcacaacattttgcgctattgcacttcaaattatcggagtgcttgcaaataacatctcatcattggccaatccacaagatataacagaacagttgattttttttttagaataggggataacagaacagttattaacaaggaactaatataaattgatcattgatgcaatttctctttcatagaaaagagggtcagcacattggcataattaaaatgcattcagcattcatacttcaaacaaagtataacaaagaggatcacaatgcaggcacataataataaagtttccattgagataggtcgataaatatcagaagatcttgcactcttgataacaataactcaggatcacaactaaaatagaacgagacatgaaaggcaaacatactagctcaaacatttcttgtttccacttcttagttcccctcaaaagaaaaaaaactagctggattgcaggataaagataaatccaagacagaactcagacgtcaaaggggttgaaccttgggaggtcgatgaccttcaccttcctgaggtagctcagcgggcgaaggaccttcttaacgaggcggtgcatctcacgcccagtcaagccctttccctcgtggacagcaccgaggcaagcctcgacggtgctcatcgcttggtgagcgagggagagcgccatcagccgcacctccccgttgtcgaacacgagcaggtcagcggaggttatcacggctggtatggcctcgcgcgccctggtgagcgcctcccccagaagagtgttgtagaagagtatctccaatccctcctcgccatccgggtaattcttcagagtcttgaggacgcggcgcgcctgcagcatcatcttgcccatgcgcccaagagcatctgaggcggtcggacgtccttgaggccggccagatttgggatttcccaatccggccgcatctccatcttctggagctgctgcaccatcagcggggc

SEQ ID NO: 24512 - DNA, 1136 bp, Oryza sativa
gaggatttaaaaactttttccaattaaaataatcactgaaatgatctttgaattgttaaaaatacttccaatgctcaaatgatttcaagaaaaatcctgaaaatacttggacactcaacgtatttaacaaaattaaaatcagatcatttaatgattaatttaatatttaaataattgctgaactgctctttgtattattgaaattaagagttgagctccgaaaaatccgagaaaatttcagagagtataattaaccatggagaatttaataaaacttaaatccagccatgctttatatttaggaaattttatttctcacatttaacttcacttgtaaattaatgaacatttaatataaattctaataataatttattaaataatttataaatcctaagacgaaaatcaggatgtgacatcatctaagcatggtaaagctaagggaactaaaggtagcacagttgattcaggtgacaaaagtggggagcctaaggatggtgagattgaggagattgaagaagaggagattgaggagcaagaggccttgaagttcaataatttccaggatcaagttgattatgctgttcatcaagctttgattaatctatcgggtgctggtcaatactttgacaaatatcatcaagactgtggttgatatcacaattgctgagcattaggataacgggccagtctttctgccagaaggtgggttccatacatatagaagcttggtgacatgtaatcaacagcctgtctccaatgtacctccagggcagccgatggcgtcagcttcagctttgagaccaggagcatcatcttctacgtagagaccagtggtcaatcctcatgtactgactagggaacaacctcggcatgctgggaaaaacgtcaatcggctgactcaggaacagattgcagctatatttgggccatctcaaccggttgtcgagccgattcaatcgacaccaattaggcagcaagtggttcagccgattaggcagcagatggttccccaaataccggcaggacagagaacacctattattcagcaaaatcagcctgttggagctcagtttgttcctaaacagcagatacataatgtgcaacagcctcctcagaactatctgggctgcagg

SEQ ID NO: 24513 - DNA, 1801 bp, Oryza sativa
ttcctgcagcccctaaaatttatttacgcattttaggcttttaagaaatatacaaaaatcctccaagccttatttgacttttagctttgcacattttaattgttggaggctttcacatggattttacttattctttgcataatttcgaggatgtattttagagtcgttttgggacgtgacactgtcacttcctgatttttgtttcaggatttataaattatttaataaattattattagaatttatattaaatgttcattaatttacaagtgaagttaaatgtgggaaataaaatttcctaaatataaagcatggatggatttaatttttattaaattctccatggttaattatactctctggaattttctcggatttttcggagctcaattcctaaatgatacaaagaacagttcagtaattatttgatcaataatgatctaattataattgttaagttcttttcttgtttaaaatccttaaattataaattgttgtttaaaaggaattattagaaataattttaaaagcttaaaagataagacctaattttaatttgttaaatctcaatataaaaatgagctagataaaattttattaaatactttgcttgttcctctattttctagaattttctaggaattgtttgagcaagggaagtattttaataaatgaaacatcatttcacgaattattttaattggaaaagtttttaaaatcctcccctaagtcgttgggccgatttcggcccaactcttctcttccccgcgcggtcgaaccggcccaagccggcccagccgacgccgcccgccccctcctcctcgggtcaccgacatgtgggacccacatgtcggacccatcttcctcctccagccgccggccaagccgagcccgagccgccctaccgcgccaccttgtgccctcaaatccgcacccaatccgaccccgattcttccgatttttgaggggtttttatcctctcatcctcctctatctttcccctcaagaatcggagcaaatggttgggtattttatccgaatcgagttcgtttcgattttatccccaaaaaccgagtttagattttcccgagccgatttcttgcgggaggagtccgatctctttaatccaaggctataaataggaccctctagttgtcacgcccagaaattcccgaatagaattccaagcagaatgtgcattaaaatccccgtccaggaccagccggggtacacaaacgacaatgttgacattcagatccacgtcttacaaacatcataaaagtcttacaaaaatgcagcggaaaacaaaagataactggagctaatccttgactcgaactgcagcgggaacaccactccacaggcatcctcgacggcacggacaaagcctactcctcggagaacccgccatcggacacatactcgagctctgggattggggaaaatagagcaaggctgagtactacccactgtactcagcaagtcataccggaacgggggtatgatgcagggattccacaagggatagctaagcaggttcatttgcataaatactggcatttataaacaggaattgaatgcgaaaacagttgtaataattaagcagtattaatcatccactgtccaacgctacaccacgttgcgacaggcccaaccatccacctaaacaatccaaattcaaaagattacactagggtgagactaatcacggtgaatctggttgactgcccataaccgcgggcacggctattcgaatagttttactctgatcagaggtgtacaaatgtacccacaagacaca

SEQ ID NO: 24514 - DNA, 9557 bp, Oryza sativa
ttagagagagggagatgaaccacggcgaccggaaaccatggccgaaggcagcggtagaggtggtgctcacccgtgcgcgaggggatgagggctccggcgacgaaccttgacggaggagaggtggacggggtggatctcggccacgcgaatccgacggcggtgacggcgcggcctggcggcgaccctaacggcggctagcggcggccggagaagcggaaaatggcggctgcggaggttgcacgacgcgggggcgatgggaggctcgagagagtgcggcgaaatggggaaaaagtgagagggggcgacggcggtgcttaaaaaggggaagagagaaccggacgtggccgggagaggcggaaatcgccggccgacgtgggggaatggggaagagagagaggcgggattcgattttcgaatcccggccatctcgggcgcgggcgcgagtgggagatagaggggagtgggcgctggagacgcggcgcacgcgcgggcgtggtcgacgtggcccggggaaggcggggacgtgggcgcggcggcggtttcggcgcggcggcgcgagcgcgagatcggcgggaggagggagacgggcccgacaggtgggccccacctgtcggcgaccccgagagaggaggcggcggggctgcctggctgggcctcggcctgcggccggcccagtaagggggagggaaggaaggagggaatgggccggcggcccattcgaaagaaaggaggaaaaagagaggaaaaagaaaaagaaaaaggaaaaaggattttccctggaattaaaatattgcttgctcaattttaattggttaaaattatttctagagctctgaaaattccactaaaaatcctgttaatgaatttcgacctgtagaactcaagaaaaagtcccacatgtcaaatccgattattatttgcattactttcttagggttttctcctgatttgcaccggtattttcttagggtcatttataaattacaattttggcttgggagggaaacttcggggtgtgacaaacctaccccccttaaacggaatctcggccccgagattcggaggagctggtgaagaggtgcggatgggcggctttcaactcatcttccctttcccaggttgcttcctcttctgaatgatgattccactgaactcggcaaaacctggtgaccttatttctggttcttctttcgctggtatcaagtatacgaaccggcttctccacataggttaggtcctcttggatatcaatgtgctccgaatcaacctgttcttcaggtacccttaagcacttctttaattgggacacatggaacacgtcatggatgccgatcatgttggatggaagttctagctgataagcaacttctccccttcgttccaaaattttgtatggtcccacgaagcgtggtgccaacttgccttttgtctggaaatggtgtactccccggagcggagtgacacgaagatacacgtaatctccttcctcaaaagtgagctcccttcgacggttatccgcgtagctcttctgtcgagactgagcaattctcaacctttccctgatgattctgactttctcttctacttccgctaatacctctgttccgaacagttgacgttcgcctgtctgatcccagaataaagcgcatatggctgtataaagcttccgaccgtataaagcttcaaacggtgccatctgtagactggcctggtagctgttgttgtacgagaattccgcatatggcaagcttttgtcccaagctccaccaaaatcaagagcgcaagctctcaacatatcttccaagattaaattgactcgctcggtctgaccatcagtttgcgggtgataggccgtgctgaaatttaaacgggtccccaattcttcctgtagcttctgccaaaattttgaggtgaactgactacctcggtcggatactatcttcttgggtaccccatgcaaacacatgatccttgcgaggtacaattctgccaatctctttccgtataggtggtatgcactggtataaagtgagccaccttggtgagtcgatccacgactacccagattgaatcatgacccgatgatgtccggggcagtcctgttataaagtccattccaatctcctctcatttccattccgggatttgaagaggttggagtaaacctgctggtctttggtgctctgccttcactcgttggcaaacatcgcagagtgcgacgaattcagctatttctctcctcatgctgacccaccaaaacttttctttgaggtcttgatacattttagtgctgcctgggtgaatggagtactgggtctgatgagcctcggtgagtatcagatccttcaattccttgtcgtcaggtacacacaatctttctaccatccagatcgtgccatgctcatcctcaaggaaatcccgagcctttccgactctcatgttctttttcagctctgctatttccggatcatttacttgagcggctctaacttgatccacgagcgtaggccgtgcctccagagcggctacgaacctgtgttcaacaattcccacgttgagatgcccaaactcctgccgcaattcctcacacatgccctcgatgcatagggcagtgcagtaacttttccggcttaaagcgtctgccaccacattggctttacccgggtggtagtgaatactcatgtcatagtctttgattagttccaaccatcttcgttgccggagatttaggtccggttgggtgaagatgtatttcagactcttatggtccgtatatatttcgcagcggttgccaatcagatagtgcctccagatcttcaaagcatgaaccactgctgccaattccaagtcatgcgttggataatttccttcgtgtggacgcaactgccgcgaggcatacgcaaccactctgccctcttgcattaggacacatccaagtccgtgacgggatgcatcacaatagacttggaagtctttcgtcgggtcgggcagaatcaaaactggtgcggatactaatttcttcttgagctcctcgaaactcttatcgcactcagctgtccatttaaacttctcatctttcttaagcaactgagtcatgggtcgggcgattctggagaaattttcgatgaatcggcggtaataacccgcaagtccaagaaaactccgaatctgcgacacggtcttaggtggggtccatttggtaactgactccacgttcgatgggtcgactgccacaccctgagctgtaatgacatgacccagaaattttacttccgtcaaccagaagtcacacttgttgaacttggcgtatagctggtgctccttcaacttctcgagtactagacggagatgttgttcatgttcctcctcggactttgaatagataagaatgtcgtcgatgaacaccacaacaaacttgtccagaaattccatgaacactttgttcatcagattcatgaagaatgcgggtgcgttggtaagtccgaaagacataaccgtgcactcatatagcccgtaccgagtggtgaaggccgtcttcggaatatcctcttcccggattctcaactggtggtagcctgatcacaggtctatcttagaaaacactttagctcctttcagttgatcaaacaaatcatcgattcgcggcaaagggtatttgttcttgatggtgacctcgttgagtgcgcgataatcaacgcacattctcttcgtcttatcctttttctccacaaaaatgaccggagcaccccaaggtgaagtacttggtcggatgtaccctttctgcagctgctcatcaacctgcttcttgacctcggctaattcgttggccgccattctgtacggtctcttgtaaatgggagcggttcccggtgccaagtcaatccggaattcaatctccctcttgggtggtatggtagtgaggtcttcagggaacacttctggatactcggagactatgggtatgtcttccaatttcttcaaattcttctcctcggtgaccactgggacttccatctcgatctggttcaaggagaccccttgctttggcggggctagtgatttgtacactaccgtttctcccttctcgttggtcaaggtgactgtgcgattcgcacaatcgatgactcccttgaacttagtcagccaatccatcccaagaatgacatctaggtatttggattcaagaagaatgaggttggctagaaatggtaatctttgaatttctattagcactgaagggctaaaactgactgaggttgaactattccccggggtatgaaccctcattggtgtgctaagctcttctttccttaacccatacatccccacaaatttctttgaaatgaaagaatgcgttgcaccagaatcaaaaagtactgttgcagggattgagttaacagggaacgtacctagtacgacctccggtgctgtttgtgcctcctctgcagacgcgtggttgacacgagcctggataaaccttggcccggcacgcctgggcttcgggcatttgtcagcgaagtggccaagctcaccacagttgaagcaggaccctggttttgctcccgtctccttcttggcttgcgcgggcgggcctgactgtgccggtgccatgggtgggcgtggagctgcaccgcggttgggctgacctccatggtggttctgactgccactagagccctggtggaagttgctggagttgaacgggcggtgctgacggacgatcatggtggtaggtccaccctgctgtccgggagtgaagcgcggcctctggtgacttccctgaggtgccctgaactgagcggccttcctcttcctgtccatcttgttgcgttgatcctcctggcggattgccttgtcaaccagccactcaaagtcagcgtagtccccggatatcagttggttggtcagctcatcatccaaacccgccatgaacttctcctgcttctcggcgtcggtgcggacatcctctggtgcatatcgcgcgaggcgattgaactcgtggaggtactctgtcacagtcctgttgccctgatggagtgcacgaaattccctcttcttttgtgccatgaccccatctggcacctgtgccttcctgaagctacggcagaactctacccaagtgacttcagtacccggtgggcgggtggccatgtgattgtcccaccaggctgacgcaggaccctgaagctggtgtgtggcgaaagcgaccttctcctgatcattgcactgcaggaggttcagcttcttctctatcgcatggagccagtcatttgcctccatagggttggtggtgctggagaaggtgggtggcctgacacgtaggaactcaggcaacttggactgagggggagggggaccaaactgctggtgctgctgttcggcgtgctgcatcatcctctggtgcatctgctggtgctgctgctgcatctgctgcatcatggctgccatcatctgagtctgatgtgccataacttgggctagcgtcggattctcaggaagtggtggcggaccattgccggaatcactgctggggtgcacaccattagcgcgttcttcgccgttgctgccctcgcctgttgcgcggctaccagtcctggtgtagaccatctggagggaaaagcagacgggggggaaagaagaaaaacagatgctcagaaactaagctttattacaaaggaattaaaactgcaattgttctgatctgaattaaaacacttaaagagcaagcaaaaatccttattaagacagccatatcataggcacatgatatcgaccgtcgactgaccccaaacaagcaacctaaacacaccaactaacaagcagaagctagacagtcgataaactaatgggaaaaacgagcctaatgctcggaacggctcctgcggtcggtggagtcgaaggcgtcctcctgctcgtcaccaagtccctctgagcgactcctggagcctggcagatacgtctcgccgctgccactgggagtagcagacaaccaacctccggtgccactggctggacctctggcggctgatgctggagcgaaggagagagcggactcgggagctggagctggagctgcaggaactgcgggcggaactggaggtgctgcgggagttgctgctggaggtgggttcctgggcgcaagctggatgcgcacgggtgccgtcgtagtcttgcggggcgtagtgcggatccggactcctcctggcgctggaagaccctttagctgagcgttctccttcttcaggcgcgctatctcgtccttcagagcaacgatcctcatgagcttcccatcgttcaaggccttggtcgccttgtgcaggtccgagtgcatcctgtccaatcccctcatcacagcacacatgtgaccaaaggtggtgtcgttctcgccagctgtcggacagaaggagctgacgccatcaccgttggctcgacgggggtggtagcggtacgccgtgtcgtggaagatgtagttgtcgcgctcccgtagtctggccatcatcaagtaggctgcctcctgacaggcgtgatctgctgtgcctcctgacgcctcaactgccatgttagcgaggcaagtccccacgtagccatggacctccaagcggacacggtgaggaagctcgccactaagcggcggaatagtcgtgtactccggcgcgttggggtagcccaccaccagtgtcatgcgtgccagctctgccacaaagtcgatcatgccttctccgcggtggttgggtgggtggccagccatctagagaagacaaaggagtaggatcaatgcatgctcaaatccaaatttaaataaggcaataaaagactcaaataagggaaacgaataagagcgaaatttttatgcatagatcattttgcatgagagcgaataaacaagacagacccacataacgataaaataatgagaaattagatatatactaataataacaaataaagcataaataccttgcaacccatgttcctgagctaggacctaatgcatttcacccatcaaaccccaactgactgacgaataaatcccaatagttttactaaaaccctagactgacccgttttgaaaaaactcacttaacgagcgaccaagattttttcccttgaaccacaaaaacagatcccaattttcccggaataaaatccaattgcaaagaacatatgcaatgaaaaggattcagagggctcttaggtttttccatttggcttgtcctacggtcaaggtcggctctgataccaacttgtcacgcccagaaattcccgaatagaattccaagcagaatgtgcattaaaatccccgtccaggaccagccggggtacacaaacaacaatgttgacattcagatccacgtcttacaaacatcataaaagtcttacaaaaatgcagcggaaaacaaaagataactggagctaatccttgactcgaactgcagcgggaacaccactccacaggcatcctcgacggcacggacaaagcctactcctcggagaacccgccatcggacacatactcgagctctgggattggggaaaatagagcaaggctgagtactacccactgtactcagcaagtcataccggaacgggggtatgatgcagggattccacaagggatagctaagcaggttcatttgcataaatactggcatttataaacaggaattgaatgcgaaaacagttgtaataattaagcagtattaatcatccactgtccaacgctacaccacgttgcgacaggcccaaccatccacctaaactatccaaattcaaaagattacactagggtgagactaattacggtgaatctggttgaccgcccataaccgcgggcacggctattcgaatagttttactctgatcagaggtgtacaactgtacccacaagacacagccccacgacacgtttccgtgcgccgacatgccaccacgacatcccggaaagaggccgtgacaggaccattcgcataaccccctctaaccaagcacaccacacctcaggtttcacccccactcctcgcaaggcagcgggcagtcccctctcgtgcctaggtgaatccggaagccgcataggccgtcgcagggcccatccaaactccatcacgcccacccttgcctggatgcgtcggctagaggaaagctacactacaagcccagccgttgcccacgctggcttgtggtaagtacgataagttcttccagggcatcccgcaaaccggtccttaactgccatgggtgcgaccagcaaaaccatgcacccacagcccaccatgcgattcattttaattaaccaacacccaagcggtgtcactagtccaacattatcatataaacctatagtctaggttttaaatgagatctccccattgtgtgctagttgaactaagcatggctaagcaaaccctagtcctaactctaatcatgttataacccaagctaacaaaggagcatggtatcaaattagcatggctgtaacaataggtaaccatcccatagtaatattgcaaaacaaatgcgatatttgaaagaaaacattaggacatttgcaatataggatcaatatgatcaagtgacaagcatgacttgccttgctctgctgctggagggacctcggcgactatctcgaagtacaccggagcgtcggaagagccggaatctagcgacatacaaggcaaacattgcaaacaggctataagactactgaaacagggaacaaaaccatttttaatggattctacacatttttcttgatttactgagacttgaatgggattaaacggagctcggatgaattagttatgaattttagaagattcactgtgtttattactataacaaaaatccttaaataatttattgcgcaatattaaccaggactgacgtcagcacgggggcgcggcgccgacatgcggggcccaccggtcagcgactcgggagagggaggaagggcgccgacacacgggacccactggtcagcggcgcgggagagaaggggcagcggcaccggctcggcttggctcacggccggccaaccgaccgcggcgacggcgacggcgtgcgcgcgaacgcgttgtcggcgacgacaaccggcggcgaaggcgacggcgcaaaggcgatgcggaggcggctgcgctaacggcggctaggaaggggaggaggcggcgataaaggcggccgccggctcggctcggcatcaaaaccgaccggccggctaggtctagcggcgacggcacgcggccaacgacggcggcgaccggcggcacgggaggcggcggcagtcgaaggcgacggcgcgcgacactaagaggagaggaaggggaaaagaagggaggggtgcctcaccgagggtggccggcgcggaggaagacgatggcgaacggcgacggcaagccacgggaggacgacgtcggcgagcggacgagcttcggggtgccctaaggaaggaggagagagggattaaagagagggagatgaaccacggcgaccggaaaccatggccgaaggcaccggtagaggtggtgctcacccgtgcgcgaggggatgagggctccggcgac

SEQ ID NO: 24515 - DNA, 4851 bp, Oryza sativa
ggttaaaattatttctagagctctgaaaattccactaaaaatcatgttaatgaatttcgacctgtagaactcaagaaaaagtcccacatgtcaaatccgattattatttgcattactttcttagggttttctcctgatttgcaccggtattttcttagggtcatttataaattacaattttggcttgggagggaaacttcgtggtgtgacactagtcctcctctttcgtttgccccttttcccgagctctctagtgcgccgtagagtcgccgccgcgtcgctttagccgccgccgtcgccggccatcctccggccacgctgcgccgccgcgtccgccgtcgttgccacctctcgttgccgccgttaggtgcgcacgggagcggggaagctcggccaccccttctccgccgtcgccggccgtcgtagcgccgttcccgccgttcaaccgagccgccgccgcctcttgcgtcgtcgccggccgtcatcgttcgtcgttggacgctttggtgagtaccgttgcgttcgtgacgtcgtcctctacgtgtagatgcccttggatagcccggccgatctctctatcgccggcgaggtcgtcgcccatgtcatgccggcgatgatgacgtcagcatgacgtcatgattcctcttttccagtttttttctaatagattaaatcttcggaaaatcataactaaataaccgtagcttcgtttcaggtggttcaagttgctaaatttttctaaaataaagatctacatattaaaattgtccataaattgaattaaatttatttaattctttttaatgggctttaattagatttaatcttgtaaaattcatattaaattcatttgaagtcagaatagggccgttcaagtctcataattcatctaaaatcatgttctacatgtttgtttattttatatgtattgtttatttggtttttattagtcttttactttgttttgcgtgttagcttgtcgtttccgtcgttgcgaaggttcgtgagtgcgctggaagtattcaagaagattaattgaagaccgattattgcaaggcaagtcacacagatcctaaacacaatcctttgagcatgttgatcctatatttaaattctctatttatttcaactgtgcatttattttcgaatgtcaccgggtggtgtgaacctattcctttgttatggccaatttgtattggatgccctattccttgataccttgggtaataaattgattagcttgaaccttatatattggattggttcagctaaatgctatatgtaagtttgcttagctatgcttagaaacattagctaactaaaggggttaattataagctatgttatattattattaattatggttacattaaatggtagctcacgatggttaatcgtgcgatgttaattaattgataattaaaacctggttaaggtgggttgtgagcatatggttttgatggttgtgctcatgacaattaaggaccggttcgcgagctactgttgtgaaacatttatcgtgccaaccacaagccagcgtgggcaacggctttatcttttgtatagcgtgattcattatagtgcgccagactgagaagtggcgagaagtccacgggggtcgctggggagtccatgccttgtttataagggggtgattatgatccaggaacggtgcactgttttgagttgtgttgtgcaaagggtattgtcacgatttccccctttgcaatgccgtggtggtatttcggggcatggcaacatgtgtggaatcgtgtcttgtgggtacaatggtacacctctggccagagtaaaactattcgaatagccgtgcccgcggttatgggcgagttaagcaatgtttttcgtggttagtctcacacctctcacaataattatagatgttatacctggtaataatttgcttagctcctggtttggagattagatctgtacagccgggtatggttgttcaggatggttgggcctatgcagcatgggtgtgatgttcagtgttgattaaaatttctgataaattactccactgttttacttctcttaaatctttgctaaatgctgcttttgcaaaagagcctatattatgccatcctttggaatccttgtgcacttgcatatttgctgtgtggcttgttgagtatgtcatatgctcattcttgcaataatcatcaaacctcagttgaagataaaggatccagaaggagaagacgtttggcttataccccagttgagctgcctgtgggagtggagctgaagccatcgctagaccgttaattccgctgctgttttcttttctttgtaagtatgtaacgttattattaagatggatttgtatattaaattgtcagtttgtgtacctcggctgatgcctggacgaggattttatgcacaaattagttcggaaattattagtgaatttccgggcgtgacatctgccccgcgtgcaatcaatagggggaattattccccgggatcccctccccctttccccccatttttccctccctctctccctcggattcgtttggaaacccctcccctaacctcgccggaccgtggggctgccgcgtgggccccactcccgtggacccggtccgcgcgcccctcccctcggctgacgcaataaatcctttttttaattaaaatttaaatgaagaaattcgcaaatattcatttaaagagcatataaacttcaaatgaccataacttggccatttgaactcggaattggaccgttcaagtctctaatttttccttaagaagtcaagaacccatttttgtgctttgttcctgcttgttatatggagtttattagagtaaaagccttttcttttccgttggtcgtgtagacgctgcagcttcggaagacccgctcttcttggaagttgaagcccacgtttgggaaagcgagcaaggcaagtcacatcatctttgaacatattgaatcccagtttgtaaaattatgttgatttaaattattgcattatcgctttatttaaattcccgccgcccgtcagcgagggtggcgggcgggcccgcccgtcagcggcgcgcgcgcggggaggaggccgatgggtcgcgggggagaggagagagagggagggaggtgggccgagccggcccaagagggggaagggggggaggaaaaagacttttagggtttttctttttataaaaccactttaactttgtttatttcttcttatttattttttgtgctctgaaaattccactaaaatttatttacgcattttaggcttttaggaaatatacaaaaatcctccaagccttatttgacttttaaatttgcacattttaattgttggaggctttcacatggattttacttattctttgcataatttcgaggatgtattttagagtcgttttgggacgtgacaaacctaccccccttaaacggaatctcgaccccgagattcggaagaactggcgaagagatcgggatgggctgtcttcagctcgtcttcgcgctcccaggtagcttcttcttcggcgtggttgctccactggaccttgcaaaaacggattacccggttcctggtcctgcgctccatggtgtccaggatttttactggcctctccacgtaggtcaagtcttcgcgaacttcaatttgctctgagtcggcctgctcggatggcactcggagacatttcttgagttgtgacacatggaacacatcatgcacgttgcccaaggaggcgggcagctccaactggtaggcgacttctgtcgcgtcccaaatcgactctaaaatacatcctcgaaattatgcaaagaataagtaaaatccatgtgaaagcctccaacaattaaaatgtgcaaagctaaaagtcaaataaggcttggaggatttttgtatatttcctaaaagcctaaaatgcgtaaataaattttagtggaattttcagagcacaaataataattaagaagaaataaacaaagttaaagtggttttataaaaagaaaaatccctaaaagtcctttttcccccttcctctattgggccggctcggcccagctccctccctctctctcctctcccctgaggcccatcggccttcccccgcgcgcgcgtcgctgactagcgggcccgcccgccaccctcgctgacgggtggggcccacccgtcatcccctacctcgtgccgcgcccgccgcctcgcccgtgccctagcgccgccgccgccgcggattccgccgcatcccgccgcccccgcgcgcaataaagaggggggaaatcactccccgtgattccctccctctttccccccacttttccctctctctctctcggattcgtttggaaatcctcccgcaaacttcgccggcgtcattgatggagccgagatcgccgcgccggtttccttcccctccggccgccctctctcactcccaacactatttaagcactccccgtgcctccctcctccgtttccgacccttgccgctttctctccccgtcggaatcgagctcgcgccgtcgtcctctctctccgccgttgccgccgagcttcggttcgccgccgtcgtcgccccggacctcctcccgcttcggcatcgcctccttcggcttcgccgcgtcctcgtcgacctcgtccaccccttcgtttcgcccgccgaccgccggaacgccgccgtcctcgtcgacccgagccgcgccgccgcctctctccgcttcggtcgccgttcccgtcatcgccgtcgacccggggtgagccgaggaccgccatctcgcttcccccttccctcccctctctcgggcgccgctccgtcgcgccggaggtcgccgccggcgaccatcggggcgcgggcgcg

SEQ ID NO: 24516 - DNA, 12538 bp, Oryza sativa
ttcctgcagccctgaaagagcatataaacttcaaatggccataacttggccatttgaactcggaattggactgttcaagtctctaatttttccttaagaagtcaagaacccattttgtgctttgtttctacttgttatatggagtttattagagtaaaagccttttcttttcggttggtcgtgtagacgctgcagcttcggaagatccgctcttcgtggaagttgaagccggcgtttgggaaagcgagcaaggcaagtcacatcatctttgaacatattgaatcccagtttataaaattatgttgatttaaattattgcattatcgctttatttaaattcccgcgttttcactgttttatttagccatgcctatttacctttgttatgaccttaatattgttattgttattatttccttgttcaccctagattaaacaaaaccccaactagtggacactctactcatggtaccactagtatgattttaggtagatgcttcgcttttaattaggtaacattaggcggttttacaactctagactttgggaatattcatatcacctggacactgtggaatggtttggttattgtggaattggattcacaccgcccccactattcaaaatccccaaaaatggttttaggctgggctcggggtgcatggttttgatagtagcacctcggccatataaggaccggtcttcgggcctctgttgcaaagcactaccgtacttccacatgtctagtgggtaaggcttagtttgtggctcagtctggttataaacaaaagtacacggatagaggtggatgaagtcgggagtcaatggacattctccagggcaaatgaaggctacacgagctgcggcccggtagtcgagatgtcatggcacagggccggtgtcctgctgctaggggctcagtcctgcctgcctgtcccgggtgttccggccgtaggtgggattgggtcggtactcttgtctatggctaggatgggttggaaactatgtcacgtctttcgtctgtataccgtggtggtatgtggcacgtggttacacgtgaggaagatgtgtcttgtgggtaaagatgtacacctctgatcagagtaaaatctattcgaatagccgcgccctcggttatgggcaagccgagcaatgtacccaagttagtgttttaattcttaaaaacctgcttaacaactaaaatgtggaatggttggcctgggttggcttgggacgagctgggacccagggtcgggttgccagttcggtctgaatcatcgtaggccttgggttaaggcaggttcgtgtgggttcacggccttgataaataatcttgtatagttctagaatcgtgcttacaaaatagctttgagcaactaaatagctttaaatgctgtttactgcaaccctaaccctttatagtataactcctttgtactcccttgcatttattctgcacttgtgggtgtgtcttgttgagtacggtggttgtactcagtcttgctcaatttttcccaaacccagaagaggagttcctgcaagatgaaggctttggtgtctagctcgtgcctgccgtcaagcgcctgtggtcgtcgccctagtcttccgttgtttctcgtttgtctttgtgtgtgctgggccttcgtcgcccatgtaataaattaactatttacgcttccgcttgttaaactctgaattgtatcaacttttggtgtaccttgcctcctgggacaaggattaatgcacgcacgtaaggaacgcccgttgggttatttccggtcgtgacagaggttcatggagaacttctccaaaatcgctcgacccatgacacagttgttgaagaaagaagagaaatttgtgtggagcccgcaatgtgagaaggcgttcagaactctcaaagaaaagctggttgcctcgccagtgttaatcttgccggatactcgcaaggacttcatagtgtattgtgacgcttcgcgccaaggattggggtgcgtgctcatgcaggacggtcatgtggtggcctatgcctcacgccagcttcgacctcatgaaggcaactaccctacccatgacttggaattagccgcggtggttcatgctctaaaaatctggcggcactatctcattgggaatcgctgtgaaatatatactgatcataagagtttgaaatacatcttcacccagtcggatctgaatcttcggcaaaggagatggttagaactcatcaaggattatgatgtgggaattcactatcatcctggtaaggccaacgtggttgccgacgctctaagtcgaaaaagccattgcaacactcttaacatccgtggcattccaccggaacttaatcaacagatggcagccctgaacctaaacatagttagtcgcggattcttggctgcgttggaagccaagcctaccttgctcgatcaaatccgcgaggctcagaagaacgatccggacatgcatggactcctcaagaatatgaaacagggtaaagccgctggtttcacagaggatgaacacggaaccctatggaatggaaatcgggtatgcgttccagatgtcagggaacttaaacagttgatacttcaggaagctcacgaaagtccttattccatccaccctggcagcacgaagatgtacttagacttgaaggagaaatactggtgggttagtatgaagcgtgaaattgcagagttcgtggccctttgtgatgtgtgccagcgtgtcaaggcagagcaccaacgaccggccggacttctccaacctctccaagtacctgaatggaaatgggatgaaattgggatggatttcatcaccggacttccaaaaacccaaggtggatatgattctatatgggtagttgtggatcgattaaccaaggtagctcgattcattcctgtgaagaccacctatagagggaacaaactagccgaactctacttcgctaggatcgtaagtctccatggcgttcctaagaaaatcgtatctgataggggaagccaattcacctctcacttttggaagaagctccaagaagagctgggtacccgattaaacttcagcacagcgtatcacctgcagacagatgggcagaccgagcgtctaaatcagatcctagaagatatgcttcgcgcatgtgtcctggatttcgagaagacctgggataagagtctcccctatgccgagttctcctacaacaacagctatcaagccagcatacaaatggcaccttatgaagcgttgtatgggcgcaaatgccggacaccgctaatgtgggatcaagttggggaaagccaagtgttcgggactgatatcctgagagaagctgaagctaaagtcagaaccattcgggataatctaaaggtggcacggtcccggcagaaaagttatgcagataaccgtcgccgtgacctggaattcgcagtggacgattttgtatatcttcgggtcacgccattgcgaggtgtacacaggtttcggacaaaagggaagctcgcacctcggtatgtgggtcctttccgtatcgttgctcgacgcggagaagtcgcttaccaattggagctgcccgcctccttgggcaacgtgcataatgtgttccatgtgtcgcaactcaagaaatgccttcgagtgccatccgagcaggccgactcagagcaaattgaagttcgcgaagacttgacctacgtggagaggccagtgaagatcctggacaccatggagcgcaggaccaggaaccgggtaatccgtttttgcaaggaccagtggagcaaccacgccgaagaagaagctacctgggagcgcgaagacgagctgaaggcagcccatccagatctcttcgccagttcttccgaatctcggggtcgagattccgtttaaggggggtaggtttgtcgcgtcccaaatcgactctaaaatacatcctcgaaattatgcaaagatccatgtgaaagcctccaacaattaaaatgtgcaaagctaaaagtcaaataaggcttggaggatttttgtatatttcctaaaagcctaaaatgcgtaaataaattttagtggaattttcagagcacaaataataattaagaagaaataaacaaagttaaagtggttttataaaaagaaaaatccctaaaagtcctttttcccccttcctctcttgggccggctcggcccagctccctccctctctctcctctcccccgcggcccatcggccttcccccgcgcgcgcgtcactgacgggcgggcccgcccgccaccctcgctgacgggtggggcccacccgtcatcccctacctcgcgccgcgcccgccgcctcgcccgtgccctagcgccgccgccgccgcggattccgccgcatcccgccgtccccgcgcgcaataaagagggggaaatcattccccgtgattccctctccctttcccccccacttttccctctctctctccctcggattcgtttggaaactctcccgcaaacttcgccggcgcatcaatggcggccggatcttccacgaccgattccccctcatccggccgctctctcctcctcccaacactacataaacactccccatgcctccctccttcgtttccgccactcgccgctctctctccccgtcggaatcgagctcgcaacgtcgtcctctctctccgccgtcgccgccgagctccggtccgccgccgtcgtcgcaccgggcctcctcccgtttcggcatcgccttcttcgggttcgccgcgtcctcgccaatctcgtccaccccttcgtttcgcccgccgaccgccggaacgccgccgtcctcgtcgacccgagccgcgccgccccctttctccgcttcggtcgccgttcccgtcgtcgccgtcgacccggggtgagccatggaccgcccatttcgcttcccccttccctcccctctctcgggcgccgctccgtcgcgccggaggtcgccgccggcgaccatcggggcgcgggcgcgccgcctcccgtcggctgtgccggcgaggccgccttcgggcgcgccccgcggctgccatgtggggcccggtcgtcagccgcccgcgtcctcgggtgcggctgacgcgtgggacccacggcgccggccggcgcaagccgcgtgcacccggtccaccgtggaccgtgaggctgccgcgtgggccccactcccgtggacccggtccgcgcgcccctcccctcggctgacgcaataaatccgattttaaattaaaatttaaatgaagaaattcgcaaatatccatttaaagagcatataaacttcaaatggccatatcttggccatttgaactcggaattggaccgttcaagtctctaatttttccttaagaagtcaagaacccatttttgtgctttgtttctgcttgttatatggagtttagtagagtaaaagccttttcttttccgttggtcgtgtagacgctgcagcttcggaagatccgctcttcgtggaagttgaagccggcgtttgggaaagcgagcaaggcaagtcacatcatctttgaacatattgaatcccagtttgtaaaattatgttgatttaaattattgcattatcgctttatttaaattcccgcgttatcactgttttatttagccatgcctatttacctttgttatgaccttattattgttattgttattatttctttgttcaccctagattaaacaaaaccccaactagtggacactctactcatggtaccactagtatgattataggtagatgcttcgcttttaattaggtaacattaggcggttttacaactctagactttgggaatattcatatcacctggacactgtggaattgttggagtattgtggaattggattcacaccgccccctctattcaaaatccccaaaaatggtttaggctgggctcggggcgcatggttttgatagtagcacctcggccatataaggaccggtgttcgggcctctgttgcaaagcactaccgtacttccacatgtctagtgggtaaggcttagtttgtggctcagtctagttataaacaaaagtacacggatggaggtggatgaagtcgggggtcgatggacattctccagggcaaatgaaggctacacgagctgcggcccggtagtcgagatgtcatggcacagggccggtgtcctgctgctaggggctcagtcctgcctgcctgtcccgggggttccggccgtaggtgggattgggtcggtactcttgtctatggctaggatgggttggaaactatgtcacgtcttccgtctgtataccgtggtggtatgtggcacgtggttacacgtgaggaagatgtgtcttgtgggtaaagatgtacacctctgatcagagtaaaatctattcgaatagccgcgccctcggttatgggcaagccgagcaatgtacccaagttagtgttttaattcttaaaacctgcttaacaactaaaatgtggaatggttggcctgggttggcttgggacgagctgggacccagggtcgggttgccagttcggtctgaatcatcgtaggccttgggttaaggcaggttcgtgtgggttcacggccttgataaataatattgtttagttctagaatcgtgtttacaaaatagccctgagcaactaaatatctttaaatgctgtttactgcaaccctaacccctttatggtataactcctttgtactcccttgcatttattctgcacttgtgggtgtgtcttgttgagtacggtggttgtactcagtcttgctcaatttttcccaaccccagaagaggagttccaggaggatgaaggcttcggtgtctagctcgtgcctgccgtcaagcgcctgtggtcgtcgccctagtcttccgctgtttctcgtttgtctctgtgtgtgctgggccttcgttgcccatgtaataagttatctatttacgcttccgcttgttaaactctgaattgtatcaacttttggtgtaccttgcctcctgggacaaggattaatgcacgcacgtaaggaatgcccgttgggttatttccggtcgtgacaagttggtatcagagcccccttgaccctaggacgagccgtagatcccaagccttagcaatattttggaaataaaaatcctttgtatttgtgaaaatcctctagtctctctctgtcttgctgcttcatttatcgccaaaatctgacctttaaaattttgcttttctttttgtttttgtttgtagatggccggcagcgtcagccgtcgtggtttggacatgactggcttcgtcttggagctgcggggcatgtgcgtggtcctggggcatccacatggagtggactaccaggccaggccgcttccggagcaggagggtgacgatgcggagccccacgctgcttgggaggtcactgcagtgatcctcgctggctctcccgagcggacttcgctgacagtcaccgcgggtggggattccttccccgccgcttgccagagcgccgctctcctcgccatcggcactcttcaccagcgctacccggacgagttgcagcactcgccctaccgctaccaccctcgtcgcggaggagcccgcgactacgccaccttccgggatgctagctcggaggatgacgctaccatcgtgcacctggcgcgcatggtggaggcgtacgacgcggctcgtatcgacttccatcagatggtgcgtcgtgggatggtcgagaacaacatgaagatcctggagctgcgtcaggagaacctgcagctcaagaaggacctagatgcggtggaggcgcagctgcatcagctcaagatcgcccagggagagatctgccgccccaagcatcgccgcgtctaccgcagccagaagatcaccgcccgcaagagcacctccaggcccgagcttgttcgtcagtccctggcgtggacttgcttcgtggagacccctcgtgccgagcccgcgcccgtggttccccaggagggggaagcctccggcgttggtagcacggaggatgcgctgttgctcaccttccgtcctggcccgtcacagcagtagacgagcagttagtaggcttgcgcgtgtgttctttctcgtttgtcttcttgttgggttgtgtggggcacggttatgccggtgtgtggtgtaactttgtcggagcctgtctttattttatttgtttaagcaacttgaactttaatgaaccaatttaatagcagtaataaattcaagaattatggtagtcgtgggtggttagctttaattgtcagctctctctgtttgctggttctatgtggggttttcagatggtgatgaccaggagaaatgctgccaccagtgatggcaaccaacccgaagacagcaaccacaacaaccatggcagcccacctccacctcctcctccgcctccaccaccaccaccagataccaacgccattctcacccaaatcctcgcccagcaggccaacatgatgactgcttttctccaccacctccaaaatccgccacaacataatgctccaccaccacctccccaacactctaaactcgccgagttcctccgcatctgtccacctaccttctctagctccaacaaccccgtggatgcgttggattggttgcatgccgtggggaaaaagctagacactgtgcagtgcagcgatgaggagaaagtcatcttcgccgcccaccagctgcagggacccgcatctctatggtgggaccatttccaggctacgcagccagagggacagcctattacatgggctcgcttcaccgccgctttccgaagaacccatgtgcccgccggagtcgtggcccttaagaaaagggaattccgagagttgaagcaaggcaaccgctccgtgatggagtatttgcacgagttcaacaacctggcccgttacgctccggaggatgtgcgggaagatgaggagaagcaagagaagttcctggcaggaatggaccctgagctgtccgtctgtctagtctccggggattatccggatttccaacgtctggtggacaagagcatccgcttggaagccaagcacaaggaactggagtcgcacaagcgccgcttggcgaatttccacaaccaacagggtgctaaccaaagggtccgctacaccaatccctatccagggggatcctcctcgcagcagcaacagcagcagcagcaacctcgctccgcgcctcgacctcaattcgtggtgcgcgtcccacagccgcagcaggagcagaatcaacaagggactcgtgcgccccgtcctcctccaccgactgtgcagcctggtcaaggccgcagggacgctcaaggtccgcagcgtctgtgcttcaactgcttcgagcccgggcactttgcggataaatgcccgaagccaaggcgtcagcaaggccaagcgcctccccgccccaacaacggtggtaaggacgtcattcggggtcgtgtgaaccatgtgacggccgaggacgtgctgacaactccagacgtcatcgttggtacgttcctcattcattccatccctgctaccattttgttcgactctggagcttcccactcatttatatctgtgccattcgtggggagaaatcagttgggggtagaaaggcttagaaaccctctgctcatcaccacccctggaggggttatgacagcaaagtattatagccctgccgtccctatagaaattcaggggattccttttccctcggatctgattctgctaggcaccaagaacttggatgtgatccttgggatgaattggttggctcaattccaaggagtagtggattgcgcgagacgcactgtcactctgtaccgagggccggaacaaccggttgttttctttgcacccccaacctcagtcagaagttcagaacttcatcagatagaactgtcagaaattcccatcgtcagagagttcggagacgtgtttccggaagaactacctggtatgccgcctaagcgagagattgagttccggatagatcttgctccaggaaccgctcctctgtacaagcgaccctaccgtatggcagcaaatgaattggccgaagttaagaaacagttggaagagctgaaagaaaaggggtatatacgtccaagtacttccccctggggtgctcctgtgatttttgtggagaagaaagacaagacgaagaggatgtgcgttgactacagagctctcaatgaagtcaccatcaaaaacaagtaccctcttccccggatcgatgatctgttcaatcagcttaaaggtgccactgtattctccaagattgatcttcgttccggatatcaccaattacgtattcgcgaagaagatattccgaagaccgcattcaccacgcgatacggactgtatgaattcacggtgatgtcgttcggtttaaccaatgctcctgccttcttcatgaacttaatgaacaaagtgttcatggaatacttggataagtttgtggtggttttcattgatgacattctgatatactcacaatcagaggaagaccatcagcaccatctccgtctggtattgggaaagctgcgggaacatcaattgtatgccaaacttagcaagtgtgagttctggttgtccgaagtcaaattcttagggcacgtgatatctgctaaaggagttgctgtggaccccgaaacagtgatcgccgtcaccgattggaagcaacccaagacagtcactcaagttcgcagtttcttaggtttggcaggatactaccgaaggttcatcgagaacttctccaaaatcgctcgacccatgacacagttgttgaagaaagaagagaaatttgtgtggagcccgcaatgcgagaaggcgtttcaaactctcaaagaaaagctggtttcctcgccggtgttaatcttgccagatactcacaaggacttcatggtgtattgtgacgcttcgcgccaaggataggggtgcgtgctcatgcaggatggttatgtggtggcctatgcctcacgccagcttcggcctcatgaaggcaactaccctactcatgatttggagttagccgcggtggttcatgccctaaaaatctggtggcactatctcattgggaatcgctgtgaaatatatactgatcataagagtttgaaatacatcttcactcagtcggatctgaatcttcggcaaaggagatggttagaactcatcaaggattatgatgtgggaattcactatcatcctggtaaggccaacgtggtcgccgacgctctaagtcgaaagagccattgcaacactcttaacgtccgtggcattccaccggaacttaatcaacagatggaagccctgaacctaagcatagttagtcgtggattcttggctacgctggaagccaagcctaccttgctcgatcaaatctgcaaggctcagaagaatgacccggatatgcatgggctcctcaagaatatgaaacagggtaaagccgctggtttcacagaggatgaacatggaaccctatggaacggaaatcgggtatgcgttccagataacagagaacttaaggaagatgtacctagacatttcgggtatgctgatacttcaggaagctcacgaaagtccttattccatccaccctggcagtacgaagatgtacctagacttgaaggagaaatactggtgggttagtatgaagcgggaaattgcagagttcgtggccctctgtgatgtgtgccagcgtgtcaaggcagagcaccaacgaccggccggacttctccaacctctccaagtaccagaatggaaatgggatgaaattgggatggattttatcaccggacttccaaaaacccaaggcggatatgattctatatgggtagtcgtggatcgactaaccaaggtagcacggttcattcccgtaaagaccacctatggagggaacaaactagctgaactctacttcgctaggatcgtcagtctgcatggcgtccccaagaaaattgtatctgatcggggaagccagttcacctctcacttttggaagaagctccaagaagagctgggtacccgattaaatttcagcaccgcgtatcacccgcagacagatggacagaccgagcgtctaaatcagatcctagaggatatgcttcgcgcatgtgtcctagatttcgggaagacctgggataagagtctcccctatgccgagttctcctacaataacagttatcaagccagcatacaaatggcaccttatgaagcgttgtatgggcgcaaatgccggacaccgctattgtgggaccaagttggagaaagccaagtgttcgggactgatatcctgagagaagctgaagcgaaggtcagaaccattcgggataatctaaagatggcacagtcccggcagaaaagttatgcagataaccgtcgccgtgacctggaattcgcagcggatgactttgtgtatgttcgggtcacgccattgcgaggtgtacacaggtttcggacaaaggggaagctcgcacctcggtatgtgggtcctttccgtatcactgctcggcgcggagaagttgtcacgaccggaaataacccaacgggcattccttacgtgggtgcattaatccttgt

SEQ ID NO: 24517 - DNA, 2307 bp, Oryza sativa
gcagtaataattcaagaattatggtagtctgggtggttaccttaattgtcagctctctctgtttggtggttctgtgtggggttttcagatggtgagaccaggaaaaatgctgccaccagtgatggcaaccaacccgaaggcagcaaccacaacacccatggcagcccacctccacctcctcgtccgcctccaccaccaccaccagataccaatgccattctcacccaaatcctcgcccagcaggccaacatgatgactgcttttctccaccacctccaaaatccgccacaacataatgctccaccaccacctccccaacactctaaactcgccgagttcctccgcatccgtccacctaccttctctagctccaacaaccccgtggatgcgttggattggttgcatgccgtggggaaaaagctagacactgtggagtgcagcgatgaggagaaagtcatcttcgccgcccatcagctgcaggggcccgcatctctatggtgggaccatttccaggctacgcagccagagggacagcctattacttgggcccgtttcaccgccgctttccggagaacccatgtgcccgccggagtcgtggcccttaagaaaagggaattccgagagttgaagcaaggcaaccgctccgtgatggagtatttgcatgagttcaacaacctggcccgttacgccccggaggatgtgcgggaagatgaggagaagcaagagaagttcttggcaggaatggaccctgagctgtccgtccgtctagtctccggggactatctggatttccaacgtctggtggacaagagcatccgcttggaagccaagcacaaggaactggagtcgcacaagcgccgcttggcgaatttccgcaatcaacagggagctaaccaaagggtccgctacaccaatccctatccagggggatcctcctcgcagcagcaacaacagcagcagcaacctcgctccgcgccccgccctcaattcgtggtgcgcgtcccacagccgcagcaacagcagagtcagcaagggacccgtgcgcctcgtcctcctacgccaactgtgcagcctggccaaggccgcagggacgcttcaggtccgcagcgtctgtgcttcaattgcttcgagcccgggcactttgcggataaatgcccaaagccgaggcatcagcaaggccaagcgcctccctgctccaacaacggtggtaaggatgtcattcggggtcgtgtgaaccatgtgacggccgaggacgtgctgacaactccagacgtcatcgttggtacgttcctcattcattccatccctgctaccattttgttcgactctggagcttcccactcgtttatatctgtgccattcatggggagaaatcagttggggatagaaaggcttaggaaccctctgctcatcaccacccctggaggggttatgacagcaaagtactatagccctgccgtccctatagaaattcaggggattccttttccctcggatctgattctgctagacaccaagaacttggatgtgatccttgggatgaattggttggctcaattccaaggagtagtggattgtgcgagacgcaccgtcactctgtaccgagggccgggacaaccggttgttttctttgcacccccaacctctgtcagtagttcagaactgcatcagataggtctgtcagaaatccccatagtcagagagttcggagacgtgtttccggaagaactacctggtatgccgcccaagcgagagattgagttccagatagatcttgctccaggaaccactcctctgtgcaagcgaccctaccgtatggcagcaaatgaactggccgaagtcaagaaacagctggaagagttgaaagaaaaggggtacatacgtccgagcacttccccctggggtgctcctgtgatttttgtggagaagaaagacaagacgaagaggatgtgcgttgactatagagctctcaatgaagtcaccataaaaaacaagtaccctcttccccggatcgatgatctgttcgatcagcttaaaggtgccactgtattttccaagattgatcttcgttccggatatcaccaactgcgtattcgtgatgaagatattccgaagaccgcattcaccacgcgatacggactgtatgaattcacggtgatgtcattcggtttaaccaatgcacccgccttcttcatgaacttaatgaacaaagtgttcatggaatacttggataaatttgttgtggttttcattgatgacattctgatatactcacaatccgaggaagaccatcagcaccatctcggt

SEQ ID NO: 24518 - DNA, 2550 bp, Oryza sativa
tcctgcagccccggccgattcttggcccaatgtggtgaggcatcggctgttgatgctttgagggtcatattgtttcctttgtctttgtctgggtcgacattcacgtggttttcttcgttgccttataattctgttcatggctgggccaatttggagaaacagtttcatagttacttctacagtgggaaccatgagatgagctttccgatttgacagcagttagacagaggcatgatgaaactatgcaagattacatccagaggttcagagatatgaggaatagatgctatagtttggttttgaccgattcctagttggccgatcttgcattccagggtttgataactccgatcaaggagaagttttcgtctcaagattttgaaagcttgtctcatcttgcacagaaggtagccctacatgagcaaaggtttgcagaggctaagaaaaactttaaaaaggtcaaccatttttatccttatatgtatgaatatgaagaagaatatgactctgaggtagcagcagccgagtgggcgaggagctaaaaggttgtgacatgtcagtgggttaagagtcttggaaaagaggaaaaatatgattttgatatcaccaaggctgacaagatttttgatttgctacttcgggagaaacaaattcaacttcctgctggttatataattccattagctgaggagctaggggagctagggaaaaggaaatattgcaaatggcataattctgggtctcatgctaccaatgattgcaaagttttccggcaacaaatccagttggctattgagggaggaaagattaaattcgatgattcaaagaagccgatgaaggtagatggccatccttttcctgtcaacatgatgcatatgtctgggagagtagtcgatgggggaaaaatcggagttctcagctaaattcagctaggattatcaataaatattaaagaaggcatgataagtagcaggaaaggtattttgagcaagatgatggtggctttgacccacattgggattgtgagatttttaggttttgctggaacgaagggatgagactgccatcgatagaagattgccccaggtgcagtgacaatgcaggggtccaagccgatcttacaatagaggaaatcggctgaatcaaaaaatagtgcctgttcatcagaggttgggtccagtacaccaggatcgttttcaagatgaggatgaagacgggaaatcacatggtgcccttctggtatttttactaagaatcagaagagaagtgtccagaggatgaggaacatggagcgttttcaagaagtgcaacaagaaatcaaccatcggctgaaaaagacaaaacaagaatggcgcattaagagcaaagttatagcaaccgatgaggttgaagccaacaaagcagagtggttgctcaagggcaaagctgttgcatcttcatcggtgaatatggtttttatgttgcctgtggaatatgaggctaaacaagccgatgttgatgtggaggaaacctctactagattgattttgtcaccagagcaagcaatctgtgagaagccagaggggacagaaaatcggcatctcaagccgttgtatgttaacagattcgtcaacgggaagccgatgtccaagatgatggttgatggtggagcggctataaatttgatgccatatgctacattcaggaagctgggtagaaatacaaatgatctcatcaagacaaacatgattctcaaagattttggtggcaatccttcggaaaccaagggagttctaaatgtggagttgacagtaggcagcaaaactgttcctacaacatttttgtcatcgatgggaagggttcctatagcctgttgcttggaagggattggattcatgcaaattgttgtattccttcgaccatgcaccagtgcttgattcaatggcaaggtgacaagattgagatcatgccagccgacaggtcagttaatgttgctagtgccaatttagctctttgggcgatggatgggattgattgcctgtctggaaaagtttgggaaggagattatctaaaagtgtccgattgtgatatacagccaattgaagatggagagcccaaattattactttgaggacgtcgtggagggttcaaatttctacaccaaggacacggtggatgatctcgatggcaagctaggacagggtttcatgttggctgacaatctggaagaagttgatataggtccaggggcgataggccaaggccgacatttatcggtaagaatttatctgcagaattcagaaccaagttgatagagaatttgaaagaatatagagattgctttgcttgggagtattatgagatgccaggactcacctgatcgattgttgaacattggcttcctattaaaccaggatacaaaccatatcagcaacccccaaggagatgtaaagccgatatgtatgatgctatcaaggctgaaattactcatttatattatgctggttttattaggccgtgccgatatgctgagtgggtttccaacatagtcccggtcatcaagtaaaacgg

SEQ ID NO: 24519 - DNA, 665 bp, Oryza sativa
agagttgtcaagtcgtcatttatcggattcttgctatattcggttaaggaaattgatctactaaaggaagcttatccagaagagaccgagtttaaagagaatacggcatggtaagttatctattaattaggaatagtttgttagtttccttgtatctttaggaaagtgtgtttagtgtcctataaggactttatcttttccttttatccttaggaagctctctttcttgtccgacaaggacttgtatcaacccatgtgtataaatatgtacacccggggtctatgtaatctatcctcacgatcaatacaatttggcgcatcgccacccttttatttctacttttgtttttacgtttcggcggaacttggcacccgacgcggggctgcatcgtcttcgatctagggcgaagatataagtccaatgttccgccggtccaggcaattgtatcgtctacgtcagcgtcgttcaagactgcatcagtacattcgacctcttggattgctctggtttggatgatatatttgcctaactatttatcatatgtctctgttaatctagtcataacatatcaatttagctttatcggttgcttctcattttagggtttctgccggtatcgactacatcgcgttgctagattagattagcttagacatctaccacc

SEQ ID NO: 24520 - DNA, 1901 bp, Oryza sativa
gatccggacatgcatggactcctcaagaatatgaaccagggtaaagccgctggtttcacagaggatgaacacggaaccctatggaatggaaatcgggtatgcgttccagacgtcagggaacttaaacagttgatacttcaggaagctcacgaaagtccttattccatccaccctggcagtacgaagatgtacttagacttgaaggagaaatactggtaggttagtatgaagcgggaaattgcagagttcgtggccctttgtgatgtgtgccagcgtgtcaaggcagagcaccaacgaccggccggacttctccaacctctccaagtaccagaatggaaaagggatgaaattgggatggatttcatcaccggacttccaaaaacccaaggtggatatgattctatatgggtagttgtggatcgattaaccaaggtagcacggttcattcccgtaaagaccacctatggagggaacaaactagctgaactctacttcgctaggatcgtaagtctgcatggcgtccccaagaaaatcgtatctgataggggaagccaattcacctctcacttttggaagaagctccaagaagagctgggtacccgattaaacttcagcaccgcataccacccgcagacagatgggcagaccgagcgtctaaatcagatcctagaagatatgcttcgcgcatgtgtcctggatttcgggaagacctgggataagagtctcccctatgccgagttctcctacaataacagctaccaagccagtatacaaatggcaccttatgaagcgttgtatggacgcaagtgccggacaccgctattgtgggaccaagttggggaaagccaagtgttcgggactgatatcctgagacaagctgaagcgaaggtcagaaccattcgggataatctaaaggtggcacagtcccggcagaaaagttatgcagataaccatcgccgtgacctggaattcgcagtggatgactttgtgtaccttcgggtcacaccattgcgagctgtacacagctttcggacaaaagggaagctcgcacctcggttcgtgggtcctttccgtatcattgctcggcgcggagaagtcgcttaccagctggaactgcccgcctccttgggcaacgtgcatgatgtgttccatgtgtcgcaactcaagaaatgccttcgagtgccatccgagcaggccgactcagagcaaattgaagttcgcgaagacttgacctacgtggagaggccagttaaaatcctggacgccatggagcgcaggaccaggagccgggtaatccgtttttgcaaggtccagtggagcaaccacgccgaggaagaagctacttgggagcgtgaagacgagctgaaggcagcccatcccgatctcttcgccagtccttctgaatctcggggtcgagattccgtttaagggggtaggtttgtcgcgtcccaaatcgactctaaaatacatcctcgaaattgtgcatagaattagtaaaatccatgtgaaagcctccaacaattaaaatgtgcaaagttaaaagtcaaataaggcttggaggatttttgtatatttcctaaaagcctaaaatgtgtaaataaattttagtggaattttcagagcacaaataataattaagaagaaataaacaaagttaaaaaggttttataaaaagaaaaatcctaaaaagtctttccccccctttttcccttcttgggccggctcggcccagctccctccctctctctcctctcccccccgcggcccatccggccttcccccgcacgcgcgccgctgacgggcgggcccgcccgccaccctcgctgacgggtggggcccacccgtcatcccctacctcgcgccgcacccgccgcctcgcccgtgccctagcgccgccgccg

SEQ ID NO: 24521 - DNA, 761 bp, Oryza sativa
gatgttggtgatgttgctagcatggttggagtggctgctgcatcctgggcatgtgtctcactcccttggactgggattgtgaaattctccaccgtaaactccacatacgcgtcctgatctccttcttcatcagtgttgctgccccagtcccagaacgtcgtctcataaaaaaacgacgtcgcgtgacacacacacgcgtcgcaccacaaaatcatacatcttgtaggcttttgatccttgctcgtagccgatgaagaccatcctcgtgctacgatcatcaagctttctcaagtttggcttggctgtcttaacatagcccacacactcaaacacacgcaggtgttcgacagtgggtcggcgaccataccacgcttcatacggcgtcaccccatcaagactcttcattggtgatttgctcaagacatagacggctgcaaccaccgcctctccccagaaatatgccagcatgtttgccgccttcagcatggacctagctgctgccaccacagtctgattgcgccgctccacgacactgttctgctgccgtgagtagggtgcagtgatttaacgtttcacccctgtgtccgcgtagtactccatgaactctatagaggtgaattcacccccgcgatcagtgcgcagcgccatgagcttccgattgctatcctttctccacgccggcttaatcgctgccgatgcttcgtgtttggcagagaggagtcgtatccacatgtgatgactcatgtcagggccgcaggaat

SEQ ID NO: 24522 - DNA, 1638 bp, Oryza sativa
aaagtcatgtgcctacaaatgcagccaataatgtgttacacaaccaaagctcaaataggaaataatacacaagaaatgatgttacttgatcagattttctaccagccactgttgtgtctcagtaaatggccttgatcctcctctattccgagaatcgtcttcagattgtagccttgaatcttgggcttttttccgcttctcaaggtattgctcagtgtcccagtggtggcagagagaaggccaatctgattcactaacccattccacacgagccagcaggtattcctcgtctgagagttcaattgtacgggctacttcgtctttaatcttttccccacgcactttaaagaagtagagcttgacagcatcaacacgaagttgatacatcatatcattgacgcgcttgtttgcatattgttgtaagacacggttagcctctgcctttaattcttctcttgtagaaaacaatcgctgcatgatgtgttacaggtatacaaatagatttaaaaaaacaaaaccaaacacttctttgaaatctaggataggaaagaattacggttacccaaaattcattcaccactcgctctgcacatgtctctccatattcttcattttctttcaaacaataatctgccccccccaaaaaaattttgggggggaaaaaaggggttttggggaccagggcggctacgaataattctaccatcattgtcaaggtccttcacagtgcctgagtattcgcgtttcagaataaccccaagctgtgaggtatacttgtactctgcagcatgccaattcacatacttgaattgcctgtatacaaggttagcacacttagtctcaattcacataattggttcaaatgaactagtagcaaatgactaaattagtatagcagttctgaatttttcttgcatcgcttaaaaaatttatgaatgtatacttacatttcacccctaggtataaggcccaccttccaacccggtcaaggtacagccaggctggtccttgacctctcctttcgtcctctttgtgtagcttgctgttcagcttgctcagtacttgcacgatgacttccttgactctgaccttcagcattagagttagcagggttcacttgagtgccatttgtagaaggcacactccttgagctagcaccattagcactacttgtattggaaagttggctagctgggcgcttctttgaagcaagagaccgatggcgaaggttgttcatgatctgcacatgcacatacagctaattaaataacttactagtataattaaatacataaactaaatgctattaagacaatattacatcagatatagcatatttcagtaacacaaagataccaacatccagcttatcttagtcaagtcttgtccacaacatataagaacacactgaccacaagttcacaacataagcaaggaaaaaaaatacaagacataaaacacaatcagaaatcttcaggatcataaatgatggcttcaggttcagcttcttcttcatcttcttcatcatcttcctcatcatccagctcttcatctccttgtgttggagagttacatttggcaagatagtccaaatctttctcattagttatctcatcagatatgtaagtggttgctatt

SEQ ID NO: 24523 - DNA, 1160 bp, Oryza sativa
atgaaagttactagtttagaatatttcaaataaagggaaggagaggaagttaaaaagtaggcagaattacttgtttcttgaaccagtcaaagaaatttggcccatgtttagttccacggtaatatttccaaccatttaatcttaagtcatgacgttgcttatcactaggtgcaattctgctcttccattgttccttatcaaattgtctatatgtagggatggattagggaaaataataggaatttattaagttaaaacaattttttaatatgaatacttactcaaacaaagtgtccatctcagaaatattagtaagaatatacaagaaagcagccttgtactcctccactgttagatcacgacatgtgcgacgattaaaacaccgaccagggtactggaaaatttgaaggttacaagaactctcaaatgtagaggaaccatcatcgtatcgagggatcttattcctagttgatctcacattgtggctgaaataaagtgagaggaaatttgtgttttcctccactagataagcttcaacaatggatccctcaacacgagctttatttctaaccttttttctaagtctcccaatgtacctagaaggttgacaacactaaattaggaataaatagttgtaaggacaagacaagcacttatttcgaatactatgttaactaatatttttacctctcatatggatacatccaacgggctagaacaggaccaccaagatgagcttcacggggaagatgtacaattagatgttgcattagattgaaaaaccctggtgggaatatcttctctaatttgcataaaagaacagcaacattctgttcaagtgaatgtacaacatccttgcttagttctttagcacacaactgtctatagaaaaaactaagctcagccaaacaaacccatatattttctggaaggaatccacgaaaagctaccggaagtaatcgctcaataaaaatgtggtagtcatggctttttagaccaaatatcctccttctcagtaggttgacccctcttctaatattggctacatacccatcagggaacttcagatcttgaaaccatttgagtataatagtcttgtcattcttatctatgcaaaatgctgccctcggcttgtgccacttgccattgcccttcaaatc

SEQ ID NO: 24524 - DNA, 30040 bp, Oryza sativa
ctgaactcatggtctctaggtagaaaacgcctatggcaatcaaaccaacatgctttgccaccattacggaggcgaaatgcttgggtatcacataagcatgttggacatccaaaaataccatgggtgctccatgcagcaaaattaccatatgcaggacaatcatgaacagaccacaaaaaggctgccctcatgttaaatctttccttgcgcgaagcatcccatgtttcaaccccctcccacaacttgaaaagattatcaactaatggttgcataagaatagatagcttctttcctggatgttcaggaccagatataactagtgaaaggaatatatattctggtttcaacagtactccagggggcaaatttagtggagaaacaaagactggccaacaagaataaggagcagcaccaatattgaaaggtgtgaaaccatcagttgaaatagcaagtcgcacatttcttgcatctctaccaaaggttggaaaatctatgtcaaattgttgccatgcttcaccatcacaagggtgcactagcttaccacatgtggactgtttatgtgattgcatagcctttgcggtctcctcatgtgcataaagcctttgcagcctatcagtgatgggaagataacgcaaaactttgcgtgggaccttattctgtccatcctcaaatcggggggtgttacaaaagtcacacttatctttatgctcattttctttgtagtataacatgcagttattatagcaaacatcaattttaatatatgtcatacctaggccctgcaatagtttcttagaatggtaaaaatcctctgccaacttagaatcaggtggaagaagttcatggatcagttgcaaagtatcatcataatgtgcgattgacatattgtactctgactttaaagctagcaaacgagcaatagcagataagctagtgtgcattgtgttgtcatggactgactcattagccccatccaccattctatagaaagcactagcagaagaagttggctcttcatcaattcctggtggttggacagcccctatatcaagtaacatctcatccatgcgatcaggttgatcaaacccctcctcatgggccaagggagacaatggttcattattcctaatatgttcttccccatgggctgtccatgtctcatagttttccttaaagccaaatttacacaagtgtgcctctataatatcccttgtatgtctcatgtagttgcgacacctaccacatggacatttaatacttccatcttgaactaaatcaggtatatagaaagcatggtctagaaacatattgttcttttcaatccactcatcagagggtgcagaaccataatgccaaccattatacatccaattacgttccgccattatgttattctgtctaaagcaatatcatttaactatcttagtatataaagtaggcttggttaacaattagatcacatccaaatggaacatcaaaaataacagtccaacttaaatggccacaagcatgcataagtatcttagctaggtaggtgaactagagcttaccagattttgttgaagctaccagaccagcacgtctgagagttaacacagctagcgcatcaacaggtcaacaaggatagttcaccaggcttcacagattggggcatccttgaaaagtattacatagatctggaccaatgcatatgtaaaattcagttttgctgatattaacaaaataacacactgtgttctacttttgtatagaagctacaactaaatatgcaaaataacttccaatctctcatgcatgtcagatttaacataaaaaatcaaaacatacagactgttttgcttactatgtggaggcaaacaatagcagaaacgacttcaacactgaaggaggacttctcttggacttcagtagggacgggcagcagctgcggaatggcggagtaagggccggctgtaggggtggcggtggaggtgttgaggctgacgggatggtgtaggggcggcgcgggccgatggacgggcggagcagaaacgagtaggggatgggcggtggggggatgagggggcggcgagttggggagggaggcggcggtgctaggccggtcgatgggcggagcaggggcgagtgggggaggggggaggcatggcgagtgggggagggagaggcgaaggcgggcgcacggtggggcgacggcggcggggccgcgctgctgagtagcgctacgcgcctgcgcgagagagaaaggagtcgatggcggcggtggatctggagttccggataagattggggattttactaggttacctcaattttttttgtgggccggaagcccaaaacctacagaaaaaatatttcggagggcgccaatattcccgcttactgaaattttggcgccatattttcctgttccctcgcgccacaaattatcgtgacggtaaaacgtcaaaaaaaaatacagttctctactgccaaggagggaatgcccatttttctgtgggccgtgtccaaaacctacagaaatattacatttttctgtgggtataagtaagcccttcacaataatttatatttctgtaggtttgtttcgaaacgcacaggaaaaataatgacctacagggtagctccaaagtgtggtagtgtttttgctatatgactccgtttcaataatttgaatttgaatttcaaattataacaacttcaaagaatattttcatatactaaatgatttcaactgaaaaagtcatcaacaacaagttatataaaccatcaatatctacaacttttgttttagtcattttgctatatgactctgttttataaatttgagtttgaatttcaaattatgacaatttcaaataacattttcaaatactaaatgacttttcaacatcaaagttgtataactcatcaatatctataacttttattttggtcatttcttcatccgataaagtgatagtaacattgtttacaaaatttacatatctcttatatggttttcaagtatttaaatcacgacgaaattgctataacgtcacaggttttgggccggtttatgacaaaatcgataaactgtcatggtattatgggccttgtatccatagttgcatatccgtgacgttctctgaaaacatcacgaaaatttcgtcaaatttcatcacagattaaatagattcttgtagtgcaattcaattttctttaccctagagaaaatgcctgtacgttgcaacgggtgaagtctattttaattttattattgttatatggtttagttaagatgaaatttaccgtgagagttcgcttggatatatatatttttagaaaattatgaactgcagttagaaatccgatcgtctcaagttaacatgcgcttatcgatcaatggcaagcagactacgccttatatccttttcgctccgatcttaacctagcttcatctcaccgaatcatcggaaggaatagtcaacttttgggtgcaagctaccgtattataatggtgcagataatacctttccctgtgatctgtagatttccactgaactgatttgacattttcttagcattctcaaaaaaatagcactattctaatattaaattttaatttggcgtttcgggctccacgccgctatttattgctcaccccattaaaatatactagttgcttctatcatccaaatcgatcttaaacaatcacaactatttttcatctcaataataatctatgcagaaaaggacgcaagtaatctagaaggagtatggctgaaaataggggtggacaaaaagcttgggctcgtaaactcggctcaggcttggctcgggctcgcatacctcggctcggctagaaagccaaacgagccagcccaagcctccaaacgagccagcccaagcctccttcctagctcgttttcgaaacgagcgagcccgagctggctcatgagccactcgtgagctcgcttggctaagtaacaatagggccatatgtaaaaattttacaccttttctaactatttatttgttgaaaatgataactttgattgttatattatctatttatgtgttgtgatgacgtattaaagaaaaatatcactttgttacacattctatgtggtaaaatgttgctcgatttctcttatacatgcttgagatttacttgatgccaggctcgaggctcgagcccataaacgagccgagccgagctgcagttttagctcgctgtagcgagccaagccaagccgagcttcccttacaccaagctttcacaaaccgagccaagcccggctcgtttccacccctagctggaaacttgaccaaaggacatggtagaaaaaataaatgctcggaactacccgggttccatctagatccgaaaaaatatatgttagaaataagagaattgttttatccgctaatatatactatattatcaatcatatgtaaaaatattccgaatatatctacctacaaacatggtagaaaaatggtttttaatttcaatatatccgcgtaggggagggtggccacgtgaccggatccacgccggggaggcccaccgccatcggatcgaggtggggcggcaccactgcagatgcccgaggttgctcccatcacctgagcccgccgtcgccgctcccgccgtgctcttgcgggatccgttgcaaagctccccgcaccggaacactattttatgagctcaattaatattgcagttttttttatgtatcttcttgaacactttaattgtgtccctagattcaatatctacagacaaatatatatctgttcctgaatctatttccgacgaaaaatatgggataggatatataggatgagttgtgtgttatccgtcgttatctatatacgtggttctgaatttgaagaaaaactatagaccaggatactagagtggcagaatgtaatgacatccgagcgtaccttagccgattccaccgctaggagggagtagtgaagtagatttccattatggaactatatatatataccttttggcatgtcctgatttatatctcacggttgttttaatttattttatttttttctaagtttttgcctcatagttctagtcgacttacattatctttaaatattactctttcacaatataaaaatacgatgaaatgttttagattaaggaatactctctctggttccttattaaacaggggtaatgctttagataagagttaagataccaattaatgatgataattaattagagtgactatttcctattgtatccatattaaatacatctgtgtgactagcttaattaatatgttttacatgcatgcatgtaaagggagtaaattagtccaaagtagccacaccaaaggtaaaacgtcagtttttatttgcatccaaacagttcaaatctctaacgtcaactaatatattaaaccggagggagtaatagatatgcattacctaaccagctgtactgcgtatatgtagtacttaatatggtataatgtatatatagaagtacacactcactactagaaaaagcatttttcttgacgtggggtctttctttcgcaggcggacataatctttagagacaaatgaccgcctacaaaaatataaatcgaggtgaagttcactatccgcctgcgaaaatggttttcaccggcggaccacctaagcggcgcctgcgaacatttattttcgcaggtcaccttatgtggtctgcctgcaaaaaatcgtacctacccaaaaaaaaaacattaatacttatctacacctccaacccctccccacaactcatttgcccaaacttatcttctcaactctccctctctccctccaccggcttctcagctctctctccccctcccttcccctctccccctccacgggcagcggcggaacgcgcggacccggcggcggcgacgtggttccccagcctcccctcccagatccggccggagggagggccgggggaggacggcggcggcggcggcaacatgggcggctcccctccagcggcggccctctcccggtgcggcggcggcggctccccggcctcccctcccagatccggccggagggaggccatgggagggcggcgacggctcccctctcctctcagatccggacggaggaggccagggagcgcggtggccgcgaggcgcgcgtgtggacgtcggcggctgcggcgaggcgatctttttaattggattttcgcagacgggctattgccccgactgtgaaaatggatgattttcgctgtcgttgatatacgggtggtcctcccctccgtctacaaaaattgcttttggtcgtatgcaaaaaatgctgatggtagtgacttaggctttccggccgttgaccgcgcgttacccacgggaacgaagctcagccctctataaatacgggcgccatgcattatgcatgcccaccaagacagcaagcagattaattactattagtacttaagctgctaattacgaagtactactagctagctagtaacgacctaattaagcagtaaatagcttagtcgtcgtgtacgtgtcaagaaacaaaaatatgacaatgctgatgacctcgtccagcagtaaggtgatgatgctgcttgctgctgcagcatttcttctcctcgctgccccggcttttgcttccgacgggcagacgcctgtgggttatgctgaggcgccgtttaccgccaatggaggtgagatctctatcgactaacatgcatgtactcttttgtttgatttcttcaattccaggcagatagaaagggacatgcatgcatgtttctcctatttcagattaatttataatgttataatgtattttatctactactccagtagctaaattatcatatcctaagatggacatattatatacacttgtttcctttcattcgttttctcaggtcagcaacagcaacaaattttaacaaaatattaaaaaatattatatctcgtactagattaatttattttcgaacgagataataccagcttaattggatgcttgcagcctttagctactcagaataatgtttgctatggtatcagcaataatgttttagtcattcagtcccgcaggtccgtccgtcgcgtctattgtcagaataagtgaattcaaaagtgtcatgtcttgtatggtgtgcttttgtattggttatcctatcttaaaaccttaaataacatgttgcattggatgaatgaattcttttattcaaattctacttactactcagtactctctccgtctatcccaaaatactataagagattttgatatgacgtgacacatccaacaaatctagacatacttatgttaaaatttgctataataggatatgtcgcatcctactaaaattccttatatttagggacggagggagtacttctgtttcgaagtgagttcatttttatattaaccagcgtcataaaaaaagtatgtacatatattatcgtttagtttactaaacgttactacctctgtttcaaagtgagttcacttttacaataaccaacatcgtaaaaaaaacaaagtatgtatatatattatcctttatttactaaactttccagtctacatatatatgatgactttacatataatacaaagcgcaaaacacattttatatgtgacaatgacatgagcaaaatatagactagtgtgcaacattgcacatatatctataactaatataaagaatcgtatttttccgttcgtcaccccccaaatcccagtcggtactccatcacccccactcaaaaaaaattcccaatcgaaattcaatcacacaaataaaattagaggaagcattatacacacaaatatatcaaaaaaaaaaagatcgaaggggaggtcgtcgtcgaaccgccgccgctgccgccgccagcgcagggacgccaggccgccgcagcacccctcccgctggatccggcagaggggaggggcgccgccgccgccacctcccctcccgctagatccggcggattgaaaggcatcggtgcccctgtccgccgtgtcccctcccgccggaagggagggcgccgccgctcgcctcgctcgagcactcccggggccccatggcgaggaagaggaggtcggctgctgctccacgccgctgcccgtcgccgctcaaggggagggggaggggggctcgccagtcgctgctccgtgtcgcctcagccactcggggggcgccgctcgccggtcgccactccatgccgccgcagctgctcggggggagggggaggggggtgccactcgccggtcgctgttccgcgccgccgccgccgcatccgtcgctcggggagattgggggcggggagggagggggagaatgaatcctagggttagggttagggttagggttagggttagggtttgggtttgggtgtatttatttaggttaggattaatttggaccgtccatttgatcggacggttccagttgctcccgcgtcgggccaccggcctattgggccaccaaatagaggacgcaaaatggacttcaacggagaaaggaaataggccagacacattgaatagataaaagggaggtaacataaacttttctatattcgacccaaacctagaaaggaggattttgattctttttccaattaaataattgttaaatgatgtttgtattattaaaaattggcaattaagctctgataattctaataaaatttcaaagagcgtaactaatcgtggagaatttaataaaattaaatttaaccatgtcattttatttctcacacttgctttacttgtaaattgatttaattattcacctacctacttaaaaataccaaatgttttagtaaatttctattttaattaattacataatgtaaatatttcttaactttttctcaattttctggtatgtacacttcccgttgcaacgcacgggcacttttgctagtacaaatatgaaaagaacaaagacctgcttggaaacataagcccttagttgatctgtaaagtgtaaaataccgatgtcggctttctctccatgtatgttatggagatgttgctatctccagaggagtctgttgacataaaatacatcgtgacgcacgaaggcttgagagattttgttggctctagtgcaagtcttatcaattgggtttgaggcatgccagttagtttgatcatgcaactaataaggtagaaacatataatagttaaatactggggccaatcgatcataaggtcggtacaatatcgtatgcccggccgatgccgatagtgttttagatcaacggctataaccgatgacatcggccgaaacttagatataatataattgtaaatagtctatctttattaaaaccaatcttgatagatcagatctaactgagatattataagattgagggtaggtaataaaagtagaaatcaggcaattatataatctccgatgaaacaatgaatgatatcaattgatttgagaaaattcacctagcaagttacaaccttgttaacaccaaaatttggtaagcaccgaagtcatcatcggcttagagtcactatcaacttcagcgtcttggaatcggccgatgggaattatcaagtcgacaatggtcggattcttagtagattcggttaaagaagttaatcaataaagaaaatttatacagaagaaaccgagttcaaagaggatgcggtactacaatttatcttttaattaggatgagtctgttaatttccttttatatttagaaaagtgtgtttagcgtccgataaggactagtatccacccctataggtataaatatatacatcggggtcattgtaaaatatcactcaatcaatacaactactctcggcgcatcgctaacctcttttccgaggtttttaacttatcaccgacggaacttggcacctgacacggggctgcattgacttcgacttccagtgaagggataagtcctacgttccgccggccctgacaattgtatcggctacatgtgttgttcaaggctgcatcgcttcgttctcttggattgctctgatttatttgatatacttgtctacctatttatcatatatcttagttaatctaagtcgattattcaatttacgtgtatcggtcaaatcttttctaggattttgctagtatcggctaaattgttttgtcgatctagattagctaaggtatccataaccctgaaaatcagtcaaatgcttgattgtagatattatgtttcttttcatacttagtactgcatcaattgggtttgacctactaagttgtacttggaaccataatctctagcctgcttctggattgccaataagggtttcatcggagtttcagtctatgagttatctagtcgttgtatcggcttatatggattacatacaagttggatttagtcgatcacaataaaggtttcactgattatttaatcgtttgaatttaatgtcatcagatctccaggtgatgtatgcattaaccttcggatcaacgcttattccattatactccctccatccacaaaagttacacctattacttttgtcactaagaccgaggagaaattaaattatcttagatgttacaaaataataaaggagtaaatgcaagcatgtcacgcccggaatttctatccaaaattccaaacgcttacatgtgtgttaaaccctcgtccaggaatcaaccgaggcacacaataacaaaattgataatagaatacaaataattaactatttaatattcgcaaataataaattgctacagaggtagatagttcctctcaaaaaaaataaccttctacgcagcggaaaaaaaaaactataacaaactacggaacagctatggcgactccactccacaggcatcttaaccagaacaagctcaatccttcagatcatcacctttgctgaaatactcctcttctgatgattgaatattgcaagaatgagcatatgacatactcaacaagccacacagcaaatatgcaagtgcacaggataacaaaggacggcataatagggtttcatttgcaaaaacagcatttagcaaatatttgagaatttaataaaacaattaagtaataaacaatattaatccaacgctatacaacataccctgttatataggcccaaccattcagaacaaccatcccggctgcacagttctatctccaaaccaggaatataccattccaaaccaggagctaatcaaattattaccaattaaagcatcatttactatggtgagaagggtgagactaatcacgaaaaacattgctcaactcacccataaccgcgggtacggctattcgaatagattaaactctgatcagaggcgtaccactgtacccacaagacacaaccccacatcatgtcaccctgtgcctcaataccaccacggtacctcggaaaggagttgtgacaataccccttgcacaacataatccattacagcgcacctttcctggatcataatcgcccccttataaacaaggcatggactccccagcgacccccgtggacttctcgccacttcacagtctggcgcactataatgaatcatgctatataaaagataaagccgttgcccacgctggcttgtggttggcacgataaatgtttcacaacagtagctcgcgaaccggtccttaattgtcatgagcacaaccatcaaaaccatatgctcacaacccaccttaaccaggttttaattatcaattaattaacatcacacgattaaccatcgtgagctaccatttaatgtaaccataattaaaataataaagtaacatagtttataattaatccctttagttagctaatgtttctaagcatggctaagcaaacttacatatgacatttagctgaaccaatccaacatataaggttcatgctaatcaaatttataaccccataggaaaataagatcatcttcggccattaattaattgggaaaggttcaccacccgatgacattcgaaaacaatgcatagttgaaataaaataatagctttaaacgggttcaacatgctcaaatgtttgtttgggatctgtgtgacttgccttgggcttccgcaaacgcttcggaatcttcctcaacggaaacgctctcctccggaacgtcggaaactaaagcaattaaacaaaaattaacaaaacagtacaaaaacaagcataaacagtacatgtggatatttttaacatgtagatcttgattttagaaaaaaatttaacaacttgaaccacctgaaacggatctacggtactcaccaatgcgtccaacgacgaccgatggtggccggcgactagaggaggcggcgcggtggttcggttgaccggcggcgacggggctccggtgatcggcggcgtcggcggtggtgcggccgggcttcctcaccccttggcgaacccaacggcggcgacggcaagcggcggcgacggcgcaaacggcgcggcggcgcggctggactacgaccggcggcggggcggcttgacacgcgcggcggcggcgctacggagcacgggagaggatgggagagagggcaaacgaaagaggaggactagggggtcctatttatagccttggattgaagagatcggactcctcccgcaagaaatcgactcgggaaaacaaaaactcggttttagagataaactcgaaaacgagttcgattcggacaagatactcaacgattagctccgatttttgggggtaaagatagaggagaacgagaggataaaaactcctcaaacaatcggaagaaaaagggccggattaggtgcggatttggaggggaaaaggggcggctcgggctagcaaggccggccggccggaggtaggagaagggcccgacatgtgggccccacatgtcggtgtcccatgagaggaggggcgggcggctcggcttgagccgactcgggcggccttgggccggctccggcgcgcggaagagagaggactgttgggccgaattgggcccaaccgcttagggaggggtttttgaactttttaattaactagcaaaagtgcccgtgcgttgcaccgggtgattacagagtgtgtatattgaccaaaagtgttgtttggtttagcaaaagtgtccgtgcgttgcaccgggaagtttacagatcagaaaaatatgcaattaattaaaatacaaattcgctgaaatatttggtatttttaagtaggtatatgtgtataattaaataaatttacaagtaaaattctccattctccatggttaaataaaatgacatggttaaatttaattttattaaattctccataattagttacgctctttggaattttattggaattttcagagcttaattgctaattttattaatacaaacatcatttaacaattatttaattggaaaaagaaagaaaatactttcttataggtttgcttcgaaataaacatattcaatagaactataattgtaatgcttctgaaaaaatgagcactaaaaatgtacttattctctttttttcggctcgagggaccaacaatagacttatttccgacctatgccggtcggcccacggccttttgcgcatgcgcgggcgcacttttcctcccccaggccgcaacctgggcttgggccggaaaagaggcctcactctcgatccctcttgggccgatttcggcccggacgacaccggccgtccgatctctagggttttgatcggacggccgagcgtcaatagtggagaaacaaaacccactccctcttagccgcggaaccctagcccatttcccttcctcctatctcacttcgccgccctctcctccacgcccccgagcggcggcggcgacgacggcgcccctcccccaccaccgatggcggcggcggcggcacccccaccacccacggcggcgtcggcggcatcctcccccaccaccggcggtggatctagcgggaggggaggcgccccgcgagcggcggcggcggtggagtcctcccccaccaccgacggtggcggcggcgctctcccccaccaccggagagtgccctctgccgccgccgccggcggatctagcgggaggggaggcggcggcggcggtgctctcccctccaccggatccacagcgacggcgacggcggcggttcggcaacgacggcgacggcgacggcggcagcggcggcgacccccttcgatctaattttttgtttttatttggatatatgtgtgctggcggcgacccccttcgatctaattttttgtttttttgcaaagtgctataaggctgcatgtgattctttgttatgtgctatgattttttatactatgtatgtatatatatgcacttgttctcctggtgatgctaaccgaataggacttggtataattcaaaccaagtcctattcgcccaaacagaaacaaaatcctaatcagctcaaacgaaaacagatgggagtttgtttcctatttttgtggaatcggacatattcttttaccgcgttgatgaatcggattcgttccggttttttttcacccggttttttttgacggacgatggaagcacctcttattttttaagtagtagtagaaataatttgtgaaatgttgtttcaattattaaaaatacttcccttgctcaaataattcccagaaaattctagaaaatagaggaacaagcaaagtacttaataaaattttatctagctcatttttatgttgaaaattttcctagattattagggtttagcttgtaggcttttaattttaattctaataaatgatttaaacaatgcatttttaatttaggcgatttttagggcgtgacaaacctaccccccttaaacggaatctcgtcctcgagattcggaagaactggcgaagagatgaagatgagctgacttcaattcatcttctcgctcccaagtggcttcttcttctgaatgattactccactgaaccttgcagaatcgtataacgcgattcctggtattcctctcgcttacttccaagattctgactggcttctccacataagttaaatcttcctgaagctctatacgatcaggatctgcttcctccgtaggtacacgtaaacatttcttcaactgcgacacatggaacacgtcatgtattcccgccattgacggaggcaactctagctgataagctacttcacctcttcgactcacaatcttaaaaggtcccacgaaacgcggcgccaatttccctttggtctggaaacgatgaacacctcgtaatggcgtaacccgaaggtatacataatctccttcttcgaaagccaaatctctgcgacgattgtcggcatagctcttctgacgtgactgagcaacgcgcaacctttcttggataatcttcactttttcttctgcctcgcgcaatatgtctgtcccaaaaacttgacgttcaccggtttgatcccaaaggagcggcgtacggcactttcggccatataatgcttcatacggagccatttgcaaactagcttgataactgttgttatatgagaattccgcgtacggcaaattcttatcccaacttccaccaaaatctagaacacaggctctcaacatatcttctaaaatttggtttactctttccgtctgaccatctgtttgagggtgataagcggtactgaaattcaaacgggtacccatctctacttgtaatttctgccaaaacttcgaagtaaactggctacctctatctgacactatcttcttaggaacaccatgcaaacataccactctggccatgtataactctgcaagcttattccccgtataggttgttttgaccggtatgaagtgagcgacttttgtcaacctatcaaccactacccaaatagaatcatgtcccgccgacgttctgggtagaccggttataaaatccattcctatttcttcccacttccactctggaatcttcaacggttgtaacagactggctggcttctgatgttctgccttgacccgctgacatacatcacatagagccacatattctgctatttcacgtcgcatactggcccaccagaattgttgctttaggtcttggtacatcttagtgcttccagggtgaatggaatacaaagtttcatgagcttctttcatgatagtatccttcaactccttattttctgggacgcaaattctttctcctaaccacacagttccttgctcatcttctacataaccgatggcttttcctcttctcatgttcttttttatttcttggatatcaagatcattcacttgagcttctctaacttgatcaaacagagtaggttgagcctgtaaagtagccacaaaacctttgctgactatatccaagtttaacttttcaaattcttggcataactcccaaggtaaatgtcgaccttctgacatattacagtagctcttcctgctaagagcatcggctacaacatttgctttccccgggtgatagtggatttccatatcataatctttaatcaactctaaccatcttcgctgacgcatgttcaaatcaggttgagtgaaaatgtacttcaaacttttatgatccgtatacatctctctacggttaccgaaaagataatgacgccaaatcttcaatgcatgcaccacagctgccaattctaggtcatgcgttgggtagttattctcatgaggacgtaattgcctagatgcataggcaaccacctttccttcttgcatcaacacacaacccaaaccgagtcgggatgcatcacaatacacttggaaacctttcctcgaatcaggcaaaattaacacaggcgcagtcactagccttttcttcagttcttggaaactttgttcacaatcctctgtccacttgtacttcacttccttctgaagcagacgagtcattggtctggcgatctttgaaaagttctcaataaacctgcggtaataccccgcaagtccaaggaaactacgaatttctgaaaccgtcttgggttgcttccaacttaacactgactccacattgcttggatctactgccactcctctagacgagatgacatgaccaagaaacttcacttcggacaaccaaaattcacatttactgaacttggcataaagctgatgctcacgtagtttctctaaagctagacgaagatgctcttcatgttcttccttcgtcttggagtaaataagaatgtcatcaataaacaccacgacaaacttatccagatattccataaacaccttgttcatcagattcatgaaaaaggctggggcattagtgagtccaaatgacataacggtacattcgaacaaaccataccgagttgtgaaggcggtctttggtatatcttcctcacggattcgaagttgatgatatccagaacggagatctatcttggagaaaactgtagcaccttctagttgatcaaacaggtcatcaattctgggtagaggatacttattcttgatagtaacctcattcaacgctcgataatccacgcacattctctgagtatgatctttcttctccacaaagatgactggtgctccccacggcgaagtactgggtctgatgtatcctttctgaagcaaatcatccacctgtctcttcacctcagctaactcattagctgccattctgtatggtctcttatggatagggttggttccaggtaccaagtctatccgaaactctatgtctctcttaggtggcatacctggcaaatcctcgggaaacacgtctgggtagtcttgtactatggggatctcttgtaaagcaacttggtttaagatcacaccatgatatttaggagaggacacaaagaaagaaacggtttccccattgctactgcttaaagtcaccttacggttggcacaatctataactcctctgtgacgagataaccagtccatccctaagataacatctagatctttggattctagcaagataagcgaggatgggaaaggaacttcttctatttctatagtaacggaaggacaatactgtgtcgaaaatacttgattgcctggggtattaactagtaaaggtctcccaagactaataacttccatcccattattgctcgcaaaacttttagacaaaaaggaatgtgtagcaccggaatcaaaaagcacagatgcgggtatagagttaacaggaaacgtacccaaaaccacatctggtgcattctgagcttctgctgctgcaacatgattaacacgtgccttcggtgctggagcattggagttgttcggggctggaacgttcttcacgcaccgaggcttaggacacttatcagcataatgtcctggatcaccacaattgaagcacacccctggcttgcttccctgttccttcctgacggactggttctgagctggagttgctgcaggacgagcaaccatgttgcggttgtcattgccacgattaccagtattgttgttgtagaactggcgttgggggcggacaactgatgaagatcctccttgagggtacgatggagcttgaggtcccgtaacgagacgcggcctctggttactgccctgttgtgccttgaattgcgcagccctgcgcttcttctgctccatccggttatacttgtcttcctgacgaatcgccttgtccaccaactgctggaaatcccggaaatccgtagacatcaaggcataagacaactcatcattcagtccctccaagaacttctcctgacgctcttcatcggtaagaacatcttccggagcataacgagctaaacggttgaaatcatggaggtactcggtgaccgaacgagatccctggttgagtgctctaaattctctcttctttagagctacaacacccgttggtatgtgtgtcttcttaaaagcggccgtgaattcctgccacgtaataggctctccttcagccctgccttggcgaaaatgatcccaccattcagcagcaggaccatgcaattgatgcgaagcaaaagaaactttctcctgctcagtacactggatcaaatccaacttcttctccaccggatgcagccaatctcctgcttctactggattggtggtgcttgaaaaggtagggggtctcacacgtaagaaatctgccagcttgttttagggaggtgggggtggattctggttctgattgtttgcctgctgcactaacagattgatcagttgtgtttgttgggccagaatctgagctagcgtgggatctcctccattattagcagctccgcttccacttccacttccacttccggtgcgcgtgttcaccatctgacgataagcagagacaacaggaaagaacgacagagagacacccttagaacggagttatttaattaatttaaattctatattgctcttaactgtgtatgattacatttaaattgcattaacactatctcaccaactatcttacactctgacaagcaaaagaactagactcatgctgttacatcccaccaatgatgtaagcaacaactaaacccacacactcacaagcaaacttaaacaagcaatctaacacagcgaactacggcaacgatctaactaagcgactaatcccgccttgcgtcggaacgaagcgacggatcttcttcctctggagtagctggctctctttcttcagggtcttcctcttcttcctcatcacttatgatgtcgatgacaggttcagcacgattgggcacagcttcacccatcacacgaatcttcgaagctaactggagacgaggtggcggacaggttctctttcttgcgatgaggcgaagcttgggtgttggcggcggcgtttctcctttaagttcagctaattccttctgtagacggtacaccttgctctccaacttgcaaatcttgcctcgattccagttttccctgtcatgagctgctttgtctcgctccacacttactgcatccatagcactaagcatatgcaccgcatgcatcagagcggcactctcttcaccatcaggacaggtataggttccatagtcttgaccatgaggcttgtgaggatgatactggaaagctgatgaatccaactcttcttcaaagcgttgacgcaactctccaatggccaccaaagctgcttcttgacaagcatggctgtacgatcttcctccagcttcgaacttaatggacggaaggtcttcacgatcactagccaacgtcacacgaacatgacacttctcctcgttggggtcatgggaaatccggcgatactcaggagcaacttcatagcctacctcaaaagccatcaacctcaactccctgacgaatcctaacacctagatcaaatttctcggtgaatggggcggcatctaaagaaacatagaagagaggaattaatgcatatatttttttttaagttagctgcaccatctagacttaactgatttgaccaaagaggaagaaaattaaaagaaaagacacatactaagctattatatatatatatttttagaatttaactttttggacagagacaaataatttaatttttttttgacaaataactaaaataaaactaaaatacttatgatctattataagcacggtacagtgtcaccataagaaagatgagtagtacttgtgctaccatgattgtatcgataccataatagatgtacagtgccgactaatcaatgaagtttactaaggcggaataagaaacattttgagaagaacaaattttttttttaaaaaaaagaaaatgaattaaattgattttgtgcataaccttgcatgtgctgccaacttaattaatttataagagaatagagaagagcagttctatttttgtcaaaatattttgaaggctacttaaggtttaccatttggcttatcctaaggtcagggtggctctgataccaacttgtcacgcccggaatttctatccaaaattccaaacgcttacatgtgtgttaaaccctcgtccaggaatcaaccgaggcacacaataacaaaattgataatagagtacaaataattaactatttaatattcgcaaataataaattgctacagaggtagatagtttctccggcgaaaacggactctccggaaacgacggaatctaagcagaaaagagcaaaatcaccaaaacagcacataaacaagcatgaacagtacatgtggatatttttaatgtgtagatctcaattttagaaaaatttagagacttgaaccaactaaatcggagctaagatgaattagttatgaatttttaaagattaaatcggattaaaacacttaaatcggtttaaattgaattatgacgcaataatgaattatttttgaaaaggaaaagaagattattgcgtcagcgggctagggtttcggtggaccgggcgcacgggcggcggttcacgcgaacggacggccgagatcgatccaatccaaaacggacggctgagatcgaacggtccacgaccggctcacggcggacgaccccgatgacgtcggcaatgacgtcaccgacagcggcggcggctcggcagagcggacggctcgggcggcgcacgctcgccggcgaacggcggcactaggacgcaaacggaggccaccagcacgtagaggacgacgcggcgaacacaccggtgaccaaaacggcggcggaagaacaacggacgacgacggcgacgaggaggaaacggcggaaaccttcgggttgatgacggcgacgaagctctggcggtcttcggcggcggcgaaggggcggacgaggacggcgacgacttggcgaccacgacggcggtcttcccgagcgacggcgacgaccgagacggcggcggcgcacggctggagcgacggcggcaacggcggcgctagggcacacggcgctagagcgattccgacgacgagaggcgaaggcaagggtggcggcgggtagaggagacaccggggatccttttaaaggggctcggaggcggcggcaaaggcccacggcggccggtgacgaggaaggaaagatcgggaagaacgaatccgagacaaactcgaatccaacgctttcaaaaacgatttagccaaagattccaaaggagaaaaggtagaggagatcccgaggatcatttcccctctatcaattcggccggaaacggaaaggagcggccggattggaaagcggcggcggcggcggcgcgctagggtttcggccggaggaagacgacgggcctgacaggtcagcgagggcgcgcgcgcgggcggcggactgggccggctgggccgaggagagagaagagaggttttgggccgactttcggcccaaagccaaaagaagacttttaaaactttttttcaatttaaattatttcttaaatgcaattccatttattaaaaatacttccttagctcaaataaatcccagaaaaatctaggaattatagaattaagcaaagtatttaatgaaattttatctggccccattttatattggaatttattaattaaaattagatcttctcttttaggcttttaaaatcatttctaataattccttttaaacaacaatttataatttaaggattcttaaacaagaaaagctcttaataattataattagatcattattgatcaaataattactgaactgttctttgtatcatttaggaattgagctccgaaaaatctgagaaaatttcagagagttgacttaatcatggagaatttaataaaaattaaatccatccatgctttatatttaggaaattttatttcccacatttaacttcacttgtaaattaaagaacatttaatataaattctattattaatttattaaataatttataaatcctgaaacgaaaatcaggatgtgacaaaattgactcgggaaaacaaaaactcggttttagagataaactcgaaaacgagttcgattcggacaagatactcaacgattagctccgatttttgggggtaaagatagaggagaacgagaggataaaaactcctcaaacaatcggaagaaaaagggccagattaggtgcggatttggaggggaaaaggggcggctcgggctagcaaggccggccggccggaggtaggagaagggcccgacatgtgggccccacatgtcggtgtcccatgagaggaggggcgggcggctcggcttgagccgactcgggcggccttgggccggctccggcgcatggaagagagaggaatgttgggccgaattcggcccaacggcttagggaggggtttttgaactttttaattaaaataatttgtgaaatgttgtttcaattattaaaaatacttcccttgctcaaataattcccagaaaattctagaaaatagaggaacaagcaaagtacttaataaaattttatctagctcatttttatgttgaaaattttcctagattattagggtttagcttgtaggcttttaattttaattctaataaatgatttaaacaatgcatttttaatttaggcgatttttagggcgtgacaaagcatgcaaccaatgagtatttagatgactccttgggttataatcaaacatttaatttatctcttcatttaagtcttgaatacataaagactacaaataggaacaacttatttggaaaaactcaaatgtgaaatatgtttaacttttgtgaatggagggagtatcattattagccgattggtttctactggattatacttcctccgtttcatattagaagactttctatcattgcctatattcatatatatatatatatatatatatatatatatatatgtgtgtgtgtgtgtgtgtgtgtgtgtgtacggtggcgctacccagcgccacacacaggcactggcgccacggaacaaaatggcgccacacacaacgagcagatgtcatcccaccaaatctatccaaggtactagggagttaaaatttaactggtggaaattgtggcgcaaacgaaaagactgcccactaaaccaaaccaacggactgtggagttaaaaaataacttgcggaaaacatggcgcaatgtgaagcaacgaaccctctcctaccggaccaaacaaaaccgaatgtgaagttgaattttaactaataatatgttgggtgatgcgctgcggtgatttcgttgttgagttaaaattttacctatgttccggctgtatgaatgagccgtcattaacttaaaattataggttggtggttatgtagttaaaaatttactggtagattcttttttttatggatgtgtgttgtttctgatgacaaggaatatgatttaaattttaacttatcgtaaactggtacgagtagatgaaaaactttgagacattaggcagtgatggtgatgtgtgacgtaattcacactttattattagagttttattgttttgatgcacatctccccggaaattacatcgatggaaattaactgatgattaattcaccggatagaaatcaacaccatgtcgccggatccgccagtccagaaactacgaaatcatagcgtgcattgatttggcgttaattcaataagctgttagaggaggccccggaataggcggaattttttttcatgcgatacatcctgttgtggtggataatgaacagagtccttgatccgaaaataatgcttgtacacctaaatttagttttctctccatagggaatggaatttctgtttcttttaggtatggtcagattcaactatcgtacatcatttagttacttttactgacaaattacaaatagtaaatattttactctaaacattacatatagtacttttttaattgtcaatatactgatatgtagattgcaatttttttgcaagatgtctggatgcatctaatcatataggaatcacatgtattagaaactaatcacacacaaataatgcaataacacatcggtgagatcaaataacaggacaacgtccaaccaaaatcaggaaaaataattgattgatggtgttgttgatcctggcagctttcttctccttctggatccgtcaaatggaaaaaaggtggctctcgctggtttcctgattgagaacggaaacaatgggctgtggccactccttctaccggtgaagaagatgaaaatggaaaactcggagagaggcatgctcggtgccgccgtctccatggatgcccgctgctccatggatgccggagaagctcaccgccgtgaaggttgccgccatcttgcctcctgcccatagtcttcacccatgcaggatccacgcgggaggaagggggcgccggatccggcgcgtcaaccgcgctggatccgcgccgccgtagctgcatccgtgcacatggggcgcagagcggcagccggatccaccgccgcatcgcctcctggccacagtcacccgtcgataccgcacatgccaccatcgcgcccgtccacgcacctcagcgccaccggatccgccgctcctccttgacgccggtcctcctcatccccgaactgccaccgctcctcctcgtcgccaagccatcaccggaactgcctcgccaccactcctcatcccctaatcgccatcgccgttcctcctctctgcacaagaaaccacaagtcgtcattgatccgtaaaatgtggagaggaagaggaaagagtgggtagacgatttctaagatgggaatctgtaatatatataccagatagagtcagtatgtcgacttaaaatttaactgtgtggtatgcatcagatcgagtatgcgtgggggtgggtagctgagctaaaatttaactgtgtggtatgcactagatcgagtgcgtgtggggaagggttgggttgtgggtcgctgagttaaaatttaacttgcgcgtgggggtgggtggttgagttaacagtttgtagcttgcaccaaatcaagttcacgtgggggtggcggggtggtaggtcgctgagttaaaaattaactgcgtggtctgcgtggggcaagggggttgattgtgtcaggcgccatctaatacgtggcgcctgtaataccatatatatatatatatatatatggtgcattagataccatggtgcccgggcaccatggtgccccatatatatatatatatatatatatatatatatatatatatatatatatatatatatatatggctctagagcaatcgtgttccatcatgttcactgatcaccatcagatgtacctactggtggagttgctatataggcacgatatatagtaggtaccatcagatgtacactccaattgctagtgtggctattgatgtcagtggatatattcatgacgttggaggagagagatttggcctttgagtttttttctcctgacaagaagtaaattccggctttgacctttcatttgttcactgttgtgctgattttcttcagcaaactaacctgccactacagtcgatactctaatttgtgctgattttctattcttttacactaactttgcacgtatttaatcatgtgtattttttatttttttatatatatggacgtatccacacgtatccttgtttcttcgaaaataatatatccacgtatagcgtatatgtactcgtatccccgtatctaggtaatctatgtagagagtggttaactgattctttttaattagattcattggcagcattcaaattactccacgtgattagatattaaacatgttgattttaatgagttaatataaacagcttgtttagtatttccaaaatttaatctaataagtttggttttattgggatataatatatcaagatggttctccactcaccatgcaaaaacaatattggcaaaaaaatggaatttcaaaaatgtcatttcgcaaaactgatgtccaaaaatgatatatcacttgacatatatttaaataaaaaaacacatgactgttatttttttcatatatatgatacattctaaaatataatcttgttataatctacagagaaaataatgtagactacagtttgttgacaattaaatatcatgttgcaaaattgacatccaaaaatggcattgtaaaaatgatatatcactagccatatattaaataaaaacacatgattgttattttacatatttatgctacattcgaaaatataattttattataatctatggagaaaataatgttcactatagtttgttgatgcgaaaaatgtaacacaatgaaaatatcattttgcaaatagatgtaaaaaaatggcgttgcaaaatgatactccctccattccataatgtaacgaacaactattttttaaaattgtttcataatataaggcgtgcatgcatgtatgcatgtcattaactagctcatctttttcactaaaatcttattatttaaattctacacaatcaacatctctaattttattgggtacatgtattatatttattagggtaatctaaactataaggtgataataattatttgttggtctttaaattaaattaagagtggtttttatattttgaaatagagggagtagtattttccgaaatggacatgtatggtacgtacattccatacatggatacaagaaaagagaaaagaaagaatatttaaatgggagaataaatactacacgatgaggtcaacttcctctcacctaccatctctctcattactcaggaagtgcatgctccatgtcagagagttacacatgcatcctaccaccctaatcttattaactctcaatttgtgaaagtatggtacattttgaaagcacgcatcttggaatagttgaacggatgtgattctgggtgcaggtgaaccgtggttctattttgattttccatatatatatatatatatatatgtatatatatatatatatgtatatgtatatatatatgtatatatatatatatatgtatatgtatatatatatatatatgtatatgtatatgtatatatatatatatatatatgtatatgtatatatatatatatgtatatgtatatatatatatgtatgtatatgtatatatatatgtatgtatatatatatacatatatgcatatatatatatacatatatgcatatacatacatatgtatacatacatacatacatacatatatacatatatacatatatacatacatatatacatatatacatatatacatacatatatacatatatacatatatacatacatatatacatatatacatatatatatatatatacatacatatatatggtatatgtatgcgtgcgcgcgctttgattcattagcatctatatgaatgtgagcaatactagaaagtcttataatctaaaacagaggtagtaatgttattttattatattatcatcaactgattgcctttatattattatttattcaagtattataatatacattggatatatagccgattgttgaaaaccctatcgacatcagcgggtatcgttccatcggcttgcagccgatcggctctttgatcttcaatgctaggcggatctccaagctactgtgttcgtcgatttaggtcgctccaacacagatctagtaccatcggtagagcgcggattttcgctccaacacagatttggcacgcccagtgggacacgagttttataccatatctctaaagaaaaagtcaatgccaaaaaagattaagaagactcaacttcccatgtcagtggttgaaacacttcaatataaagttgatgaaacagttcatcatggcttcttcaatcaatttggaattctggtgaataaattgtaaaatttaaacaagagaacacttgatgagttaattgtttgaggccagctagtgggcagattgaagaacaatagcaatatcggcttaggggacaggcacatcactatcagcatgataagtcaaattgttccttaaatattatatggtagatctaaagatgcagcatgtcccttaattatattgtactttctccgtgccaaaatatagcaacctatcagcatgataagccatggggtattcaggtgtccacatacattaattggaagggtcacatccccttgctatattttgggatggagggaggctgaatcctgctgatgacgacccggactagacgtcatcaggagataggacccgacgtgggctgacgtgggctgccactgctcggcatgctttccccggggacacgccacagttattatggacaaaaaaataaacagcaactattaggaaaaaacagattgtctcacgtgatggtaaaaaaagtaaacatcagctattagggtacccgcaatggttatctatagactctctataagagatccatatcagcatattttcctacttaaaagagattaaatgcaaaacgagagcaaaattatctactaacctgaagatagtttatagagaaacgaggcaatagcttagagagctataggtacccatatagacatactattgaggtggtttactattaatctagtctattattgagatgtacatgttttatagagagcactttactttaccattgcgggtgctcttagcaaggttgtctcaagagacattgcttgctactccctccatctacttatgatagtcatatttccaaatctgaataatttatttttgatagacatatttcaattcaacaacctatcatcttaatgactttttcggatttaatacgtgactctccattcttccgcacaagattggctacatgaacatcgagaaatgtaaatattaatgaatcgcttgagtatgaatgaccagtagcatgtttaaatggatgataagtaaaattatttattgatatatgtgtcaaaataaaatataactattaaaagtagatggatgaagtattaattactaaaggagtaatggtgacgagatactctcaagtggtaaataaggaatggagcgtctctagaagctgattcttaaattatgtggttgtctattaattacaaacatgtagtctttgtgtcaggtaaattttaaatctcgatagtgtttgttccaggcctgcggaactgcacgttttgttcgagcaaggaagcacacaaatatttgatccaacttttccgggtacgtttcgtgttgcaccactccttccatttaatattatttgacgtttcgaaatcaattttcaaacctatagccaaataaatttcaa

SEQ ID NO: 24525 - DNA, 21122 bp, Oryza sativa
ttcctgcagcccagaacatgtaacaatatcacatactagattaaatctgggagggaggtgggtagtaaaataaatatgaacaattctctcttcaaatttattattatttgaattgattatattaggatgtataatattgttgtctagattgatttactagtccctaaccctaaaccctagaattttatgatgttcagattcataatactagaaaatgtctcatccgattttaaattctaatatattaggacagaggaagtatttttgaacagactcaatctattttcgaagagacgaagtagtacgatggctcccacgtcataactatactgtactatattaactgctgtctagtttgcacgtgaaacatgagcagctagattcgcgagagaatggttaattacctcccgatccgatctaagcctggctaggtcaatgtgtatcagtttccaaataaaggtttatccgattcgaaggaataaaaactttttgaagaggttagagtggatgcaaacattttgaacacgatttcgtagtacatatgcactctataatcctaactatttgcatatgcgatttcgtgcataccattgccatgtatatttcttttttatataactaatatttttaaactgtatattatttcagtaaatttcgggcatatttactttgctaccattttcaaccttaacaagttttggtattgccaaattttggtaaggttatcaaaattttagcaaggttgtcaaattttggcaagatttcatatgtatttactaaaatttagcaacaaactaaatatagccaaaattttagcaattttaccaaaaatggtatggttgaaaatgacatcaaagtgaaccggcctttcataaacccccaaattatataaaaccagagggattttaacacatggcatataaacctagatattatatatagttctaaagtgttacaaaaccaaattgttaactaattttacatactactatatcaaaaatcttaaaaacctttacatgcatgcatgaaacatttatacgatgaataaaaacttataaatttgagatgtgattgtagacattaaaagtatggcagataaaactaaaaactctaacattgtagttattttaaataacgtggagaattaataccatctttacttttaatacaataatgaagagttactttgtttttagtagtgcagttaatactaatcccatcttactataaagttgatgtccactaactactaaggccatccccaaccctctatgtcatctagtgtccagagcatttaatacattgccacataagtaaaaatgtgatatggtaagagagtcaatgaggagagagataaaaagttgaagaaaccacaagatgataggtggataaaaggagagagaatatagatgattggataagaatttaatttgaagataccatctattggatagatagtttttatgcatagtgtctatatgacatggcaagtatgatgactactaaatgatttctgggttggggatggcctaaaacttaacatgcaaccataccataacaccacccactaacaataattacatatttaacttcatgcaatcatacaaatcgtctatgatttatttaattctacaaaatcaacatgcaagtatatctaattatcaccgatcacatcattttcacaagattttaccaaatctatctatcattttataatatttaacatatacttatcaatatgttacccattaaataacgggtattatttgtttgtttcatgataagtaccgataaaccctcacattttatcattttcttttcttcttactcctagctcgattgttgaaaaatatatattgaaaattgcttattaattcttgtagcaaagcgtgaggaatcacctagtgctataaaatgttactttcctagcactgtagttacttctaacaacttgatttttttttagatttactttcatgcttatatttttgttgttaattttatatttacttccctgtagcaatatagttacttatagtggtgaagagttacttctaatctagtgaaaagttactcctacttttggtaagatttacttcccttcagcaatacagttatatataatatcttgaagagtaatttctctattctttcagttactttcctgcagtagtattgttacttctaatatcacgaatagttacttccctctagcagcatagttacttataataccgtgaagagttataaaattacttttttcataaaaaataatacaaatattaattcaaataaataaaacgcatgtatgtatcttcgctgcgtttgacatgtgaattataattcacatagtattttttttaagaaacacagtgcaaaaatagatgctcattacacccacacactcacccctataaacgcatacatgcacaccctaaccttatgagcacgtaaaaacacacaggtgcacactcaacgccctatgatgcagacgtgcaaggggatacaaagatggtttgtggctttttgcataaaggcatattaaaacattttattaagcaaaatagtaaaactgttgtgtaattaaggtaatattaaatctccactgatcaacgctacaccacgttgaacaggcccaaccatcccacctgaactaagtgcattgagtcgatttattaagggtgagactaatcacggtgaatctggtcgatcgatcataaccgcgggcacggctattcgaatagtttactctggccagagatgcacaactgtacccacaagacacaatccaccggcatgtcaccgcgtcatcatgcgcctatgaagaacacgtcaccatgtcaagtgattgtgacaagacccttcatataaccctctgaccaatcgcacaacacctcaggttacgcccccgcccccagcaggcagccccctctcgtgtcacggtgaatccgaaagccgatcaactgaacagcccggatgacccaaccccatcacgcccaccctagcctaggaacatcagccagaggaaagctatactacagatcaagcagttacccattcccacttgtggtaagcgcggtaagtcttccagtgcatccggcgaaccggtccttaattgccatgggtgcgactagcaaaactatgcacccacagcccaccattcagtcgcattttagttggataattacaaccaatgaaacatggtcgggtgtctcgagcacgcagctcgtcatgatactaaaaaggtctaatactgcagttatcccatcaattgagctagtggtaattaagcatggctaagcgtattgttctagctagatcacataagtaacatgagctagtcgaattattacccaaggttgacaaaggacagatatcaagtaaacatggcacaagtgactagattggtaatacccagatcccatgtaattgacaaaacatgcatatttatttgcaaatggtaaaacatttataaattgggatcaacatactaaagggtaatgtgtgacttgccttgcttcttcacaacaaccttctgaactctgatccttgcgaccgcgaacttccgaaacaacggattctacacgctggcacgcaagataaggaaaaactctaataaaaaccaaggaaacagtacattaaaaagtaaacaaacatgtagatctcaattttagataaattttgcaagttgaatggcccaatttagagttcgtataaattagacatgaattttagaagtttttagccatttaaatgaatttctataattattaccgatttatgacgcaattattaatggctgacattgtcaaggggaaggggcggcgccggcaagcgggccccaccagtcagcggcacaagggcgccggttcaccatggactgggaccacggaggcggttcaccgccggtccacgggaaccgacggcccagatcagcccaagccgatcgggcggcgacgaggcggcgcagccaaggcacaggcgtggcacaaggccggctcggccgagccatggcgctgggcggcgagcggccaccggtggcagcagctggcggcggcgcggcgagtggagccgaggcatggcggcgacacacaagtggtggccggcgcggcaaatagagggaaagaaagggaggggaggagggggctggcggagctcagggtggagagaggcggcgacgcgcccgcaagcgtgcagcgccaacagaggggcggccaaggagcatcgtgacctgaggaaggtgatgggtgggttaggcgagcgcggggtggccggaaatagcgaggagaggcagccagaggcgacaagggctgcggagctcaccacacgcctagagaacggagtctcaacagtggatgacgagggcggagtgttggccgggcatcctcacggccttgcgaagctgaaggtggagacaagctggccccacgtggcgtccatagccggcggcaagcggctagagatgacgatggctcgggggtgctcggtggaagggtggttgcggcagcggattggggaaatggagcggtggccggtcttgcccttgcggttgcgaagccagtggtggagagcgtgagcccgagagctcggagcagtggggaatggcggccggaggtggacggctcgggttggtggtggacacggtgcttcgttggtagtttggggaagaggagcggtggacggggtgcgcacggtggctgcggtgccggggaaggcgatggcgcacagcggggtggacgagagcggtggtggtgcgcggctggagtcggcgtcggcgggggagagaggtggtgcacgtggtggcggcgtttcggggtggaaggagggaaaaggagtagaggccggggtggagttcggcacggcgattccgatagcggtggcggcgcagcgcggtggccatgcacacaacgggaaacggcggccggagcactccggcaagcggcagtggctcggctttgcgtggggagagcgggagagagcgcggggagctcgggcgaggaggggaaacgagagaggaggactgagggaagctttttaagggatcgggagggggagatcatgcccgggagaggcggatttgaaggggaaagggtcgccggtgacgtgcgtgagtggggctctaccggcgccgtttttcgcagggtgagggggggattggcgcggacgtcggcggtgaccgcgtccacgcacgcgcgggagagggagtcgcgcgggagagacggcgacgtggggtggtgcgggtggcaatggcggttgccggcggggatagatggaggttggggatgacaggtgggcccacaggtcccacctgtcggggatagagagagggagaaacgggctagggaggcaaaatggacttgcacggggaggcaaaggggctgggccgagggggaggaggagggggaattgggccggggagggaaaggggttggctcgagagggaggaaggaaggggaatttatattcgttttcttttcattttaattgagttaatgaactttgtgctatttaaattatttcttgagatccgaaaattcacgggaaatttcagagagtatattggggcacaaagaatattacaaaatattctcggccaatgatttttaaaggaaattttttattccctaactatttcacttgattaaattgctttaacttttaatataatttctggaaatgcattatttaataatttttaatcccgagcgaaaatcggggcattacaacagctctcgtgggccacataggccaaatttcaaatgggccaggatgtcacaacccccctcccaaaaaaaaaaaggacctgacgtccccgttggtccaacttacccgtatagctacacaggcataggaaaatgtccatgaatgtgtcccctcttagtgcacatccatacgtccagtgcaaatgccatatgccctgccatgtgcttcacacaacgcgcaaccgcgagggtcagctcagataccatttctaacagctcaccctctagagccgcttagcccaacctatccgactggagggcccacttacagataccactctgcttacatttccattcatacttcatgtgaaagggttaactcggggaacatatggatggaggaacaagcccttataagttagttccacccttcctaaactaacaaagtggtactaaacatgtgcacatagctcttgtgaaccacacatgccaaatcctaattaggccaggatgtcagccttgggtgccggatgagaatgtgccccgagcacaacccacgaagggtcgtgctttgtgggatgaatgttgatgagccttgagcacagcccactagggggcgtgcttcgtgggcttcatggagcatccctcttcgattgtgtcttaatccagcagtgcgacgggggccctagtacccatttctctgacagtagcccctggccttgaacccgggaacggggccagatggtaccaaggttgaggcttcttctgtcaaggcggatgtgcatatctttgctgtttgttgggttggttcattggccacccatgcttgtgctcaggtgaccggtgagctcaagagttgtgggatgccccccgaatgtgcggtttcaagttgaccgatcatggcacgaggacttcaacagtgcctggagtggagctggccggaccgagtacggcagcgcatatttgatatctagtctagcctgatagaggtgttttgcttgaaacctcgggactttggcaatacttgggcacggtccaagttccaaactctgttaacaccaaaatttgctacggttctttagtacattcgggttgaggaaagaagccaattagtatatggaagtttagtaagatcaaactgaattcaaagaagaatcgtgaagaccacagcaagatagtgtcatatttttagtatatctctaaaatatgcaggattagttatttttcttttcttgttaggagtcttatcttgtgtcccattaggacttatatcaacccgagagtataaatatgtactccccggggtctttgtaatctatcgccacagatcagtacaattacttgtaagacccggagacattggatcttgtacgatataacagaaactctatcccctccgagtaggactttggaaatcacttgactagtagagatattttctataatttgcaacagatttcaacggcgtacatgggaacaatccgtgtacatgaaggtatgcaatattcgtatatttcataagtcgtaggataggaggtatgccttatccgtaaccatgacacttctgcccagagttttgagtcattgtagattttatatgtttcgacactcctcttaaaccaagaggggtgatacatttgtcgacaaaagtggccccaaatctatattttcctatcatttttaggatgtatttcttgtaagctttgctaggggagatttgctcagcctacacagagtaggggaccgtggacacaccatctaggatcccctacgtttaacaccttaatatatggattttgcacgtcactatgctccaataagtggagcatgcgtcatgtacgagggcaagagtgtgtccgggccccaaaacagtccgggttcctggtcacttgtgaggacccaaaataggacctcatatgtatatgtgctaatccaagatccacctagcacatacagtgacaaagataatatgacacccaacataggcaaagataatatcacaggaaagctaatatttattaataaaatgattgtaataagccttatggccccacttaattacatttatttaccttaagggcaactcaagaataagatagcacaacggaaaagaacataaatgcacaaaaagctccattcaacatgccacaagcagtcaactggggcacacggcctagtcctcaacttcagcagcaaattcctcaaagaacagcagaaactttccttttggagttgaggcaattgtaaagtgagtacatcaaatactcagcaaagtacaaggaaatatccatatgcacggctgacaaagaaaggctaaagctattttgcataacatagctgttgcagttataaataatgggtgttaccattcgactgcccacacgggacctgtccacataagaccacacagctatattcattaacctgcacaaaagtcattctcattcaatgttttcgcaaactacctctcatgagatatcaccgagcatgtccatgaccgcggatgcggttattcgaatagattagtttaacactctacagaggttgtacagcttacccacaagatacatcatctttttgacggccagttcgacaatgtcaaactttagattgtgtgcggccaaggagtctagaacaaggctttttagaaactccaccgcaacactgccttacccaatgaaacacattccctcacataaaggagaaagtacccatggctaaccttaacacctatcgtctagccacctgggtgccaagactcggaatcctactaggccaagtccttcccatcaggacatgtggttgcacgataggcttagatcaacggcttatgaagtgaagtccttaattgaccaagtcaacttgctaaactataatagcacacatctcaacagtaggctcacatagagaccatgcccgtcaatgattacatagatacattaccgccaaactaggttcacacagaacaacccatcaccccggtccaaatcattttatccaaccgttgtttactacatgatgcaacacatgctactagaaacatagtacacagccacacagatcatataaaaaacaattataagtatataattaatcaaagttatgttttgcttgtgaaacaaccttgagcggggctaagtataactactctaccttgagttgagcccaatattcaactcacaatgactagggtaacaaggtatcacaggtaataaataataattaaaggtaggatataataacaattaggtcatactactcttcgataatttataaataaaatcatgcaagttcaaaacaaaacattttataaactaggttcaatatgttcaatgagtgtacttgccttgcatccgagtactgtccttgccccgtgtcttctgcaaggaatatctcctttgctccaatgtctacacgatcgcaaacgagaaacaaataaacaaaataaaagctagctaaataacatcaaatgaaacaacaaaaagaaccaggaggtagagctcgattttagaagaatttaggaaaaagaacaggtcaaatcagagttcgaacggaagaactatgacctctggaagtttgaattcagagaaaataggaggataaaaagaaacggaatattccgagaatattctctggatatttaattccaggaattgaattatttttgtgaaggaaataaaaggtggggcccattggtcagtggatcagagtgtggtggactgccacatgacgacacgtgaacagaaaaagattatgtggcgatgacgtggcgctgacggggatagatctagggctgacatggcatgggttagggttatgtagatccgacggtgtagattgaatctagggaattggatggctcagaattgtttactgattttatgttgtggggcccattcgtcagtggcacacagaggagggaaggaagcagagctcggcacgctctggccattgcaggaccgacggcggcgtgacggcgttcgtcggcggcggcgaaaggcggcgccagaatgtggaggtggagacgaacgtggtggcgcggcaccgagctccgtgtggcggcatggacggcgcacgacggtaaggttggtagcgccagagagagaagacaagagggaaacagagagggaaccagagctgggagatggagaggctttgcctcgcggctcaccggctgtggcagcgcttcgggaggatggggcgacgacgacgcggctcccatcggcgaaacgatgaggcggcggcggcgttgattgcgcacgggtggaagtggcggcggcaactagagctcgggaaaaggaaaagagagcgacggtggtggctatttatcgaggatgatgagctagggctacaagcagatttggaaggcggcggctccggatttgtcggcgacctcgaggggatttggcggcaacacggcgcggcgcggcctcaggtcgcgacggtgtgggccgagggcggcggcgtgtggagaaggagaggagcggccgggacgaggcgcagcacgtggactcggggcttggcctccctgggtcgagctgctcgggtggaggagagagcttcggctcctggcctaaggaagaagaaggtggagggaaaaagcagaggggcctaactgaaaaaaatgaaaagaagggaaaggaaaacgaggaaaaggcaggggagttcccggaaatttccaaaattagaatatttgtaattttaagatgatttaggagattaggaattgaataagaatatttttgaatttggatggaatttgattaggactttgagctccacaaccgaaatacaaatcaaatccaaccatctcctgttaagaaacaacaaagccgatgtcgtaattaattagttaatcatattaaatccttttgattgacgaaactttcattaacctatttaaggcgaacaaaccaaaggtgaattttcacgattcgacagaaagaacagaagaggaaaattcagggtatgacatcgctcctcagtttacttctctaagatatataaatgctaaagcacaaaggataaggtctcggaccccgaggtgggtcctagttgccttgtgctaggtacccaactacttatggttcaagtgttaaaattataagcacataatgatttaatttatttcataaataaatcatgacattgcagatgtaaactagtatgaacgcatcattagatctacatatgtaaattaagcagtaaaacatgaacagatcaaatatgcgcaacatgtcgaacacgtatcaaggtggccgaaagaccggttgctcggcaggaactactcgcggttgcgggtgtcgacgaacgtgcgcagcacgcgagcggagaggaaggtgagccgtcgcggacgaacagggagcagtcgcgcgaagcgcttcccaaaaaccttattgccgccttctcccggtgtaggacgtcgaaggcagaggttccggagacctgctctcccgatcgcaggtgcacgccggcgagcatgatgaagtagtctacgagcgacggcgcatcacagagtaggaggcaaaccctagattgatttcgcgtgtgttgcatgaaggcgatggctcggtttatacagagataggttgcttgatcagggtgcccgcacgatctccactccgcgtaaccgaactggataagtcgtgcgtaacttatccggactccatgccattttcacgcaccggattttttagactgtttccaaaacgaaacaaaccctaatttcccgcagcaaaacaaaactgcaccggatttttcagaatgtttccaaaacgaaacaaacccgaatttcctgcagcaaaacaaaactgtaaaaggaggctgcatctgtgcaagggtgaggagccagcgagcgcacgcgtgttccccctcttctctccaccatacatgcttcaagtggctaggaaggcatcttcccttttaaggaggtcccctctcctagaataagcaaggtgttactaaactccacatgcatgccatcccatgaggtgggtttttgtgattttccaaagaattaatcttcgagtgggctaaggcccatctattaattccaacattaagcatgccatttatcttaattgtaagttcatacctaatttatcggggtaatggggtaccctagtttccttatgaagagaattattcccagtcatttggggtagaataaacctttaattgataaatgtcaggaaagatggtaaaagtaaggattaatgcacattcaatcaagctctgatgaatacaaagtacaaaaactgccaatgaaaattgaaaaactatctatcacttctatgattttagagagcatgactaagttgtatttacttgaatgttatgcactggaggagggtgaaatatcgaagaatacaaaggtataaatcatcttgtccaaaagccttggaaaaaataataggacaagaactccagttccttaaatccctaaagtaaccggagatgtctcatgaaaaggggatgaaaggaactttcatactcataatcaccaaaagtaacctggaaaatggtatggaagttctgaagaggcacgccggatattctcatcaaggtagaaatctaccagttggagtgcacaccaacggcagtacactgaaatgattattcccgtaccaaagaatcaaacaagaagaagaagcattacaaattacatgtccccatatattcatggatcctcgcaaagtgtctcatgcaactaacagaagttggcaacgagacctatcatggacaatattttcttcagacatcaaaactcattggtagtcaactagaagttgaaaaataaactaaaagattgacttacatattgatccactgttgacaatgcatagctaaagaaatgttggattgagcactcaaatataagtatgagaagctccaaaccaagatggtgatccgaatagtgtgaaaatacatatgttcctcggtgtcacgcccggaatttctatccaaaattccaaatgcttatatgtgtgttaaatcctcgtccaggaatcagccgaggcacacaataacaaattgataaaaagtacaagtctttatctaatttattaaacgaaaatatagcattattacagaggtagatagttcctctcaataaataaaattctaagcagcggaaaataaagataaaagggtaggcgactcctctccacaagcagcaacttgacaaggactcagcctaatcctcctgagcatcaccttcgctatagaactcctcctctgatgatggatattgcaaggtgagtacttcgaatactcaataagccacacagcaaatatgcaagtgcacatgataacacaaaggatggcataatatagctcatttgcataaatagcatttaataaactttagagagtaataaaacaattgtagtaattagacattattaaatcaacactatacaacataccggttgtataggcccaaccaaacctgaataacaaagctcggtcgtacagatcaaacctccaactaggaattaaccattccaaaccaggagtttaactagaatcatcattcaccacattattattattattgttgttattattaatgaatagtgtgggactaattacgaaagacattattaaacccgcccataaccgcgggcacggctattcgaatagttttactttgatcagaggtgtacaaatttacccacaagacacaatgccacagaatgtcaccatatcatcatgtgcccatgctgaacatgtcaccatttgtgtagttgtgacaagacccctcacataacactactcaaagcagcgcaacattcctggttcatagtcacccccttataaaaccaaggtatagactcccgagcgacccccgtgggcttatctccgccacttctcagtctgcactccacaatgagccatgctatacaaagcgtctagtcatttcccactctggcttgtggttagtactgttaatgtttcacaacagtagctcgcgaactggtccttaattatcatgagcacgaccctcaaaatcttgtgcttacaacccaccattgttaggttttagttggcaattcattaaataactaatcacaattagccatcgtgagctaccattaaatatatgataataagtgaattatatgttatcccattaatgaactaatgtttctaagtatggctaagcatcctaatagctttagctagaatatatattactccctccatctacttttgatagtcatatttcatcttggcacacagaccaaggataagtaattctacttatcatctatttaaacatgctactagtcattcctcgtaaacaagcgattcattaatatttacatttctcgatgcccatgtagccaatcttatgtggaagaatggagagtcatgcattaaatccgagaaaatcattaagatgataggttgttggattgaaatatacctatcaaaaatatattttgcagatttagaaatatgactatcaaaaatagatggagggaatatgtcctagctaaccatattattgaccaatttacaaaggataggtaatcaatagcaaaaaggaccatatcaaaggaataggttcactacccgatgacattaaaaaaaatgcacattagaaataaatagagactataaatatagggcaacatgctcaaagggatgtttgggatctgagtcacttgccttgcgttgctttgtaagcttatgaaccttcttcagcgtaaacggtctcctccggaacgtcggaaactaaagcaattgaacaacatcaacaaaacagtacataaacaagcatgaacagtacatgtggatatttttaatctgtagatcttgattttagacaaatttagagacttgagccacctagctaattccgagttacgatgaattagttatgaattttctaagattaatatgattttagccttatacataaaatgatttacgattaattttctagaaaagaaaaaggctgctgaagccactaacatcagcgatgacatcatcatcggcggagcggctcgggaccctatggactctgtcgatctagggctaggcggcactagctgagggtaccattgcgacgagtgtgatgcggggaactcaccggtgcatggcacgacaacggacagtgacagtgacggcgaaggggcggacgaggtgcgtctcctcctcacgaatccagcggtggcgatgcgagcggaggcggtggctacagcggcgccgcagcacagctagaccggcggcggcggcggcgctagggctgaggcggcagtcgggacttgagggaaaggtagaggatggctaggggaggctttatataggcacgacagagagagagattgatcccgcaacgagaggaattggtgtcggaaaatctatggtttagtttggagagataaactcgaacttgaattcgattaggattatctacgtggaattgtgctccgattcttatgggagaagatggaggaggataaggggatgatttcccctcttccggccaatcggactcaggggcaaccgatggcagcggattcgactgagaggcggcggtggctcggactcggccaggcggccggaggttgaatacgaccccgacgtgtggggcccacatatcggtgggagggagattgagattgagagagatagagaggagtggcacggctgggccacgcagtgcgcgcgcgggagggaggagttgggcagagattctaaataatgcattaaagaatatattattaaattaagcgattttcaggatgtgacactcggacatagttcaccaattctagcaagtaatatggttcgaacttcgtccaaacctcgaaaccaatatcaagaagaatatgtgcgtcacaccaactttaatagactgtacgaaccctataagtcagggaaaaatgttgcaatatttgactattggatcatcacttgcattatcttttgaaaagatgcaagcaactgagttcgaacggttgaaatttaaagaacatgcaaaattcaggggaataattttgctagtctattatcaaagcttgatctaaaaaaccaagtacccaaaaccaactaagaaaaccaaagcaagaatttgaatagattaaactcatttttttttctcttagataagttttccttcactcttataaaggtttttaaccatgcgacatacatgcgcatgctttctccagtttttcccattatgtttttctggagatttaaaaaggcatagacatcacgcggtgagtaccaaaaggactgttaaaaaactttaggcttggcacatgaaggccgggctaaaatacacttattgtgtctatcactgaaccttccatatatggatttgcactacataaatagaagagggctgctcacttgtacatttgaggttgaaaagagatggttcccattatcctcgagttcttagtcaaactcagcttcatccacctttcatggatattggcacaggcaagcgaaggaaatgaatggaataaaacaatacagtctccacatttgtcgatagattatatatatgttggattacttagtagcaggggttgtataacaattgttagactttgcactaggatcacctaggttagatctagtcgggtggttctatttgggattgatgtttgaactatagagattgaaaacgggagagggtttagatagaccgaccggttgaggtgttggaggatgaagaagtgccggccatcatcgtcgttggcgctcggttgtcgtggatgcggcgccggtgaggtcgacggcgatgacggctgcgggagtgacggtcgtagatgtcccggcgatgaggtgtggcgcggcggtggcgcttcccgtcactggctgcgccccctctcgatcggattagggtttgtagggtggagttggcggcggcggtgaatctcgtactctctgccgtgccggcctccacccctcttttatatggcgcagtgtgacgggcgcccaccagccattgggctgggcgcccccgatcagggcgcggtcaaggcccccttgagccaacggctcaaggggagagagatctatctaacattctcccccttgatctcactttttcttttagctttttctattccatcacagatttgtaaatatagcatgtttcatcatcacggtcaatcaccgatggattcgacagccactatacacatctctattcagaaacagatactttacttttgggccctgtagtccaggattcataaggcttcccttaaacccatgccggctacatgttccttgaacacgttgggtggtaggcctttcgtgagcggatccgcgagcatcctttctgttttaatgtgctcgagactgattgtttgatcccggactttgtccttcacaatatagtactttatgtcaatgtgtttggcagcaccacttgactgattgttgtgagcgtacattactgcgggttcgttgtcgcagtataactttagtggtttctcaatactatcaaccacctttaaaccgggtatgaacttctttagccagttcacctgccccgttgtctcatagcatgctataaactcggcatacatagtagaccctgcagtgatagtctattttgagcttttccatgaaatagctcctcctgccagggtaaacacgtatcccgatgttgactttgtattatcttttgcaaagtcagaatctgagtaccccactatctggagtgattctgatcttctgtaagacagcatgaggccttttgttccttgcaaataatgcaagactttctttattaatttccagtgctctaggcctggattactctgaaatctgccaagtaacccggtaacaaatgccaagtcaggtcgtgtgcacacttgcgcatactgtaggcttcctacagctgacgcatatggctttgttttcatttcattgagctcatactgatttctgggacattgcgatgccccatacttttcgcctttcattataggagcaggtgtagtactgcatctgtacatgttgaatttcttcaacaccttttctatatatgtcttttgagaaagtcccaatgcatactttgttctatctcggtgaatctctatgcccaaaacatatgaagcctcaccgaggtctttcatgtcaaagtttgaggataagaatttctttgtttcctgcagtagactgacatcactactagccagtagaatgtcatccacatatagaattaggaaaataaatctcccattcttaaactttgaataaatacagttgtcctcgacattctcttgaaacccaaatttctttattgtcccatcaaacttcaagtaccactgtctcgaagcttgctttaatccataaatggatctctttagacgacatcccatattttcgtttcctttcatgacaaaacctttcggttgcgccatgtatactttttcctccaaatctccatttagaaatgccgtttttacatccatctgatgtaattccaaatcataatgtgccactagtgccattataatcctgaaggaatctttacaagagactggagaaaatgtctcattgtaatcaatcccttctcgttgcgtgaagccttttgccacaagtcgcgctttaaacttttctatattccctctggagtcatatttggttttgtagacccatttacagcctactgttttggctcctttaggaatttcttctaaatcccaaacatcgtttagtttcattgatttcatttcatctttcatggattccaaccattcagatgagcgagcgcttctcatggcctcttcatatgaagtgggatcatcctccatatgcgactcttctatattataaactttatagtcatcacggatagccgatcttctgactctttcagaccttctaggggcctgcacatttggcacatcctgtacctgaggctcttgatgagtctcctgtactggcacattatttatttgaggctgttgtagctcctcctctggtgtggcaaccatttctgttgaatcctgtataacaggttcctcactctcattcaatgttgcgacaggaggggtaacaacaggtgctggtacctcaatgacaggcattgcaggcacaacatcagcaggtagagagaagaaaggttcctgagtcgacggagcgggtacagacacccgcctctcctcaagatcaatttctcgaactaccgagctccccctaatcatttcgtcttccaagaagacggcgtgtctcgtttctacaaactttgtataactgtttggatagtagaaacgatagccttttgatctttcaggatagctaataaaatggcagctgactgttttggggtccaacttcccaatatttgagttaaatactttggcctctgtaggactcccccacacacggaggtgagttagcgagggtactcttcctgtccatagctcatacggtgttttgggcaccgatttgcttggaactctgttgagaatgtgaatggcggtttttaacgcctccatccataaaccgagtggtagtgtggagtagctcatcatgctgcgcaccatatccataagggtacggttgcgcctttcagctaccccattctgttgaggttcgcccggtgttgaatactgggctactattccattctctagcaagaaccttgcaaaaggtccagggacttgcccataaggcgtatgtcgaccatagtactcccccccacggtcagatcttactactttaatctttatatcatgctgattttcaacttcagctttgaatatcttaaatttatccagtgcttctaatcgctctttaattggataaatataaccatagcgggagtaatcatctgtgaatgttatgaacgagtcatagccatccacacttttcacaggaaatggaccacaaatatctgtatgaatgatctctaaaattcctgcgcttcgttttgcaccctttttgatgctctttacaaattttcctttaatgcattctatgcattgttctaagtctgagaactccaatggaggaagaatttcattcttaactagtctctcaattctccccctcgaaatatggcccaaacgacagtgccataatttcgatgagacatcgggagttcgctttcttttcttgttttcttttgtcaatgagaacacaacattcacattctcagaaagagataacaaataaagctcgtctcgcaacacagcaagaccaatacatgcattattatgccatagttcacatttgccacttccaaagcggcaatcatatccatcaaaatccaactttgatacacttattaagtttctttgcaaagaaggaacataaaagacatctcgaagtaaaagtatgaagccattcgcgagctctagaggaagatctccaacagcttcaactttttcttcaactccattggcaactctaatggtgctttctcttctttgcgtagtcctcgtcgaacggaatgcctttaaacaattacaagcatgaatagttgctccagaatcaatccaccatgtggatctagagtaaccaacataatgagattcatttacaaatgtaataatgttctcacctttctttgccatgatcattttcaaaaagtcaggacaatctttcttgtagtgtcctgtcttcttgcagtggagacattgatctttctcaacagcgaactgttgttgctgaggcagatgctgagactgtttaccttttgaggtgggagacttgtggttctttttcttatctttaacatagtttattgaaccaccatttgattctttgattctctcctcctcttgcacacaattagcaatgagcttctcaaagttctatttctctggacttatgttgtagttgacaataaaattgtcaaactgctttggcaatgaggccataaccagatggaccagaaagtcatctgttatgcccaaatgtcacgaccggaaataacccaacgggcgttccttacgtgcgtgcattaatccttgtcccaggaggcaaggtacaccaaaagttgatacaattcaaagtttaacaagcggaagcgtaaatagttaatttattacatgggcagcgaaagcccagcacacacaaagacaaacgacaaacagcggaagactagggcgacgaccacaggcacttgacggcaggcacgagctagacaccaaagccttcatcctccaggaactcctcttctgggtttgggaaaaattgagcaagactgagtacaaccaccgtactcaacaagacacacccacaagtgcagaataaatgcaagggagtacaaaggagttatactatagagggttagggttgcagtaaacagcatttaaagacattagttgctcagggctattttgcaaacacgattctagtactatacaatattatttatcaaagccgtgaacccacacgaacctgccttaacccaaagcctacgatgattca

SEQ ID NO: 24526 - DNA, 15416 bp, Oryza sativa
tataacgttgaccatcaataactttaaaaatatttagtttaaagaaactagaaaaacatatatagatttgtctttcaaaacactataataaaaataaacaagtatttatttattgtatatattataatagaaaaatagggtcaaaggtatattttgtagagcgtgtcattgtccaaagcgtcaattaaaataaaactggagggagtagtacactatttgcatgcccgtaagcaattgtttttaacctctcgtccttttctacatgatatacaagtaaaagtttgactttagagcttgtttggtttgataccaatttattaccctactaaaattttgttaacttcaataatagcaagtgcatgtttggtttgctaccaaatttacccacaatagtttaaattgaatactactcctactcaatttggtagtatcgaaatttgccaacattttagtactaccaaaattttggtagggcaaaaattggctcagaaccaagcaagccctttttgtgtgtgtgtgtgtgtgttgggccatgcccaacaaattaattaattgcatgctactagtacttagtagctacactctcaaaaaaaacttttaactacgaacttagatataaactatgtccagattagcatactctccatccttaaaacacgcttataatcttctcattcaaaaagacctaacctatattgaaatgtaaaatttcagaatgttgtactgccacatctgattttaatgtaggttttttttttagagaaaatctattctataccactgagtttgttcgagttcaacaatttgtcatcggcattgtctctttctataatatactgacgactttatcaattggtccacaatacattgttgggctggaccttcttttcaaaaatacccgaaatacccttagagagatataagattaacaattgatttatctcataaaaagtttcaaaaaaatataaaaattttatgtggcctccttacacaatatggaagtttatatacaagttttaagttttttttttatatttattttttagaaaaaaaatatttttatggggtatatgagagagaatttgcttatacaagacataatagcacaaaaatatcttatgtagtgttatgaaagatgatttatattaaaaacaacaataaaaaggtattttatatagcatataacaaataagttatatcttttataaaaaatagaataaaaaagttgaaacttctatacaaatttccatgttgtgtaaggaggccacataaaagttttcatattttttgaaacaacaaattaggtaaatcaattgttaacactgtatgtccataagggtattttgggtatttttcaaaagaaggcctagcccaatagtgtattgtaaaacaattgataaagtcaacggtatattatagaaaacgacaatattgatggcaaatcgttgaactcgaaaaaactcagtggtataaaatagattctctctcttttttttacggaggaagtacatcataccagtcaaatagcaaaatataactacaacattatgattttttttaacggcgcgtagtcccttctactcgaggagcacaacatggttaggcagtgcatgatcttcgcataacactatggttagactatcatacttcaagctacaaacgtggagcggtttctttcggatgtcggagtcggtgaagacccagttcaaaaacagattataattgttggatgttacatgtatatataatcaatataacattaatttagcaatacaataggcaacactatattaattaatggataatatatcgtaataactatatacttaaatgttaaataacatgaatacatagtctccataatataaaaacgtagctacacaagtgtgagatgagacgataagagcctcagactaaggagtctaggttaattgataaatgatgtgatggctcgtgttgtatgtaaccagatctagcggttacgtgggttgacaattttaaattatccggcatatggcctatcggataacccggtagaaatatctaataatctggatcactggatctagagatactatattcgtattcctattcacaccattctatttgcatccgcattcatatccatcagatttctatacaactatactatatccgtgtttcagacatatttgaagggggagcggagcagatatttcttttagattttgacctttattcctagttatctccctaacattttttttcttttgcccgcgattgatcatcagagagtgataagtgactcaataataaaaaagattgatttggtttgctacatataccctattcccaaaaaaaaaagttctgcctacaaatatgaacataggttatgtccagatttatggttagaagttaggctttttctcttgacggggaagtaggaaatattagtaggtaggtaaggattatttgagtagagcagatagcaatcataccaaacttttgcgcttagcaaatggaataatgtcgaatcaactcaatttggtgatacatccaactaacacactctaccaagttctggtaatgcaaaaaactattcaagtatggacacttcaaagatttgatagcaacgcgatcgagttaaaccaaactaaaccttttgacatgtgcaaagtactagaataacattatatgtgttttggaacggagagaaactaattaccaaatcttttaacgacaattcattatttgcttaacaaattggcctagctccttattggccccaagtgaaacattgctttctacatgcgtgcaccctgattccaattattaacgggaccaatagactgttactcagttcatcttttcaaggcattttcatctattcctgagcaagtactatgattatagtaaatatatacacactcatcgatgcaagttagagggatacgtgtctctgacacgtgcacccatgagagtgggtcctacctaacagggatggatgtccctttaactttacgtaaaaagaactacttccatttacattatgagtgttggtagccctaaaattttaaaaataattttaggggcggagtttagaatggagcagtggagtggtccaaactctactctatcattctagtttattttaagattactctagcttgttccacttcgcttttagatgaaattaaaattgtttggttcagttttagctagaggagagatgaagctaaaggagaagctttgccaaataaatcctataggatgggaagaccccaagaagtacaatggcaaagtttggttccttgccaatatttttgacatcaaaccaaatggacccattactactttgccattaccaatttttcctttttgttgttaaggttgagaatggatgcaatccacaagcccccctaatcccaggtccccgcaagtgcacctttgatttggcggagaatgatttggttggttggagtgctgtctcagactcaaattctcagtgcttggcgctgacagtgaaggaaacatcatccagatgtttgttggttggcttttttggtttactatatatactttggtcactttggtgagtactagtggcaaagaccagaaaagtgcctcatttttttctttcccgaatttattttaccttttaaatattaaaaataaacatatcaaattttatttttaaaaatatgaacattttgccacactatcctgacgtggcaaaataacacgtgtcagttttatgctgactacttcagtgtgaaaaaaaaagtcagatttaaaaataagtattttgggggaatttgttttttaaactagttgaaaccccgcgcgttgctgcggggataataataagtaaaaataatgtgtcaaatagctaaacaacataagattatgtaagttaacatggtttatgataatttaagtttaaataatatatagaatgataattcaaatgtaaaagtaagatgctatgattttatgaaagtagaaaaatgttgagatagtttggacagtatattaatcatctaaaggctaaaattaattaaggtgatatggattaatgagagaagaaaatgagagataagttggaccatagattaatcttttaagcactaaaaataattgatatgatatatgacttaatcagagaaaaaagaaataacattaactaagagaggatgaactatataggtacatagcatattataaaaataatgaagatatatattgaaatataatatgaattatgtgggatgatgatttaacacgcttgcattttgaaagctctaaaaatttaataaattataaaattatagataatatagcatgtttgcatgatgtttaaatttaatgattgttagtggatagtgatatgacatctttgcatattaatatttagtagttagtgggttacaactttataataagagatgataaataattattagaaagtttgaacaaataaataaaaaaatcgctgccatgtgaacaacacactagggctcccatcggatgacctattcagccaaagaaaaagcaaaaatttaaatttttaaacttaattttgacattgattttgagatatttttaacgtaatttctttttcagcattgacttttaagtcaccaagaacacatatataaaagttttacctataaatttatttttattctttaataagtcgttttggcttaatacgaaaaaagccaaagaggcccctaggagagtggcaccactggcaaagcagagtggagctgtggaggatcagcagcagcagctttcccttagctcgcgagctcatcagtcatcacagggcggatcgagagatcatcgatgggcgaggcggagctgagcctggcggcggtgcgcgacgcgctggtgcgggaggaggactccatcgtcttcgccctcatcgagcgcgccaggcgcccgcgcaacgcgccggcatacgcggccgccgccgccgccggcggccgatccctcgccgagttcttcgtccgggaagccgaggttctgcacgccaaggtaagcccgccacctctcgttgttcttgagtcttgactccccattgattcatgattcagtatcctgcccaactagatccccttacgttttctttaccaaaatcgatcctttttataccatgttgtagtgtagcatagccatgatgaacttgtacaggaagatttttttttgcctggtgaaatttctgaggccaatctttctattcagtcaccttagtgattagtaaactcatggctgaggaattcgtatgtgaaattcagtcacacagatcttacaggctaggcttgtatttcgttaccacattgtttttttggcagtagtttatctaccttggtctccactgtaccatgatgaattgaaagatagcatcggagggtaagatgctgatatgtccattctggtaatcatgcggcattgcggcttatgttggcttgacgaattcattttgagtacctcgaacggacacacagtatcggatgagatttatattaacaaaagaatggctatgctacatgtgtaggtaaatcatgtgttttaaaggcacttccatttacggatcattcaacaagtgaaagtgatcagaagggaaaaatagtgacgatggagaaaaaaagtttgaaccgtaccatcccctattaataatagaaaacataaatgatttactattatttttcttgtactttactaaatgggaaattttgttatgctatttttcaacttgtatatcttatccagcatcctattaaaactgtcaaaatcaatcaacataaaatacagcattggtatagctatgttgacagtcagatattagcatattaccatttccaagcatccctctacagaatctaattacatctgtgaaatctgataggccggacaataccaaaagccagaagatgttccattctttccccaagatctcccttcacctctatttcctaccaaagattacccaaaggtaaatactaagctttacaatattagttacaatgaactgatgactaatgattgttgaggttctgagtttttattgctttgttgttaggttttgcactcttttgcatcatcagtcagtgtgaatgatgcaatatggaagatgtatttcaacgagttgcttccactattcactgtggatggagatgatggtaactatgcagaaacagttgcattagattttgcatgtctgaaggtacatgttctgtgtttattgtttcttttagatattccatcaatttggtcgttctttaaaaaaaacataaatctagttgctactaggatatgttctttcaatctttcagcacgcgaaagcaaaatttgcacaaattattgcaaattaatggtaaattgtttccaatcagtgtatatctgtgaaatgtattgatcatttctttgtaggccctgtcaagaagaattcatattggtaaatatgttgctgaggtgaagttcaaagatgcttcccaagattatagtccactaatccgtgcaaaggttgtttttagttaacatctcatactcactacaccaaattttcttaaacatcttgcaataaacggttgatttatagaaattgtgaatactccttggtcttattctgattagcttcattcttatctagcttctacttagtttcatgtgttagatgtttaactcctgcatacactccatttcttggtaggaactgcctgctaggctgctagcattgggcctttaaatctttaatttattttttgaagctgatctttaatttattatatccctctcttttcaacaggataccaaggctctgatgaatctgctaacattcaaggcggttgaagagaaggtgaaaaggagagtagagaagaaggccaggatatttggtcagaatgtcactttggaggacaatgctgacaagcaagaaggcaatgcaggtgacagtgagtgcaaagttaatcctgaagtgctatctaagctatatgatctgtgggtaatgcctttgacgaaggatgttgaagttgagtatcttctccgccgtcttgactgattcgccaaaatattttcagctgcaaatatgatgaacacaattatgtaagcacatataaatagacttattgaatgtggcatgaggaaatccatcaagaacagctaacagcggtgacttgctgtagaatttccggtactgtatcttggatctttcttcatctccgttttcggagctgagacatatagggcctgtttggtacagctctaactcctaaatttagctccaagagttgggtctggagtggagttgtggagctgcctaaacccagctccacaactctagttcattttgtgagagagctccacccagctccactcccagttttggtggagctgaaactgtttggctgagctccagctccaggaggggtagagctggagctggagctgtgccaaacaggcccatagattgatggcaatgatctgcaacccaaaaggttcatcctacctaactgtggtggctgatactgagggcctggtgaattcccagcaaagatgctgcaactccagtttctgtaacaatctgtaactcctgttattatatcaccatagttttgtgctacttcttggtagtagcatttctgttcaagcttcccttaacatcaactaagtttttcttgaataaatatttcaacttgttcatctgagttgtgtacaaggcaattgaatttgcttctgatttgatatgcatatccaattatccattccatcctcctgcatgatgtggacagcaaattgaaatgccaaaaagttttttcttcctccttaaattgggccgtactcttgttgggcctgggcctccatgtctccccccttcttctccgaccagcaacggccatggcagcggcggcggtcgaagcttggatcgcaccggggatgcaggtcttcgctgcggaagacgccgccgccggagaggagcccggagggtggagaggagagcagcgacgccaccggcaatgccaagcccagcatccaggtccgtttcccctcctctctgctccaagatttcacctctcgtagaggtgacttctctcatgtggttttctcatgtgattccatgggtggccttcctgccctggtctaactgatgaatataaatgcaaatgaaaattgcacacagttgattatttattttttttgaacgaatcgacgaggctgccaatttcattgaatagaggagacgaaaactgtacaaaaaggataaggtacaggaaaaaaaaaacagggccgtggccctaactataggcagttacattgtcaaccaggcggcgagattttttccgcccgccaacccccatgtttttcttcctcctttatcttggctagcagagttagcgccggcaactccttgtgctggaaagtcctccggttacttttgttccatatctcatagctaaagcacacagttgattagaggttagctcatgtggactatcgtcctgcctcctgatggagacttatattgtcgttaaatgccctgcgatatgaatatcagcatcaaatgtgcttcttgtttactgttcaacttggtttaaacatgttgaatgctgactggacaggactagatatgaggcattccaaacttagttgacaggcattgcttttgacagcgtaggtggtttatgaaataatttatccttttcctaatgttgactgccactgaactattttcattcttttcttaatgttgactgccactgatctaatttcatcgctccacgttgtgtcaagacagatgaagtgggatgtgacaggaggggagttgttttggtggtgagtttgagtaccagtggtatatatttttgcattattgtgagtagtcttctctagtaaattactgtttcagaaaatagtttatttatctgtttgggcataatttacaatgtcttgggactaaacattatcatccactgtataatatttctttaatgatgacttggtgccaccttggcaccttctcattttcctgattctttccagcaaatctactatttttcctagtcatttgctttcttaacttcagtacattcctcatgcaccagcaaggccaattaaagggtattgttgttgcatcttcttttttgtctaacttttctaataagatcttttcttctttgctcaagtggatcactagctgattggacgtttttttttatctctggcaaattgtagtttttagaaatctagaattcagcgcatagtttcatgcaggcagattggaatgattatgcgtattccatgtccacattgcggtcttcattaggcttaggtatggtgtcaggacctagtcataagttattctcagtctgcatatgagagccaacaacaaatatgcttttgtgtctttaatttgtagcctcctatttatgttagttctttagaccaaaaaatatcaaagaatgttctttgaatagtttgaataaattttacatgacatctgacataaacaattgcacttttgtcttgatacaaacagaatatcttttattctgttctgatgtcactaagaaaatgatttatatgcacctcaatgttgacttttaaacttgtccttttgtctctactaatactcccttatgtccttttgtcgctactaatactcccttactcccggtgaaaaaaaaatgtcatgtagttccccttagaccatcgcatttcctcgcttgtttgatatcgtattcctaaccatttaaacatcatattgttatctagtatctttcatacaggttatttcatttcctccaaactatctcttgtttttctttgctattcttggctacactctgtggacgatgctagaggaatcaatctgtcagtggtcatgactttgcttcttatgatcttatccaggttttagaggaaaaataggaggacactaggttatgaacataattatttgttcttttgtttgtatgttgtttgtatctggtattattgtctgaagaaaatccaagttatgattaggtttatgagggccttgtccagggcctactgattagaatttgagttccttttcatgccatatggggttggtacgatgtgatcctaaaatggatatttttcttctatggacttagtttaactggccccatcaaattgatgtctgaaagtttctttttttttaaaaaaaaatcctgggatgtatgaatttaatatatcatatgtgatcttgtgcaagatgaaaaaattgctacaatataagtaatcacacccattttttattatcctttgctttctgaaactttactcattcagtcaatgatagttctttttttttttcagaccagagaattcttcagatgtaattgttccctttgaattttctgattgatgacagcaagagaggacccaagcacaggctgtctgaatctgtgatttgcacatgtgttatttttctcttgttacacagttaatctggtccattttgatgatggaatcttcagggtttagacttagtaggaggcaagtgctaattgaacttactacactattggggtgtaatttttttttatctatattccaagctgcaaatttgcaatgaatttctttttttttttttgcatccatttgcaaagcttgcagctcacacacgtcatgtatggtgatgtatttacaacgtcgtcagaataccaaaactgaatggagtttcagaattcccgagggtccacgaacaggacggacgacggcggcgccgtcgtccagtcgtcgtcgtcgccggcggcgggggcggcattgccgttggcggcgacggacgtgattttcttgatgcaccagacgtcctcgtcgcatgagaagcgtcgccagtgcggcacggcggcggcggccgggtcgtcgggcgcgacgtcggcggcgacgacggcgcacgccgggttgttgcgcgccacgttgtgggcgtggcggcagagcgtgcggaggagcgcggcgcccgccgggccggacatgtggaggccgtagaggaggtaggcgccgaaggggcggaagacgtcggggacggaagggacgcgcagccacggcgcgcggcggtcgagcgcgcgcgccgcggcgagcgacgcgcggagcagcggcggcgcgccgccgacgcggaagctgagggagcgcgtggcgtcgtacacgctgagcaccgcaaacgacgacggcgcgccggcgccggggctccgctcgacggcgaggtacgtgccgcgggtgagcttgtgcgcgaggagcgccgggaggtcggcggggacgaactcgggcgccgccgccgccgcggggagcagcgcggcgtaggccgccgcggcgagcggcggcggcagctgcagcacgcggtgcgcgcgcgggacgcgcgcccggtgccggtgcacggggtggccgaggaaccgcggcttccggaacagcgcgtacttgaaccggccctggaacagcgcgagcgacgccgcgttcgacgccgtcgtcgccatggtcgcgtacgccgcgcccctcgccgcgcaccactcctccgctctccgcaccagctccgtcgcgatcccgagcctcctgcaaaagaccgaacacctcgtcgtcgtcagcaccagctagctcgatcgccatcgccatggcacgtactacaaagcttagcttggacacgcatgcatggtcgtccatggcggcgtggatgatcgatcacctgtgagacggcgacaccctgaggccaagaagacacgccgccttgacaaacttgttcgtcttcgtcttcgtcttcctcaagctgctgctgctgcctctggtcaccatcctgacacacgccttgatcactcccacgacctcgtctccacactcagcgacctatacacagatcaaagcagccaatgacagcgcattaattacgcacgcccaagcaactaatcacatcaagaacatcactgtaagattaacacagtgcatgcaacaacacagtgtcaggctgcctgtcgagattcgctgtactaggacatatttcatctggtcctaaatttttatattttggaacggatggagtagctaattaccaggatgacgtggtccggagcatggcgaacccgggcgaacgggtcgccgatctgctcggcgtagagcgacatgcctctcttcttcttcttgccgccgccgccgccggcgccgttgtcgccggagaggccggcctggcagaggcgctcgagctcctccaccgccggtaagtccttctccatgatgaactccctcactctcaccatcttcttcccagctgccatgatcttctcctcctcacccatctcagtatatacttctagctaattgtcttgtggttttgtgactaatcaagcttgtagctagcttattagctagctgatcctgactgatcttgctgggtgatgaattctctgctgctgctgctttcttctcagatgggagggaaggagctgggaatttatacacataggttggcaggttagggatgagagtggcaggttgtgtgtattacatgtgggggccatgggaggagaaacaattaagtaattaagtaattggttaatgggtgatatgcaaagtaagcatcagaaggaaacaatggtggccttttgtataatagcttgtgtgagagcttgatttgatcattaggaggattaacaagtgtgtgtgtgtgcgcttgtgtatgatggcatgcaaagctagccctggcataaaatatatatctttgtgcttatctaataatgtaggacctagctaatgctatctctcacatctctctgcagtcatccatgtcctatcattagcttgcatctctcctagcaaatgtgttaacctagatggagattaatggggcctaattaattacaagtttacaactagttagtgatccatgttagcttttagctagatgcatgcatggtagaggcatgcatgcatccttgaattatggattatgttgtgtcaagttcatgacaccattgcaattaatttagctaccaagctacaatgacatataccatgatataggaacactactctttaaataaatgagattctaaatgtgtaactttgcgttttctatatagactagctaagatcacctagcttcgatcctgtatatcaaatcaaattaattagaacatttttttagggtgagaaaagtggcataaattaattagatagaacataggccaaaacctatcaattctagggcatcaatccaacaaatattctggacaaagcaagcatttgtgattatgtactcaggatataatcttagggcatataatatatgtctctcctacacaagtgagatatatatatacatggaagaacaaaaataataatcaatccagggaaaaaaaacactttgctaactagagaaactttagatgtgatctaatttattttggcaattggcatctttattagatcatggcagcgtaatgattgtgtgcattctctcgttaatgcagagacaagaagttgtactttcattatatctttaaggggaaacataagagattaactttggatgtgtttttctctttcctcataaaaccaatgtgctctggaggatgatgatatatgttggatggtttctttttcgtgagggatacatgcatatagatgaaattaaagattcaaattaattagtggatttgtcagttgtcacaatcaaacttaatttttttctcctaatttcatttcaattataagagagaagaagtctcaatcggttgatgtgtcattctgtcatatatataggcactatttgggacagaatctccacaggaaatctcaaggagaaaacacgctgttttcctgaaaaattccctgttcttgcgtctttccaaatgcagtggtgatgtggtgattgttacataagtcttgtatattctgatgtgtttttttagacaatataatactaattaaaaaataatctgatcagtatatgctcaagctatttcgtactggtcagttaaataattagtatgtagctgcaggtctctattaaccccaattagttaagaataattactagtacttcacttgtggacttgtcgctgtgcgtgttcaacaacttttggtcgattgatgcttccttgatcctctagtaaattgcacatgtcttcttcaatcatatatagcttaaattgtactagtgttaagatataattaattaccgggaacttgctaatgacttgctgagtgttttcttgtccaatcctaggaaagtttctgccctatataatactacatgcttgggttacagagtaattaagcttatcgatgacgaaaggttaatttattctatacacgcagtcaagtgaattctgaattaaacaggggacaatgtacctttcgtaaaatcttgtttaggtgatatcatacaaactaatatatacaatcattacacattcgtgcacatttagcgtaaatttatgtgccttcccacaatctataggatatgatcggaatatttgatgtatttggaattttcgagcttgtgtagagaagaccatatatggcgttcacgaaaaaagatgtgttcgggaaagaccatatatggttgtagatgtagtaaatatgcgcgttatacttatttgtcgaaagatgtggtctgcctattaatttttctagaattaacgacaaattaccatttaacaaaaagatttaacaacttgacgttaaaatgctttctctatcgacagacatctgacgcgaaatctggatcatggtgtaatcaacgtaagcataaatttgagatcaaattaagttaaatcgatcagagagtgtatttcaagatatgtatttacagtcgcgttgaaatatttacagttgatggagcatatttatactactttgagctagggacgtatttacagtacagtagatcagagatccagtgggcgagggtgcaattatcgcctctgttttagtaatatggtagcgtaagttagaaaaattaatggtcgattagccaatgaaatcttgatcaagatatagtgaaaagacgatgaaaaagaaaatattggagaggagtatatttgtacaacttgtgtagcttattagctaatgaactaccaataatgctaattagatattgagcatatatgaaagcacatattgactaagctagtggcgtgttaataattaaggttgacatcgtcttgaccaggcgagcataccgggttcatttccaattaattagtgtgacatgtctacaagtgtagtaccattaacatatatacaatctcccctcgaggaaaaaaaactttataatctatacattagaggaggtcaaaaatagttgtgttcacattgagtgaagtctatatacaaaattagttagcctgtgtacaatgcattctgaattttattgcctccaggagtgctatttaatttagctcactgtctgtttgtatgct

SEQ ID NO: 24527 - DNA, 11032 bp, Oryza sativa
acctgcaattttttatatacacttgttatatcattcattactgttttgtactgttttgcacgcagctgaagtgcattattcgtattctctagccacagttaaaagtacttttcttctgacttacctagtgttcctgacataaataacaagattgtatgatgaacagggactgcatgtcaagccaacagctggtggatttcatccacgagcatatacagaaggtaagttaattttccttttctaattccaaataccaacagtgaactttggaggaggctgtagtacttaccaattcagtacttgccgtgtgaaaaaacaaaatgcaggagagcagtctttctgcagtgtgcgaaagagtgctcgacagatgcctagctccatcaacaattggtggagagggatgtgacaacatgaccatggttctggtgcagttcaaaaagcctattactcagaataaaaaagccgacgtaggggagcaatctgtgaaaggtgtggaagaggctgagatcaagtgagtagaccttcatgccaccatatctttctttcatcaatcattttatgtaaccccttgtcagtgcactaactcgaaagctttgtgaccagtgctgctgaggagaatggttcttgacgccgatgattatgcagacatttgctttcataagcaggccgagtggagcagcagtcactgtgtgtgtgtgtgtgtgtgtgtgtatatatatatatatatatatatatatatatatatatatatatatatatagatatatatatatatatatatatatatatatatcaattgtttgtcaaatgatgtatctgcacacattctgctcaagaactcggagataaatggcactgaatggagcaactgtgaaaacctaatgcgcagtttttgtgcgccatccaccattcgttgtcatgccaaaaagttgaccgtcctgattgtggatatgatcacaattgtcgacaattagaactgatcaagttgctgttttctgttctttgcatacgctgtaaacgtgggcgagttttttgttctgctgtttttttttgggtgtgtgcgtgtgatagatatgtcaattgcaattcatgccccatttgggttattgcttcagatcatgtccaatctgaatccagtttatcatgtgatatctgttggttagttcagtgccgtgctgctgcggtgctgccctggtgtggtgaaaatgtatgcctgttatgcatatggaagtatggaacaatttggggattttgcaaaaaggaggcaatgcaattacatttcatattataaaatttgtctcaaacccagtatgtgaaagcataatatctgacaaaaaaaatagattatggcatgatgtgaggctttaggccgtcaattagattatttataatgtgacaaaggaaggacaagatctacacggatgcaatagggaatgaccctccagtgtacacatgtagtctgataagacagtctatttcaagggacattcgcctgaatttcatctaaattcgaccgaatatctataactaaagataataatcatcacatggttcaaacactaccgcgaaaacaaaaggctagtcagccatctctacattgacaaaaaccacggcaatcgagacaaataacagttgatttcacctaggattagcagagctgtgagacttctgtttcgccttctctatcaggggcttcaactgctgcctctcctcaagaatcttgaggaaattgaacaagaatggcacatagttgtgcttcctcctgatgttctctgtcttccacttcttccacttctcttcctccattatgatcttctctgttacagcctcaatatgagcagcaacctccgcaagagagtgctcaacagatggcgcgtgcctattggcggaaggatcacccatctgtgccaggaggttctccctcttcctctgaagctccttgagttctaaagtgaacttctccctccggttctttaggatagccatgacgctgaaccttatctcattctgagagaaccgatcgatgcgttcctgaatgacaggctgcaccatcctcagccaacctatgtcgccaacgccacctgggcatttccccaggcttattggcccttcctttagcccatcaagctcatacaggacaccgtccacaggaacatagctaatgaaatggtagacatcatcatccttgacagatgatttctgctcctcggggacttccggccttgcaaatgaattactggccaaacggatgctctcagaattgactatagccaatcctttgagatctggtggcaagtcctttgcaaactcctttagctttttgagctcctcactaagggtgatacccggagagtttaatagaacagaaacgatagcttgggtggcacatgcattgttaattatctgtaagtgaagcattgagttgatcataaaaggatgcagaggagtgaaggctacacaaaaataaacatataaacagctctgacctgcttagcaaagaaaaggtttgggattgggtccttgataggacgctcatctttttctggaggttgccatttgtacagcacaatgagcccataaactggcctggaaagcaccaagttaagttggtttagaaaagaatgaaatttatgatactgctagcaggtattaggattacatactgaagatcattgagggcatccagatcgagtgaatagagttcatcaacctgttaaggaggaataacatagaatgtcatatattaccattcaaggtcataaaaaaaattctagtgtcacagatataagcaaaagtagaacaagatctccaaaaacatatgccagtacattgcatgcatgttttgccatatgttttaccaacaaaatttggcaacaaggttgtatttgaaaagcatagtttttattattcgtgagctaagctaaaaatagagtttcaagaaacaacatcacacacaaagtgttcaatacctgaaggcaaaaacatatattttcagcaaactttagagcataacaaagaatggacttaagtaaatgggttacatgattacttacttgaagacccttcagttgcatctgttgcaacagttcagtaaaaatgcctacagaagatatacaaaagaagggttattgcctacttcattggggaaaaaaaaagccaagtggccaacatttacaggggaagcaaggaatttaacactgaataagaaggtgtaacatggcagatagacctagccttttccaattccaatgaaatttgagttatcttccataacagctaattgactgcgcctcctgttcaatgtgtcccttaggactactggactagaaattaccagagaaaagctgtgaaacaggcgtatctgcccacatctcaatccgctattaccatcgaacactaaacagttaaaccggcagctcagaacaccaaggtccaacagcaagcttggtaatctcatatgctacttaaaccatagatgatgtttctttagggtagtcagaaaaatggcccataacttcaggaggagttctctccaatcttgtgatgagtaaagtggtactacttactactggtagtagttgtttattaaaacacaaaacaaattctaaacaacaaaacaatgtatagagtcgagtcgccgaaaattcagaatttgaatgaaagtcacaaatggaaggtagcgaaactcctccacggatgcgcagagaaagcctagttgaattgttcatatactacaatccatctcttcttttgtatttctactccataaaggtaattgaattttaccaggatcattctcgattgcagcccaagacatgtcgaagaagaaaccctgcgcaccctcctgcaggtctgcagatataatttcgcgtatcaaattaaattgaagcatcaaagaagttatggagaaacaagagctgcctgctgctgcaagaaaccaaatcttgagctaaaccaaattagacgaaagaagaaacaaatccaaccaaagggcttcttcccctaccaacgagagaaaccgacggtccgacccggcagaagctcctcctcctcctcctccttcacgaaccgcgcgcgtcgggccagcgtcgacggaggtggcgcgcggcgcggcggagggagcgaagcggattcggcggcggcggcgcgttggtggactgcgtgcgtgggtcgtcggcgatgggtgagattggactggagagagaagagagagagagagagagagagagagacggagatggttgggcctcacgggagggagtagggcacgggcccatgaaagaaaaaaagtccgttttcaatccctcaacttcacgtcaagtttaattgacgtcccaagtcgtaatcccataaatcttcaccctttatctttgcaaaaccattcacaaaaccattcaagttatgaagtactaagtcctaagccaatatgaatgtgtggttttgactgacgtggcattagaaaaaaaaaacatatggggctcaagtgtagtagacttccacctctcgctgcctatcccctttcttccccatctctcccttctcttatccaacagtagagagaaggccacaaggggactcgacttactcaccataaaaatttaaacactaaaagtagctatattttaggaattgggatgtaacggatgaagtagcaatgagaactttggcacccctttagtaaaaattgagtttattccaagcaattttgttcgaggatggatgaatttatagtagaatttcagtttgaaaggcagcctcaattttccttatgtgaagttgatgccatgtgctcatgcgtgattgatttgtgagggtttgcatttttgaaatggaggaataaagcgaaaaacagtagtactttctatatctttgtcgacgtttgatgtcgcgattcctgtatttgcatagtatggggatcgttggtactaggatatattcgagattgtagtaaaagaagatggagacaaaaattttatacaggttcgggcccctgaattgtcaggtaatagccctatatcctgttggccgaagccggttgttgctcttattcaccataatcacaccagtacaatatttagggtagcctatctatctgttatcgatatagcggactgaagtatcatcgcgtagtcgacaacagagtaatcttcctcctcgaatccgtgccctgcgagattagagacagcgctagattcctctctttggttcccgtaggtaccatatggggctttgctaggcttatctctgatgtcgatatctggcagcttgtcttggcgtatgtaggtttgtattggcttgtggctttgtggcgtctatgttgtccgtgtcccctctcctcttagggggccttgtatttatacccataggtgtctccttatccaagtagaactaggaaaaccaatatagatacaatccgagtagtccatgtcgtttccatgtagaactctagtcatccttccttatgcggaactcctcatatatcccaatgttgtttccgtataagacatggtatgtggtgggtcctaccaagatttagtcaactactattaggtatgtggtatctataaccatcacaatcttatatagtcacgattagcataaagataaaaagaaatattattggatcaattcaataaatataatgtgattaaagatatcaagggtgaaggattaaaaaaactcccttaaaaaggatttaaaaaaacaaatttaaaggagagaggtgctggttaattacattcacgtatatgtaaaattataagcttttttgttataacaaatttggccatgttatttttgttacacaaatctaaacaatagatatggtcaaagctaacatataaatcttggctgcccagattctgaaatgatactacctctattttatattttaacttattttgatttttttgtcaattttttttaagtttgactaaatgtatagaaaaatttagcaacatctacaatatcaaattagtttgattagatgtaacattgaatatatttttgataatatatttgttatgtgtaaatatattgctacatttttactccataaacttagtcaaacttaaaaaacagagtacatttcacaaaactacaggtattttgcacaatttatcacgaaactacagatttaagagcttgtttcacaaaactaaagatttagtgtgttcggttatcacaaaactacaggtactttgtacaatctatcacaaaactacagatttaagaacttgttttacaaaaatatagatttagtgtattcgtttatcacagtgctacacatttagtgtcttcatttatcacaaaactacagatttaatgtctccattctcacaaaactacaggttttagcattgttaaaacgtgtagttttatgagaatggagacactaaatctgtagttttgtgataaatgaagatattaaacctgtggttttgtgaaacaagtttttaaatctgtagttttgtgatatattgttcaaagtacatgtagttttgtgataaacaaagatattgaatctgtagttttgtgaaactagttctaaaatatgtagttttgtgatagattgtgcaaagtatatgtagttttataaaatttactctaaaaaaatattaactatgaaaaaaaataaaactaggattgagtactactcatgtgtactttgcattatgaaacataaaaaaattactatcatgtctcatattttgagatgagaagaatgccaaaaaaaaaaatgtatcctcagattattcaatttgtcatttacccatctctctctctaccttttctcttcaacgatatcctctatcccaaaaatcgagccttttcctccccccttcctcctccaccgccgcccatctcgccgccgccgccgccgccgatggctccctccaccgccctctctccggtggccttcaagtcctccttctcgccgctcctcttcaacccgacccgtaagccatcctctccctccatccttctctctccgcgcggcggagtcagccgtagccgggcgctttccgtcgtcgggcgccgctgccagcgcgcgcgcgcgcgcggaggaatcctccacggcggtattcttcggagcccaattcgatcggggtggcctcgtctccgatgccgccgcggcccaccgctttgcctggcgttcgtattatcgggtggcctcttaactctaattagtgcggatgcgagttgggttgctgtgcttgcggttagggtttcactgggcgttaaaagagagaaaaagaaattcattaagtctcaatttagttgaatgtttttgcggcggtgtgtggggggagattgttgcgtttgtgctgttctaggtgacggccggaaatatttggtttgtttttaggtttgacaataatcttttcgtcggttttcggggtccttgtacaattctatcatttcaaccatgtacaaagatgttccttttttatgttaggaattggtttcatttagttctagtggacatacgattctggcatgtaggtaatttatttcattatggtaagttttctgttgtagtagtatctgtttattcagggaattgtataaaatggagcattacacattagcttagtccttgggcttccgttctccccttttcttttgatcggtggagctttgatctttgttgaccagtgcgtccttgttgattatttttcttatgttatagcaacacctgaacattttgcacctgttgtttctttgttgttcaggttctaagataaatgtcgaaggtgcattctgtttgccatgttacaataggaaaaaggctagcaatagatcctttcgcgtgtacagtttatttgggggaaaaaaggacaaagacgagaatggtgaagaagcaccatcaaaggtaagaaaattagatgccttctttcaatttgaacttctgttgtactcccaataactaaaagagtatcttcatggatgcctgaaatgaaaacaattgcaaattcacaggtggatgtctaccttaatcagttcaatactatgtgctattcatatctttatacttttatctgaatagtaatatgctcaagataatgccttgctcattgcaaattctgttgaagtcttaaactcctgtagaaaatagttaagagtgtaactcatcatgttgatatttcagttcgtgctgaaattaaattctgcatataattttaagggaatataaaatattttaactaatatgtacttttgttatcacctctactttatagcttctatgttcagttttcttctctttccaatgaatgatgccacttctaaaatgataaacttttactttatttgggtatttgtatagttgactaagatgcatgagctgtattcactatgttcccttgtttgtgcacaaatacctagtatagtaggcatttttatttttgtttgtaaacatcttgtagttctcatttttgtacttacttttaggcaggaattttcggaaatatgcaaaatctttatgaaactgtgaagaaggcccagatggttgtccaagttgaggctgtccgggtgcaaaaggagcttgcagcgtatgcatttggatatctgagtaatatttgatatgttatcgctaaatagcacagcagtgtgacttttttcctcttgttttaggactgagatcgatggttactgtgaaggggaactaatcaaggtatgctttggattagttgattaatgttgttgttaactgaattcttgctagctgtatgtttcattgtgccttgaacattgaagggtttctttgttaaatgactgacattttagcattgttgaaaaagcctgttgaacttgagccaggctataaagatcacatattatcactgacaaacattgatctttgtttcactgagaaagggcggtcatttcctacagtaaaaccaaatatattcccttatatgttcttatactgaagaatggcatgtattttttatgatcttaattaggttgatcgctatatgaagtaattaaaatcatttggtatctcttttagctttggcttagataaagttatgttgaaaaggtaccatcttggcacaagaacactgtcaaatctgtgggcagggaggtggttataagtcatcaaatgatttatggtggcataggttgttaccgtttgaaaaggtcactgtcttaactcttaaagccatttgaaaatgtgcatgttaataatgtcttagcttttcaaatgacaaaaataacgttgcaataccttgacattttctcccatgagctaagtgctatgctggtatattttgtagagccatatgctgtcaaagtttgctaaatcttatttgtttcttataagtttagcaggactatccgattattacattcctttgcttttctcgaaagtagaaaatcacatgcatatacttccggtgcaagtatttgacctgattcattaaccaggtaacactttctgggaaccagcagcctgtaagagttgaaatcaccgaagctgcaatggaagtgggtgctgaagtatgtattttatctaccattttaatcattttctttgacgatttcttgcatgttcgcatgatttttggcatgagtcaaccatttcaatgttcacacatgaatttgataaataccttatgtatgtacccgttagcagaccaaaacaaaaccaaattgttcaaagtgtgatatatatagtatcctttcagaaactttctgagctggtgaacgacgcctacaaggatgcacatcagaggagtgtccaggtgcgaatcctgctattactttttgcgtagaaattgaaacttgcgttctatactaacacggtactgtacttaaaacctgcaggcaatgaaggagaggatggctgatctggcacagagcttaggaatgccagcaggccttggtgatggactcaagtgatagtgtggtacatgaatgcttttcaataaaaaaaaaagtgtatctcaattttgtatactagctgtattgagtcatcagtttaaaattcgtggcgagtactgttagctgtgtaagaactgtaatcgagaacatctgatcctgttttccttaatcattggcacaccataatgcattgacgcaagtgtgctgttttacaactgctgttgatgtgcagaatgaaatctgttccaaacagagaaatgggtggatgtggggaggctaattcatggggcacttggcacttggctgagctttatatagtttcagaggccttaatagtatataatggctttgtttggcccaattaaggccattgttggggtcaatagtatataatggctttggttggagatgtgccaaacaaggtcatgttaggcccaacttagcagttgttatttctgtgagtgttagcatgagatgaaactgtctactgtcttaggctgtgtttggcacccttttcccaacctctcttcctcgttttccgtacgcacacttttcaaactgctaaacggcgcgtttattggcaaaaagtttctatatgaaaattgctaaaaaaatcaaattaatctttttttaaaagctaatacttaatttatcacacgttaatggaccgctccgttttccgtacgtactgtttctggaacaagaaatggcaaacacagcctaaagtactagctcgctccgttttccgtgcgtactgttcctagaacaataaatggcgaacacagcctaaagtactaggctcgctctttcatgaacttccatggaagatggaaccttctagttcgagtctacactctacacatatagtccaacggtaagcaaaaaattagaagaaaagaaaagaagatgtatcactcacctttttatcagatctcaaaagggtgaaattaaccacacttccactgaaagctcacacaaaccttttaatcaaatctactttcccaaaatttaattaaccacattcttttccaccgcctgctagattttgtagctgtggtaatagggcacgtaagcctaatcttagtggcagttaaatataaacacaacaaacaaaagaaacccacagtgatgggtgcaggaa

SEQ ID NO: 24528 - DNA, 9355 bp, Oryza sativa
cttgacaaatagctgtacttttcacctttgctatactttcacaaattctctttctaaaatcatgttaaccaagaaactatatagaacgttcagttaatcataaagcttacactcgactgcctgcaatgatttaatggaaattctgacttatactagcatgattgcacaagaggaatccaaatacggagtattacaaaactaaggctcctttcatccttgccatgccataggttttcacaagcatgcacatttttcaacttctggacgaaaatagttcagatcatcttgttttggagaaataacagcagaaacgttgatgaaaatatggaattagtaaaaactccataaatctaactaaataaagttagttagttagttagataatggtttcagaggagagagagaaagaggattactaaaaacaaccctacttcctccaccccaaaatgttacgtagcatttttttaggtgggcacgggtattaaggaagtaggtagaaatgattgaaggaagtttgtgattggttgagaagagaaagtaggtgaagaaataaatggagaatggttgtgattggttgagagggtgtggtagaaatagctacatttcaggacggatgtagtactaaatataccagttgctcagcacatgtaaatcataatattctaagacctcttttaagattctaaaagttatagtcagcttcactgataactgaaacttcttcccgaaggaacgaagtatgatgaatttggaaatgcttttaagaaaacatataacatgagccatcattatccttatatgtcagacaagtaaaagtcatcccaaaattatttacacttcactagatggaaatatggctatctgtgtgcttttccatacagtccacaagcaattagtcaagcaaaattatttacttactggaataattattgaatgcgtttgaatgcgttttgtcaagcagaaatttgtacaaccctcgtgtctatcaaacgcattcaatagttggtatcaactttgtagatacataagcagacaattcacaaaaccatgatgctagcgaaaagtaaaatggtgaaaaaatatagcatgaatcatttaatgctcgtggttggcctctggattccgattatattggccatatggccatctaagatgaagcagcggtaccacaagataccctcttctagaaatcaagtattttttttcgtttacctactgcccttctttggaacagaccccccatctttggactttccacctgccattgccgaatgaataaaaaggccggtctcttgattaattggagcaatagaagaaacaatgtatatatccatcatgattttcaatctacaaagagtaaagccaactacaacaaggtatatgaaaatgtaaaccatatcactaaccttcggaatcaatcctcagcttggcattgggatcaatcacacctcctcggacaaacttcgacccagatgtgctatcacccttgaatgactccacaaattcctcgtacacacgtgccgcttcatcttgctctctctacacagatcagaagcagttaaaatcagatatggatagaatgtgcgtgcaaaaaagtataagtagaggtgtctccagaaagagatttgaaaacccttaccttcttcctcgcctcttcgttctccttatgtcggtggaatggaaccttcttcgaactcatcctaatcctaacataaaattatcaacagatcatcagaatatgagtagcaagcacttgaaaatcttattactctaccaccctgcatgccatgggcggatctaacatgggacatgggggttcattcagttcaacccccaaactttttgggaacaaacaaactgttattagtagtattaaggttaaggcaaatttctagaacaggagctagggttaacgcaaattcgataaaaaaaaaaagtgcgtgggtcgagagagatgggaaagaggatgtgctaaccaggatgctcgcttgcgggatggatggggatcggcgcaggcggcggcggcggtggcggcggaagcagcaggatgagcgacggcggcgcctctgctcgctcgagggacggattggggatcggagcaaggccctgccctgggacgacctactgatttttgttgcctctctaaacccgaccgacctgtgttccaaccggtgaattatagaggtgtctcccggcccggcacgaggtcagtcgagccggcacggcccgaccgtgccttgccagcccacaggctgcacccacggcccaggcacggcccaataaaaacgggccggcccgagggcacggcagcccatcgtgcttctctatagaataagtctatttgtactccctcaactctttgggctgtgtcttacatggctgcctggctggaaaaaatctattttgtattcctcatttttttttggccttgccttatatggttgattaagtctaatttgatccctctactatattttcttcgaccgcgccatgctggatcggcccaccgtgccgaagcatcgacctaggcatgacccaactatcgggtcgtgccgtgcttggaccgggccaaatggtcgtgccttgggccgggccatcaggcctcgaaccttatggctataataatgttatactatattttatttactctatgctttgaaaaaatattttgtataaatatttttatatgtcacttgttatgttgatatatgttaagtttattttaaatttgttctaatgccaagtagatactcaatctgctcaataaactgtttcatattaagtattagactttcttcgttttctagtggataggcagtagcttatcccagcaacacagcagaacgtagccttaatcagccaaatgagtatcttagcttcatggtgactaacttgtggttttacacgctcgttgaattgccctacctcacatagcctattcatatgcctcgcagtttaacatagtaataaaaacatggttaaaaacacatgcatctataaattactggtgaaagtctcttcggttttcacgatagtgttgacattggactagcctgatttatatggaatatacatgtggcttttttgccttttttttctcttactcctagcctactagtaaaaaatgcggagtttaaggctttaggcgacaacatgatgacttcttctgcatgcacaaactaactactatcttgttacttgatgatggaagtaaattgataattttattttgaattggtcactctatttttttacttgaatatattggacgcgttcgctagttattgctacagttgtgttacatgttgtgtgtggcggcggcaatacagtgcatgcgcaatacaaccaatcaaacatgttcatatattagaatcaaactcattggtaatgatatgatatttatattttttgtatagtaaataaataatataacaacaaaattcataaagtcacatcgaaaataattatagtttagagaaaattggacactcacgtgaaaaaaccggaggggaagaaatccacggtattctattccctacgccgcttacccttccaccggaagcaacactctcctctcctccaataattaactccaacgtaaattctgtaatctacaaggacccattcgcaaaaacatccccgcagcaattctgtatactactcccgcacggtaagctaagcctagtccacttttctattcaacccctcgacatctccctttatttactttgcctccttccccttctcgtcctcctcttcctcatcctcctctctctctcacccctcggtctcgctggttcttgctaacgccacgcacgctcgctgctgaatccgtcttcccggcgaagaaggaggaggaggagggatcccggcgaggcggttgttcgcgcgtgacccgctcggtgaggtgaccctctcggcggaggagtcggattgcgtcttggagaccggttccgtcttgtggatggtcttggtgatcgagaagaaatccgtggcgggttggtgaaccggagacggggaggaattgggggaagggaaggggggaggaggaggaggagctgtgtgttcttgggtgggcgcgccgcgcgttcttgcgagattgggtggttggttttgattgtggtggtatggtagaaaaactgcagatttaatctgaactgcgttggggggagtggaagaggaggaagaaagatcgggtttcgaggcgggggggggggagatgagttccgggtcggcggtgacgggcggcggcggcggcggggcggaggacgcggcggcggtggcgctggggcagaagctgccggtgcacgtggcggagaacggccacaccttcgagttcaagtgcggcggcgagacccccgtggaggcaatccagcgcaccatcgagggcctctgcggcatcccgccggccgaccagctcctcctctgcgggaacacctcgctcgacggcgcccaccatctcgcctactaccagctgccccgcgacgaccgggaggtgttcctgtacaacaaggcccggctccacgacggcgcgccgcgccccgcgccggagtcgatcgaaatcccccagccgtcgatcccgccgccgccccggccacaggattccccgccgctggatgtgtcctccgacccggcgctgaaggccctggtgtcctacgagaccacgttcagataccacttccaggtggggaatgccgtgtatcagtctagcgtggcgaagcacgaggtgtgctgccggctgctgcgggaggggcaggtgcaggagcgggcactcgacaccgcccggagcaacctggagcacacggcccggaagctcacgcagcggtattcggatttcgtcaagtgcttctcgcagcagcatcgtggccatgccgagatgctggcgaatttcgagagggatgtggagaggctgcgcgccgtgaggcttcacccggcgctgcaatgcgaggggaggcgctccttgattgacctcgttaaggagaatgacctgaggaagctggcagatgggtgcttcagctcacataaacagtttgatgttaaggtctcacagcacaaggccaaattcatggaattgaagaagaggcttgaaaatttgtttaatattatgagctcgactgggtgcaaggatcttgaggcgatgataaaggaacacgagaaattcatcggtgaccagaaaatcatcatgcagtctctaaggttagacctaggctttgaacatgttttttacctagttatcttgctgttatgttacatgccctccctgaactactattactagtgaattccctgaatcatctaaatttaataattactagtgaattccctgaatcatctaaatttaataatttacgctatgcctttgttctatggcttcactaaactacttaggagaaatttggaaaattgtgcttctattgtgtcactacacgttaagtgtcaccttccactcggaactacttttactaatgattgatctggatcataggtgcggcgtgttttgtgctgtagatcttcatgaaactacttaggatgaggaaatgtttcagcatggttagttgatggttttgcaaaaggaataggaaatctttcagcgtggttacttgatgtctgcaaaaggaatatagcttgtcatcgtacttacttcatttgtttaattatttcatgcactacggttttctacactaattgcaatgtgctcagtatgaccaagtgttttgatgcttatatgattatatgttatatcccactctaagctggaatatcttgtgtcctgcagtaaagatgtgactacttcaaaaaagcttgttgatgactgctcaaactgccagctttctgcatctctccgccctcatgatgcggtttctgcagttggccgcatctatgaagtacatgaaaaggacaacttgcccagtgtccataatatcgatcgcttgttcacaaagttgctggagaaatgcaaagccaagaagaatgaaatgaataccttggtacatgttagcatgcaaagggtcaaatctgctcagattgttatcaaggaaatgatgaacgaactccatgcattccaagaggtgatgggtcatcaagataaaattttcgatagcctaaaacttgccagtggcatgggtcatgcgtacagggcttgtcttgctgaggtcgtacgaagaaagtcttcttttaagctttatactggcttggcagggcagcttgctgaaaagctagccactgagcgtgaagctgaggtaagaaggcgagaggccttctttaggacatggagtaagtacattccagaagatatcatgggttccatgggactttttgattccccaagccagtgcgatgtaacagttgctccatttgattgcaatcttctctcaattgatgttgatgatgtggaaaaacttgcaccccaatctttggtcgggtcttttctgaaatctgagagatcacaactgccaaagtcctccttgagcaattctggtaccagtggaaatttgagtaaatccgagcaatatccgccgaatgctgatgataagatggatttccaagactttctggggggttttgacagtgtggatattgctggaactagtaaattggaagttgaaaatgccagattaaaagcagaacttgcttctgcaattgcagttctctgcagttttggcgccgaatatggatatgaatctattgatgaagggcaaattgataatgtactgaaagatgcaagggaaaaaacagctgcagcactttctgcaaaggatgagtatgctaatcacctgcaggcaatgcttacagcaaagcagaatcaaaatttgtcctatgagaagcgcatccaggagcttgaggagcaattagcaaaccagtacatacaagggcacgtgatttctggaagcaaagatgcatctgattccctcctttctgcatttaaagctaatgactgcaacttgcacatatctggagggaggcaaacccaagtacgcgatgaatcaagtgtggccatggatgaggcctcttcaacatctgagcagccatctaaacaaacagaaggtggggatgagaatatgaccgacatttcaggtgcactgaacttgcaattgctcgatccaatagcacgcactaatttggatgctttcatggcagaattgccacctgatagtgaacataaaattgttgattctgataaggaagggcaagtattgacacagtttactacgactgatacttctggggttcctatagaagatcctcttggcatcttaaactccagaactaacgagcatcatacctcagagctgagaaacaaagagctgcttgtgtcagagttgcaaagtactctggaagacaaatcaaaaaggttagatgaaactgaaagcaagcttaatgccttggtggatgaggtcaactctctgaagaaagaacttgaacacacccagggtctgcttgatgagtctcaggtaagtcaagtgggaggtagaatattcagcaatagttttttttttcatgctcaattgaaattgctgcttactttcttttacaaattttaatatagatgaactgtgtgcaactggagaactgcttacacgaggcaagagaagaggcccgcacaaacaaatgttcagctgacagaagggctgttgagtatgatgccctgcgttcatctgctctgaggatacatggtctgtttgagagactaaataactgtgtcactgcaccaggcatgtctggttttgcggactcactgcgtgctttagctctctcattagcaaggtatcttactgctctcattcgcttaaactcatgtgtagtcagttctgcatttcatttacaaaccacccacccccaagttcgttgtgctgttgggcttgatccatgccaagtctatggaactgataaaataaacaagaaaaataggatcgaaggaacttctaagatttgctgtatcttggttcaacatatccaagttattagtgatttgtgagttggcagtcagtgagaccgacaaaataaacagcagaatagaattcatggtagcttccaggaagtatgtccagattttctgtatcttggctcattgttgagatttagagaggcgctggatgttattttagcgagacatttttgcataatttgtagtaaacagagctaggaagatgttagatgttatttaaccttggcatgctttctacagtgagtagtaaactgttcttatattttgggagatgttcttatattttgggacggagggagtagtaaactgtattttgtgcttacagtgaaatattggtcgtcaaaataattttgtgttccttcagatgattgtatgtttttggtctttttgctcagagtagtttcctttgcatagagttctgttactttataaaagtattagcattttcttcctttggatcccctactgctgtagagttatcgaaacagcagatttactggctgagtaatacttttttattgaaacagtgcaaagaaggatgaaggtgatacaaccattcagtttcagcaatgcatcaagatcctggcagacaaagttggttttctatcacgacagagtgctgagctgctagaacgctactcaaggattgtaagagtgttggaggagaagaaagagtcgattaaaaatttgtacagtaagcttcaactggaaaaacaggtacgagtcgtaacttcttaagccactgtttttattaaaataaatgaattcataagaagccaattactttgaaattgttttagtttaaattccgcgctaatcaataataagcacatattactctatgggttaggttgagtctgttaaattttgttgattgaaataacaagacagtatcctcggttgtcaatactgttcaacaggctagtaaggagaagatatcattcggccgtttcgaagttcatgagctcgcggtctttgttcggaaccctgctgggcattacgaagcaatcaaccggaactgctcaaactactacctatcagaggaatcagtggccctattcacggagcagcatccacggcacccagcttacataatcgggcagattgtgcacatcgaacggcgcatagcaaagctgccctcgcacggtgaccagatggaagcttcacgccttgatagcggtggccgccggtcgcccgcttccatgctgaacccgtacaatctgcctgtgggatgtgagtacttcctggtgacggtcgcgatgatacctgacaatattcgttgaaaacgccttcctgatcatgcctatggctgctgaaatgaagggagaaactctcaactgtaaatatactgaaactgaaatttatagacttccttggttgcttgtggcttcttcatcctgggctgcagga

SEQ ID NO: 24529 - DNA, 6511 bp, Oryza sativa
tcgcttgggaggggagggagcgatcacccgcccattaggagtacccgatctgatgcgtatattagagttctgtgacgctaatgcatactcctcggtcctaaaataaaccaatttttaagatttaaaattattttaaaataaatcaatttatacctttttacctaccattggttggcaaatcaagaattgtcttttcaatgcccctcaccaaccccctcatcaatataagtttactattaattaagggcattttggtcatttgtctctttttttttcttgtatctatcttgggaagtttgtgggagtatgcaaggatattattttaacttaatcaaatgaccacgtgctctagtattttaaataattactcgtagtaatatctgcggccattattaatttgttggagctgtggaaagggacgaaattgcaacatctagcgtgaagcaaacgagtagcaaagcataatagttgttggcattatattgagcacatgacccttggctgccaaattcaatttataattctactatagcaattgattaacacgctaaataagcaagtactactactacaacaatcctaaaatataacctctctttatgttttctatctagctatataaaaacattgattcttctaatttcttttaatatataattattgttgatactgaataattgaattagccatttccaaacagatgctactctttcataaaatacactcccttccttctaaacagattatgacggatccttgtgataattttgaacggagaaatatataagatacaaattagtactacgaatgtagacataccccttataaatatcagtttatccagattcatgtagataggtgatgcctaatccaatattgtttgctataatataatattatgatactaccgaggaagtactgttttggcccgtttccttccgttttcatgctggtctcgagtgagagtcggtcggtcagaattcacactctgaaacacacgccggtcgccgtcgtcaacgttggtcttgggcacctcgcgtttcacacttttcttctgtaccatttcgccgagctttaccccgcggctcgtatataaatcctctcgatctgacgcggattctgctcattccaaatcgaatccaccaacatcccccccccccccggcattgatctcgccttcatcctcgcgcgattcttgcgaggaattcgattcccggcgatggccgccgccgtcgtctgcgtcaccggcgccggcgggttcatcgggtcgtggatcgtcaagctcctcctcgcccgcggctacgccgtccgcggcacatcccgccgcgccggtatgggtttttttctttttgattctccgccgcctcgccgtcgccggcggcggcgtggattgggaggtgacgagctcttggattcttgcgcagatgacccgaagaacgcgcacctgtgggcgctcgacggcgcggcagagcggctgacgatggtgagcgtcgacctgctcgaccgtggcagcctccgcgccgccttcgccggctgccacggcgtcatccacaccgcctcgccgatgcacgacgacccggtaaaccaccaatcccccccctctctctctcccccaaagaaatggtgacgtcatggtggtggcgcaggaggagatcatcgagccggtgatcaccgggacgctgaacgtggtggaggtggccgccgacgccggcgtgcggcgggtggtgctctcctccaccatcggcaccatgtacatggaccctcgccgcgaccccgactcccccctcgacgactccttctggagcgatctcgactactgcaagaacaccaaggtctgcaccccaacgctacattttttatcccctttctctcgcaatgaatacatttatttttttcaatccccatttcttgcaaagatttatttattttttgttaatccccaatacctgcaaagatgggattttttttttttttttgcaatccccatacttccattgattgattttttttttcaatccccatttttttctctcatacaagttgtgcaatggaatgaaatggcagaagactctgaatttttattttcaatccccattcctcgcaaagattggggttttctaatccccatttcttgcattgcaaagattgagatttggatactttaaatccccatttctcgatcacctgcgaatcaacaaatgtgcaaattgcgatgatggaatggcagaattggtattgctacgcgaagacgatagcggagaggaaggcgtgggaggtggcgaggggtcggggggtggacatggcggtggtgatcccggtggtggtgctcggcgagctgctgcagccagggatgaacaccagcaccaagcacattctcaagtacctcaccggcgaggccaagacgtacgtcaacgagtcccacgcctacgtgcacgtcgtggacgccgccgaggcccacgtcagggtgctggaggcgccgggggccggcggacgccggtacatctgcgccgagcgcaccctgcaccgcggcgagctctgccggatcctcgccggcctcttcccggagtatccgatccctacaaggtacttttgttttctttgataatggattaaaccggcctctacatccaaactggtactaacagcaattctgattgatctttctgtttcataccaaggctgtattcataaggaattttgtgattgttgatcaattttttttagctatgttcggttgctcgatttttagcaattgcagaatgtcaacttgtcaagtagccaaatatgcactcatgctgacagctatgtactaccaaaggcagtagggactagagagtttgagaactagtatttcccatggtttgcaatttgctttgtcagaaagccagtagtcaactaatctggattgcacaattaggatgtgtttggttgggtgtatgatagttttccttctatctagaaaaaagaaaagggaagacatgggtctttctccaaaactctacctctgcattatatgatagtattctgaaattcttaatatcgaaactgaagaactactgcactagtgacttgccatgaggtacttgaatctcaggttagtcagtggcttgaagatcattttagaatgccatggttagtactttggataactcaaactatgaatcgcagtggaaattattctttccttttactgtgcgcctgtgcgtaataaagccctcctatatttccttgtgatggcaatttattgttgtggacaaaatagaaagtggtatatgaattctgaagacacaacaatagctttcctttgcttgaaagacaataacacgattgttttcaagatataacatatgtgatgtctgaactccgcaattccttgtagattactaaacaatgtttttatacttagtggaatacattctggttgatgcccaatctaatctgttacatgttacttctacaggtgcagggatgagataaatccaccaaagaagggctacaagttcacaaaccaacctctgaaggatctaggcatcaagttcacacctgtgcatgaatacctgtatgaagcagtgaagtccctggaagacaaaggattcatcaagaagacctccaataccaaggtaaaaatccaatcgcttatcgattaacttcttctacatcttaagcaaaaggaaaaggtgaaattggaaaaaaacaaccatatgatagcatagatactcatatttatgatcattagcagaatgaggaaggaacattctgaaaaatccatatcaaatataaatagctggatgaaacaactttttttttccgattctgacaaaaatgatcacatacatatccctgatggtatcttgattattgcaggagcttcacaggcaaagttctccccctcaaaattcacccgcgagcatgctgatgtcgaagctttgataggtttctgaagaaatcccttttgaccgacggcttatctcagagtttacatagctcactaatttgattcagttcgatatctctggcaaattgccaatttctgggagttcatcctaaaagcagataataagaacaaccaatgtgtatatcatcagggatatgagttgaattattaaaggatgcttcagataaggttatgtggaaaaacttggtatacattgttgatagatatatacaacatatacactattgtgatcatgaggcaatccttatacatacagaaatcaaaacaaattaaataaaaaagcataactgtacattggaggatacagagaaaagattttgtagagacaggaagaacataaacacgatatctggaggctaacaacatgcatccatctagaactcgtgtatactagtataatctgtgcttcgagccttcgatcagttccaatttattcaacagtgtccgtctccagccgcgccaagattgaggccctgttaagatcatagaactttcacattactcaagtatcgtagtaaaatttatgtcttgaattttgcagctgcgtataatctgaaagagagaacgatgtaatgtgatgtactaatgtcgatgaagaccgttgtcacacatatatataccgttatatcccaacactttgacaacacagtttttttttatgtcacatggaaaatgatagttctaaatcctgctagattaattggtcaacaaaatactcaccactgaatttttaacatattttacttaattaaaacgacaatgatcagaagtgacagtggtgaccgtagcaatgcctacaataatatgacagctaaaaagtaacaaaataccatcctaaggcatttcaagggggttttttttttaacacaaattaaggttgagttgaaattagggacatactgatgaagtttacttgattcggaaaaataacgtctgatggtgtaaaccaaattatgaatgaaatttaaacgctaaaaatatttatatttgtgaatggagggagggagtatccggcccattatcatccacccaaaaaaaaccaccccttacattttaaggcacttttaaaaggagaaaaagttattacaaaatgaaaagaaaaattactattggtgaatcgatagataagggtattaaagtaataaaacttcttagtttgtgaattcgcacgagcagaaagggcacggaaaaataaaggccctgtttggagagcttaagattataagaagcagctggtttggtagccagcttctcagaatctgaaaaaactgggtttctcaactacagcttctcagaatctggaccaaaagctgaactgtttaggggagcttctgactctggaagaagctgcagctgctagaagctacctcaaacaggcccaaagaagcgtggaggagcagaagccaagctcattcccttcgcttcttggacccagagcagctctttgtttcaagtgagcagccagcccccctattaatacggttgcttttttcaccgggttgcttagcttctaaaatccgaaaggttgatcgtgaagggaaatagaaaaaagtattacttttgactcacgctggacaaattttttttctagagggaaaatgaatttgcagtactttttaaggaatgggtattgcgggtttcaagaatggttcctccgcacaaagccaatcccattccttttcacttgtgaccatcttttgcctacctatttaaccccttagaccttagaccttagtaatcccaagtccaagtacaaagctaaaagagcaaaaatcaatttactgtggaatagggtatgaaccgtagaaattactcttcgtcctaaaatataacaatttttagcacttaggatttgtctcaaaatctaacaatttctccactaatattcccttcctaaccaatcacaaccctccattcactttttccacatacctcgacatttctcaaccaatcagaacatctccttatttaattttacctactttcttaataatcgtttcttatattctgggacggatgttgtaagttattcttattttaggacaaagggactagctgtgtatagcaacttaatattggattagacacatcttacttcaataaatttagacagatgatataaaatgtatataatccagtcatatattgctatattttaggacaaaggataaaaatgaaaatgtatgctggtatggtactattacctctattctgaactataggatgaagtagatatgaattacctgtgtcctaaaatatatagtttttttttagaatttaggatgttattccatactactcgtacgaatctagatgtaaattgcaatttaagaaatgcctaattataaagtgatctacccgtgcacctacagctggatatccatcatgcattgaaggatccattgatgcagcatggctcactttcttaggtgatccagtcggtatactctttggacgggtttgattccccaaatcccaaagggtatttggatattaaatttaatgttaacaggaacatatatactccatagtaagtatctttgagggctgcaggaa

SEQ ID NO: 24530 - DNA, 5742 bp, Oryza sativa
acatccatgtgcaatatcacaagcaatgcaggacagtaatcgattaacttggttgtgatgctgccattgaagtcttgcctttgtcctagttaatcaaactcatgaggcctttgtttggtctggagcactgctgcttctgaaaagaactccagagagacctcgagaattagcttggcgctctatctcgccaagtttctgcttcacaatctctatctcccgagccaactgatcctccttttgcctcaacgcctacaaaataaatgtttttttttcaaactcataaaatgatagaaataatcgacaaaaaatagcaacacaagtcaataacatcaccaacagcaagactgaagatatacggtcacataatggcaaagcacattaacaactggagtcaaaggccagatgatttatgaatacatgctactgcaatgcattgtctaaccagagccactcatgcgcattgaagataatgttgacatcaaatgttctctggtcaacacctattgatagtgagtttttgttgcagagacttcagtttcatatggtacatataggaatttcatttccacttgggatttatgggataccatagcaatacattactcttggacttgattctgtttcattcatctctggttctcacaaagccacaacctaaggcatatttccagtgtttcagactgctatctgttctcttgtccttttcagagagaagagtactacctcttctgcatacaccaaacagatctgtctggtaactgtcacttgcttggacaggaaaaagacaatccacaaagctggtccatattgaatgatataaagcataacaatgaaaataaacagcaaagaacaagtcaacgacgtgatattgctgaaacatcaaattctagactatttatgcaaaatgtaaattggtcaaaaaatatgcaatgcaacaaaaactataaatggccaattttagaggaaaaaaaagaacagttggcctgctgccatattattgctcacagatctgatacctattgaatgttcagaaaaggccatgataacactacaatagccctggtttagaattaaggtgtagtgcctgatactaactgcaggcaaagtctgcagcactctgtatggttgcagcttgctatggccttttacaacccattagggctactgtactgcaaggtgtgtagcatagctttggtataaatgtatttttggttttcatagcaacagtttggtgaaaatgcagtacaggtttacatatgattatttgttgcaaatagttgctatcctccataattgaatcattactacaagacttcagacaagacagtctacttacatttgactgatttataacttcagacaataaaggtaagcactttgtgtctcttatatcgctgtcatccaatattagagcacttcgctgctacagtccttctacacattatttagaatgtaataactcctatactggagtgtactccaagaatacaactgtatccaagatatagcccaagcattgccttgtttgttatcacttgcaagacttcactgaaatattagagctatcctgacgattctcagcaatgtaaacaatagctattcatccccaattattcccaggccattgaactgattaatttttttagtaacatttggtagaataatcctaagattgaatagctgcatcagacaatttgttgtttggatataccaatgagctatgtgatttttttgggggggctcctatttatagattatagatacataaatgaatatagtcactgaaatgaaatatgtggacgttaacaaaaagaaaaccattaccctgcgaagacacaactcatctcaagttacaaaactattgacattccagagcttatacctcaacttcgtttctacgagcctcctcttttcgggcctcggaccttgcgcttctttgcacctcaaagattacagcagccccagcaacctactacacaagggttgctgaagtttagtgaatggcaaaaataaaacaacagcaaactatatagaaggcatgcaggaaggcaacatttgtcataatttgacatgggatcataggtgatggttaaccaataaaatcagcaaactttacaaaaaagacatgcattgaagtaacatgtggctagattttctaaatgttcttatgcattctttatttctacaaaaaaacagacttgtctcgaggatatttccagttttttataaatggaaatcacataaaagtacggtttgcctgacactaagataatcatcacctgaaaattaaagaatttaagcaaaaatcgaaagccgaaattacaacagcaaagaataagaagaaaacatgattgtgaataccgagaaaacaaagagctccccaataagatcagcagcagcttgaacagctttctcctcgttcaaaggccgaatctcaaccttagttgaatggccatatattcttctctggatatttgtggagacccgatgatttgtctacaaaaccagttcgtggccaaaatgttatttgaagtagttaaagaaagaagtaacagctgaggaggatgcagggacgacaaattgtgagcagaattgttcgatcactagcatatttactaaaagtgcacttttcagattcagacttctcattaataagtacagttacccttctcatttggaagcaatgcataattttctgataacgaatcccattctgcgtatctcaatcaacaaagtcaagaaatggccgcaagaaaatgtacaagctagccaaaataacctgatattgcggagcagctcaaaaacaagaacaagtatatcacaaagaattcagcaatcaaagaacattcaccctagccaaagatttgacacacaacggcgaaacccttcattcctcggagggtagtaaaactgcgctacgcgatcacaaggccggggaaaccccaaaccctcggcggccaaaatcctctccacatcctattctgcatttctaccgctaaattttcacaaggcctgacgatttccaagcgcacaacgaagaacaaaatggggggaaggggagacgagaggagggggagatgggcgggggcccgcgtcacctgggcgaggttgatgatgagctggcggaactgagggtggcggctggcctccgtcttgaggcggatggcgatcggcttcgacatcgtcttcagcgccagcgtccccagcttcgccagcggaaggatcatcctccccctccctccctcccccggcggcgtcgacgaggagctcgtgtaccggacggatggatcctccttttcccgctccgcttcccgtcacgcggccgcggaggagcttgggagatgaggcggcggcggcggcggaggtcttggcgagttcacggcgagacgatgccggcgttgagatcggaagtaggggatattaggaaatttccagcacgagcttcactactggagaaggcctttttttttcattttttcttttttcacttcacaccctccggtttgacagaattctcatcaactccaaaaccatctgactacttcccgataaacctaaaactgtacatgaaaacatgacccatcattattcaccagcaataattactctctccagtttcacaatttttgatgttttggataatcgcacggtcttcgaaagatatactacatttgattatgtttttctattataatatatgtaatcaattaattatttttgtttttattatagtactttataatataacattgatttactgttttaaactaaatagttttaaagttataaatagtcaaagttatacaactttgacctcaacatttttaaaaacatcaagaattatggaaccggagggatgcttattaaaactcatgtagtaacatcatttacaatttgttgaattctacaaattttcattcaacatattcaattaccaccctcacatcatttctataatatttcaacatatctataattttataatacttaatatatattcatccatataatacgcatcaaagcacggggtaccatttagtttgtttcttgattagtactaataaaccttgactttttagtatttttttcctatcttttatttcttgcaatgcaaatattggcaaacgtcctaatagttcatctataacgtcctatagagtctattaaatttatttatctctaaatatggatttttcaaaccacctttaattgttgttaataactaataacctttgtactcctagtttgattgttgacaaaaaaatatatgtatttaaagattacttaataattcctgctgcaaagcatggagaatctaatagtatcttatatacacaatatgccttgagccacatcatcttttttgagtttaatctctaccatccttcaggtcgtgagttacatttctttcatttattgatggtcattactcctatgtgttgaaagtgtataacattgattgagcgagagggattgagcgagagagaattgcacaaaagaatgtagggaatgaatgagcgggatcctttattgatcaatgcggtacaaaatatagatgggtaaggggtggcaaccggagacgcgatggttgggaaccattgcgtccgttgccaaggagcgcctagggaagacgcggttgccttcggttgcgatccatccttttatatggatgagatcacctgttgtttcataacactcccccttgagctttgatcattgttctttcattgttccagatatctataaagataatcttagaaataattatagttaaatacatcacgtaaaactcctcgaaaacccagtgggaaaaataaggagagaaccgtgatatatattattgactattttagatctatgagtaaagctcatagtatgatccaaaatagtataatgtctacagttatcatttagtaaaaaccccagtgaggaaaagccaaatgataagacatataagcttatgttgatattacctcgttaaaaactttggatgagaaaacctaaagggtaaaactcatacaaaggaaaaagagtataatatgacgaaaataggttatttgccaaaggaagatactccccctgaatcctgcaaatttttaagtcgtctcataccaattccttcgacacatttaaagaatgtggagtatggcagagattttaggaataaatcagcaagattatcacatgacttagtttgcaagatgtttatctctccatgttgctaaagctcatgaggataaaataatttaggagcaatatgcttagtgatgttgctcttaatataaccagtttccatatgaacaatacaagcggcattatcttcatagataatggtaggtgattccaatgaaccaataccacaagatgttaatatgtggttaaccattctgtgaagccatacacattcacgtgatgcctcatataatgcaattatttcagaatgatttgtggaagtggctactagagtctgtttagaagacttccatgaaatagcagttccaccttgtaaaaatacgaatcctgtttgtgatctggcgttgtggggatcagatagatagccagcatcagtatacccaattaaagtcgaatcctggttcttttaaaagaaaagtccaagatctcttgtgccattaagatatcgaaagacattcttaactccagtccaatggcatttggtaggagcagcgctgtatcttgctaatagatttaccgagaaagcaatatctggtctcgtactatttg

SEQ ID NO: 24531 - DNA, 16779 bp, Oryza sativa
  unsure (1)..(16779): unsure at all n locations
ccaggaaatgttcatcatcaaagatagagtcagcaaaccgggcagtaaatagatcacatgttaagggttctaaatactttatgattgatggagatttgaatcccacatagatccccacttttctgtgtgggcctatagcggtacgctgcggtggtgagatcggtatgtatacaacacaaccaaacttacgcaaatgggaaatacttagaggatttccacgtactaactgcattggggaagtttcatgatatgcagttggtcgtagttggacaaggtcaacaacgtgcagaactgcatgaccccaacacgacgaaggtaatttgcaattcattaataatggtcgagcaataagcttaattcttttgatcaacgattcagccaaaccattttgtgtgtggacatatggaacagagtgctgaacctgaattcccaatgtcatacaataatcatcgaaagcttgagatgtaaattcggcagcattgtccatacggattgattgaatcctatgttcacggtaatttgccttcagccttataatttgagacattaatttggcaaaagcatggttccgtgtctgaaaggaccttaatgtcgcctaaaggggggtgaataagcgttcctaaaaattatcacaactttattacatattaggatgatgagaactttcggttcaaataggaacttccgatatgagattggaagttccggtctcnnaaccgaaaagttcgggcggatannatggaataaagcactagctatgnaacttgtagctcaaataaacaaaatgaatatgaaaaaaggggtgacaaataaggtatctaaacaagatataaggtcaccaactaaatcaattaagcatgcaagtagatcgggtaaaaacaagctcaagcacaatatgagagaatgcacaaatgggcaaaccaagagaggagacgcgtgatttgtttgccgaagttcggattcacggatcctacgtctccattgaggagccacaagggccgggcctatttcaatcctttcctcacgaggttgcacaaatgcactcctcggtttcactcttgatttcttcccttgcggaggcgaaatcgaagccttcacaaactttccgtggcacaccacaaccttgggtgctcaccggcgacacctagccgtctaggagaccttagtccccaagagtaacaaacacaatcgaagatttgcttgctatgaactcgagtgcccaaagtatggagtgaagctcactagctctcaatttctcaatcactcaatccaactctttccccttctcaaatccctctcacaaagaggcaccacaaaggatggagtgaagctcactagttctcaactcctcactctctcaatccaactctctccccttctcaaatccccctcacaaagaggcaccacaaaggtagggaaatggggatggctatttggctttggatgtgtctaatactccccaagagcagcagccactcaaaggaggggtggaggagtttatatacccgagcctctcaaaaactagccgttggaggccaagactgtaattttcggagtttccgaaaagcattttcggacaagtccgaaaacttacagaaacaaatctcagattcgcagccattttcagaatatccgaaaattttcggattcatccgaaaacttttcggagtttccgataatttttcggactttccgaaaagcacagagtaaaacaactataacttttcgctcgggagtccattttttataatcttagactctatggaaagctcactcagaggactacccaactcaaccaaaaacaaggtctaaaaccactcaaaggataggttaaagcttgggtttctctcaaggtagcactatgataggtcactttgagcaccgagacatacacaaacacctcgacgttgcatccctcttaatagtacggcattcctaaactcaaatgtaaataagaagataattataccattaggaatgcctttttttcatctttctttcattgtcttgagggatgccaatgccgatactgtttcaccatatattcttcaaatgattgatgcggttacttgtagcttcaaatggtctcgcacggtccatcatgacaaagccgtcactcacccttcacgaccggatttggttcttcggcgccaagccccttgtttgcccttcaccgccgcatggtccatcgcgaccgagcatcgcttgcccttcaccgtcttgccataatagccacttcgtatcacacatcttcaatatcttcactttgtcattcttggtattgttaggtgtaatgatatcacttgagcatcaacacctttgtaatccttgggacctatttctttcattcaactcaataaaattattagtctcaatgatccggttgtcaacctccacatgttgaccaaccgatcacatgtataaaaggatatgaataaataatgagtattaatcaacaccaaaagtgtcatatactcaaatatatattcaaatgtaaagatcccaattaaatgaaggtgaataacttggatcgattacatgcataactaaagtataggatttgctccccctaaatatatgcatacaaaatatttgtgtgaagcaagagtatgcataacaagatattaaacattgagagcttatcctatacaagaatagaaggcatttatcaaatatagccaataaaataaaaacataccttcaccatctccatgttctcaatgtaaagagactaaacaagatatggctcaaacaaaacattagtctcacatgcttatgtaatcacatgaaaatattatatatgaatatatcaatatgtgcatggatagaaagagtgatacatatagcttgatctccatgcatttcatccttgtgatttaggtacaccatcaatgaacgtttctctcttaactcatatgaagtccagaaatcacctctcacatattccactttcatatccatatgagactagtagacaaagaaatgcttataacaatgttagtctcatgtaattggatttgtcattaatcatcaaaaccaaattaatggcacttgaactttcagtgtcgatagaagacacatgtgagactatctagtagatgcgtcaatcaaaaccataatgtacctgaacggtccagatcttggcacaatagggccacagatatctccttgaatgcgttcaaggaatttaagtggttcggctctaattttgagataagatggtctcaaaatcagtttcccagtagcacatgcagtgcatacgaaatcagaggatttgggaaatttgtcagtgatcaaatgatgaccaatagagttgccaataatttttctcatcatcccgataccggggtgcccaagtcgatcatgccacgtgtggaatgcatcaacattttgaaaaattactttgtacgcaacatgtgcaatgggcttaatgtatgcatagtacaatcccgatgtgagtgatggaattttctcgcaaatgcgtttgccatatccgttttgtttggttaagagaagaaattcttctcgattatccatatgggtttcaatgtgaaacccattttgacggatatctctataacttagtagggtacgggttgaatcaggatacaataaagcatcctcgattgtaatttgtgtacccattgggagtgtaataattgctcgtcctgagccaactatcacagtatcgtgcccagcaatagtcaaaactttgccttctctatttttgagagtttgaaagtatttgatctccctaagtatagagtttgtggtaccactgtccacaagacataattcctctccaatcggagtgatatccttagacatctataatgaaagaagaattgcttgattaagaattctttatccaatatatatacatacatacaataattaaaacatcaaatacatagtatgacatttacattatgctaatagtacatactctaatgactagcaagccatataatcttacaatataagggagttcgtacttatctacttattacaaccaatattgtttggcaaacttataggatatcaatatactgtttcaagcacactaagataagagcagcttcatctccaagtgggacgcactgagatcattgcaaatctccaagtggatccgttgagcagtattcgatgaacatatcgtccatcgcagagagtggagcgacatcttctgggagaacattgaggttgctctctggttcaataggagcctggtgagaacttgcaacctcagggcgctctttatgtgtaagattgaagtgggcttcaaatcttgggttttcagaagactttttgtccttgagggatttttcgtacaagagaacaagatgtttcgggatgcggcagtctttagcgacatgagtgtcagatccacacatgttgcaatgcttgttgccattgctacgaggttgtggtgccttatccttcccttttcctttctttcgacccttgaatttgcgcctgttgttgttgcgtttgcgctttccagtcagattcttaggattattcgaagaatttcccttgaattctttcttattctcagcattattctatacattgaagtgcacctcaggcagtggagcagagcccggtgggcgctgttgggcattctttaaagaaagctcatggtgtctttctgcctgagtcaatgtatgtataagcagagaatgtttctggaaattgttagtgcgatactgttgagtcagtatcctatcctccggaagcatagttgatagagttttctctatcttctttgcctccgttggctcttgttcgcaaaacttcaacttggaacaaatgttatgaacagtatggttgtatcctgccatagttttaaagtcctgtaggcgtaaatgaacccactcataattagcctcaggccaaatgagttccttttgctgatcataatgctcttttagagctttccaaaggttgagagggctcgtctctaacatgtattcatgtttgagatccttgtgaatgtagagtctcaaaagaaaaagggctgtattgagcttcctgggctcaatttccgggtccccatcattaggttcctcaattgtatttaaaatcccccgagaggcaaaattgattttgatattagaagcccggatgggatagttagtcccatcgagggcgagttcgtcgaacttttttggtgccatgtccctacaatcatggttaacattatcaatttatagaggtaaattaataaaaacatgatattaaggttgtaatctcaatgcgaaatgtaatacttcatattttgtaatgttttgaaaaaatgcaggtaatagacctgacaatttagttagaattcgaaattaggtggcacaatgtggataatctccaagtaattaaacagtggagtagatctcttaatagtgggcaagttatacttgctgcctaatacacggtctccaggcaaatatattctagtgaatataccgcagccaatgtttaggactccactaccttgtgctcaaccaaatttcaaataatctcatttttcaaaacatattctcggaaaataacacatgtgggtaatcatcgtgagatgtagacctctgtgagatgggcgagttgttcgcttcctaggttatgaccagtgcggccaatttgtaggactccatcgggtaatcatctcaaattgtagaccacttgatgatgggcgagatactcgctgcccaagttatggtcaatataaccaaagtataggactccatcgatatgtgattaatttccaagtcaaagtgtgaagtggaacatgcattaaatcctccattaatcatgttgtacataattaagagaatttgccaaatcaaagtacaaaatttatagaattttgtagattaataaagcgagaaagtagagcgtgtcttgaaataatatgcaaaaggcatgttattaagacaacaataaatttagtgaaacatggtatttaaataaacacctatgttaataaacacataacatcagtggtctataggaccattacataattgtttgtacaactgatgaactgcttcgactaaattccataaaacatagggactaaaatgtaattgctgctgcaaataaaattaaaaattaaaattaaatggtaaattgggtggtgggacaaaatctaaaggattcggcccaccaccgtgtggcactaggccggcaggcaagggggggtggtgggtcggcccatccggcccgcagcaaaaaggcaggggggagccgtcggggggattagggttaaccctaaccgcccccacgatttcgtcgccgccgcccttttcgccgcccaccgccgccagttcgccgctatcgacgccgccgttgggcgccaccgacgccgccgagggagcgccgagggggggcaccgcccttcctccgccgccgccgcaccatctgccgccgccatctccccgttgtggcgccgacgcgtgatgcgccgccgctgctgcctccatattcgccgccatccaccaccgcctgcatccacaatccgccacccaccgctgtcgccatccacaatccaccacccaccgctgttgccatccaccactgctgccacggccgcccctccgtccgccggcggtttgccggcctgattaggccgacggctcccgatcctcatcggaatcggaggccggccgagcccggatgtcacgaccggaaatatcccaacgggagttcctttcgtgcgtgtattattccttgtcccaggaggcaaggtacaccaaaagttgatacatttcagagtttatcaagcggaagcgtaaatagttactttattacatgggcggcgaaggcccagcacacacaaagacaaacgggaaacagcggaagactagggcgacgaccacaggcgcttgacggcaggcacgagctaaacaccaaagccttcatcatccaggggctcctcttctgggtttgggaaaaattgagcaagactgagtacaaccaccgtactcaacaagacacacccacgagtgtagaataaatgcaagggagtacaagggagccataatataggggttagggtttgcagtaaacagcattaaaagacacttagttgctcaaagctattttgtaaatatgatcctagagctatacaatattattaatcaaggccgtaaacccacatgaacctgccttaacccaaggcctacgatgattcagaccgaactggcaacccgaccttgggtcccagctcgtcccaagccaacccaggccaaccattccacattttagttgttaagtaggttttaagaattaaaacactaacttgggtacattgctcggcttgcccataaccgaggacgcggctattcgaataggttatactctgatcagaggtgtacatctttacccacaagacacatcttcctcacgtgtaaccacgtgccacataccaccacggtatacggacggaagacgtgacatagtttccaacccatcctagccatagacaagagtaccgacccaatcccacctacggccggaacctctgggacaggtaggcaggactgagcccctagcagcaggacaccagccctgtgccatgacatctcgactaccgggccgcatctcgtgtagccttcatttgccctagagatatccattgacccccgacttcgtccatctccatccgtgtacttttgtttataaccagactgagccacaaactaagccttacccactagacatgtggaagtatggtagtgctttgcaatagaggcccgaagaccggtccttatatggccgaggtgctactatcaaaaccatgcaccccgagcccagcctaaaaccattttgaggattttgaatacagggggaggtgtgaatccaattccacaataatccaacataatccaaccattccatagtgtccaggtgatgagaatattcccaaagtctagggttgtaaaaccacctaatgttgcctaactaaccagcgaagcatctacctaaattcatactagcggtaccacgagtagagtgtccactagttggggttttgtttattctagggtgaacaaggtaataataacaatagtaataataataaggtcataacaaaggtaaataggcatggctaaataaaacagtgataacgcgggaatttaaataaagcgataatgcaataatttaaatcaaaataattttataaaatgggattcaatatgttaaaggatgatgtgacttgccttgctcgctttcccaaacgtcggcttcaacctccacgaagagcggatctttcgaagctgtagcgtctacatgaccaacggaaaagaaaaggattttactctaataaactccatataacaagcaggaacaaagcacacaaatgggttcttgacttctcaaggaaaaattagagacttgaacggtccaattccgagttcaaatggccaagttatggccatttgaagtttatatgctctttaaatgaatatttgcgaatttcttcatttaaaatttaatttaaaaaggttttattgtgtcagccgagggggaggggcgcgcggaccgggtccacgggagtggggcccacgcggcagcctcacggtccacggtggaccgggtgcacccgggctcacaccggctggcgccgtgggccccacacgtcagccgcacccgagggcgcgggcggctgacggccgggccccacgcggcagccactcggcgcgcccgagggcggccatgccggcgcggtcggcgggaggcggcgcgcccacgctccgatggtcgccgccggcgaccaccggcgcagcggagcggcggccgagagaggggagggaagggggaaaggaggcgaccgtccacggctcaccccggggcgacggcggcgacgggggaggtggccggagcggagggaggcggtggcgtggctcgggtcgacggggacggcggtgctccggcggtcggctaccgaaacggagaggtggacgaggtcggcgaggatgcggcgaagccgaaggaagcggcgccgaggtgggaggcggtccggggcgacgacggcggcggaccggagctcggcggtgacggcggagagagagagcgacgtcgcgagctcgaatccggcgaggaggaagggcggcgagaggcggaaacggacggaggaggtgcggggagggtttaaatagggttggaagggggagagggcggccggaggggaaggaaaccggcgcggcgttctcgggctccatcaatggcgccggcgggattaggggagggtttccaaatgaatccaagggagagagggagggaaaattggggggaaagggagagggaatcacggggaataattcccccctattgattgcacgcggggacgacgggatgcggcggattcggcggcggcggcggcgcttggcgtgggcggagcggcgggagcggcgggaggtcagagatgacgggtaggccccacccgtcagcgagggtggcgggcgggcccgcccgtcagcggcgcgcgcgcggggttgggctgagtgggccgcggggagaggagagagagggagagggagatgggccaagccggcccaagagggggaggggggaattttaaggtttttctttttataaaatcattttaactttgtttatttcttcttaattattatttgtgctctgaaaattctactaaaatttatttacacattttaggcttttaggaaatatacaaaaaaatcctctaagcattgtttgacttttactttgcacattttaatttttggaggctttcacacggattttaattattctaggcataatttaaaggatatattttagggtcgttttgggacgtgacaccggacgccattccccggcaccccgttagggagtgtatggctaggagagccatggggaatggcgatgaaggtgtggcggaggccgggacggtgagcggcggcttcaccggcatgacgacgagacgttgacggattgaagaagggcggctcccccgtgcacgcagccagggtaccggtcctgccggaccccggtggcgtgggagtgggggaacggcgtcggcgtcggcttggtgtcggtggaggtggtgaaggagcggttgttggtggcggcagcgactccatctccggggaaatattgcatggctcgccgggcagtgtcaccactgccgtccatccgtggtaggcgtagtactgcacccgctacacacagatacggcgaggcacggcggcaaccggagacggaggcggaggaggagcaaccggagtagtggccaccacaatgcgtcggcgagggtggtggcgacggccaccagccctagcccgacgttcatggtgttggtggcgacagtggtggtggcagccactcctctccgatcgacggagaaggtggtgaaggcgacgggcatgctgattgcgagggaagccgagaacggcatccataatccaatgaaaggtaggcatcgtaccttctctgattcttctattcgcttttctattagatcaaaagcgatgtttcttccttgtttcacttcgcgatctccttcgcgagagcgaaagtgctgataacgtgatgaaagtgtataagattgattgagcgagagggattgagcgagagagaattgcacacaagaatgtagggaatgaatgagcgggatgagcgggatcctttattgatcaatgcggtacaatatatagatggggaaagggtggtaaccggagacgcgagcgcctagggaaggcgcggttgccttcggttgcgatccatccttttatatagatgagatcaccctgttattttataacactatgcacatactcctcatgtttatgtgtttcaatggtaatatttttgcagctcaatttactatttttttaactcaatagttcatactactacgtatatttgaaactgtcctaattacctgagatgggtgatccaccaggttcgataagcggattattgatttgattacccaaataaattaaatataaaaatataaattgaataaatatttttattgaaattactatcaggtcttgcctagtagttaagttatattgaaaaagaaaacaaaagtattgacatgttggaagcagcaaattgaaaattataaataccgtaaccaggaaaaaagcatatgaactaagtacctcattcatcatgcacatatgcacgagaattttattttaaaacatctgagtcaaacatctttagtggggcaaaacattttggaaaaaaaaaaatccttttcatgtacttccagatatgccaacacattatggacatgatttctaagaaatccttgtgtctgaaactaggatttggaaaaactttagattcatatttcatcggatctaaattctttcccaacatcttctgctgaaaggacatataaataagagatgcgcaataggatttctctagcatcactggagcatgaagcacaagtgagatcaacattgttaggtgagtagttttttttctatttaacatgtttcttgtgtttaacctatcacaaaaaagtagccatatgaagaccttgatctttatgacacacttggttttacaaagccatatatatggtctaggtggaggaagaccaacaaaaatcatcttgtaaaacttctaagatgagtactgctggctgctccaaatgaaggtccaaatatctccattaccctcttgcaattgtagttgattgacttatgtttgaagttacagagattcatgatatgtctgagctgacagtggcagttctagatgtttaaaaggtcttcactgtgtccaatttgaaaattgcttgagaacattatcaagataatacatgaatgtagactgagccttgctgttgtcgtggcttactctcattgtgataatgctatgtgcgtagagatagagtttgttatcctcaatattagttgagtagttgttataacaatgtaatcttatccagagattggttatgcctaatctctaggatctcctgtattgccacggtatggggcttttcctaccacatatataaacacgcaagcggcgcatggcacggtgcgatcgttttaagccaaaatccacatgatatcagagcattatggtcgtaaagttgaacataaccacaccattaactgttttaacgtactccaatatcaaaacttgaaaaaacagatgaaacatttatacaacggatacaatccttataaatttgagatacgattgtagaacttaaaatcgtggtagatcaatatctaaatgacaaacaatgtggttttttgaaactttaggaccgtaatacttgtggttatgcgccacaatatgtgtggttttatatgaagttaatttactctcttatctattatcttaaaaaaagagataaaataacttttatattttgaacgactagctagttctcatgcacgtgatagagatgtgtgaggtcatgaagacgttccaactgctttttttttttaacagtagacggtaggagatctacccgatattttagaagaagagagttgaccctatttataaggaaaatcgggcccaaaaaccatacaacttcacagtttgctaaagggaaaccggcaaaaccttacacagaagacacaaaaagcccgtgacaaaactacaaaccacagtagacaccgagggaagagcaagaccttcaaggcgaagcctccaaggaggtaaacaacgacagaagccgctgccgacgcccacccaactgggctgggttttcacccgaaaggggagggagtccacaaggcaacacctccaaggaggaaaacggtgcccgcaggcgtcgatgtcgctgatcctatgagaccagactaggctttcgcctaagactccctcaaaaggtgtagagcctctaagaagccagagccagaatgtttaaagttatcgttgctcggctcatcggatgaacccgatacagcagctccgactccacctaaacacaaagactctagcaatgaagaggacaagcacccagctcaacactcggcactacgacaggtttacacagacacagggcacttgaaacacgacgaggcccaagagcgctgactacagatagaccgaaccaccaacacagacaaacacaacacctcagtcgggtctggaaacagacaaccaaaagaagggaggagcaccaaagatgaaggaggcttgggccgcctggagaggaactgagagctgagacagggcaacaaagacgtcggtgtcttccattaatccggcgaggttctccaggcttcgtgagacaaaccaaacaattgaacaaccaccttcaactaaaccaccagcgcagagaggggcgtgctgggggtgagcagaagagcaactaagaagaaaccttggtgaggggaaggaatgggggagcgggggcgccggcacaagcacacgcccctttctttcgccgggggacggcgcagagagcaaaggaggaaggggggggggctcagcaaccgccggagatagaagaggccgaagaccagagtcgccggcgccctggaaggctgacgcaccaccaaccaccgaagccggcaggcgccgcaacgccaccatgcgagcaccggcgaattctgccgcccgcgcgccggcagccgcactgctgcacatgcccgccgccacgggagtgcctaccgccgccgcaaccccgccgctggggggaggggggagagagagagagaggtaggtggtctgaggggatgggggtggggaggcctccggagccggaaaccgccgcacccgccgagccgccatgcgccagggcacagcaccgacccagcgctgcagaggctcgcgactgccggccaccacgccgccacgcgaacgcctaccaccgccagccgccgccgttgtcagccatcatgtcgccacgcgccgtggagactttgacggccgcacccccgcctcgaagcgccgcccgacgccgccgtcttcggatctggcgacgacgggcccagatctgtcgccgcccagcctggagatcccactgccacttgcggacgccgcgtcccccgcgtagagacagggcgccgccgccatcctcgttcaccaaccggctttgccggtggcgatctccggcggcggcgaggggggagggaggggaaaggtggggcgagggtttcgtcccccggtcgcctgcgcgtgggcgacgcagggggacaagcagcaactcagatatgcgaatggactaagaggagatatctatctatctattatatactaaaagtccattaaacgtcctacaaacactctcaagacaacacgtggcattcttataaacgctcttaaaacgccacgtggcactatttaatctcaccatcgattttcatttaaattggtggactcgttattttagaccattagattatatctatatctatatctatatctatcccgttgattttcacttaaattgatcgacccgttatttagatcattagattagatatatatctctaatactaatactttccacctatacatacgagagagaataggttcgccaaaaaaaaaatgtaagtacgtaagattgaaaaggaacaataaaacctacatacgtacggcaaaagaataaagccatcgtgtcaaaaaaagataaaaccaaaaaaaatatacgtatatagtatcatacaaaaaaatttaaaaaactcccatatactcccacatattagttattattaataaatttgaaaaaaaacaaatatattcttcgaatcagtaaaggtgtctcatgtgattatcaactataagtattgaaaataaaccaagcgctatactatagatgttggtcaaaatataaatgtttaacaccataaacacacgtggtgtctactgtatactaggaatctactcaaaacttaaaaaacattcttttgatcacctccatcttctcttttagtaccgtcgaattacaacttcactcattttcaaattgcgtaatgtttaacaccataaacacgtggtgtctactctataccatgaatctactctcaaaacataaaaaaaacattcttttgatcacctccatcttctctttttcctttcatgaagggcataagcatgaataatatagtttgctacgttgctattgtcatgaataatatagtttgctacgttgctattgtcagggttacgggttaggtataccttctacccttcgacatacgtcacatatcgatatggtatacttgcgcgtgtacggacgtttttggcatacgttaagggaattcatcatggagttcacagatggaaggagtcctactcggacaaaactgggttgtcattgtatcatgccgggtccgatgtctccgagtcctacttggagaccagccgacttgcaatataaaagggaccccccgggaggacctaaggcatcgaatcttaccgccaacacatccaccacagcctacgaagtcggagcttacaggagccaagtcgcccggtgatctagtcgaatcaattcgactacgatctcgtcggtatcgtcgagttccgctattccctttgtaatatgtggtttccatcatataatcccatatcaactggattagggctattacctatcaaggggcctaaaccagtataatctttgttttctgcctgcttgatgtcgtattatgtagatcctcgtaccagcgtaccccaataccctctatatccggtctacgggtatcccccgtcgacagctataagtataacagggacgtacatatggttgagttaaggcggtcgcaatggagaccacagtcaccaatagtgctcaacatactacttaccgatgcacaactcgataagggtgtgatagtaaattaggcattaaaattgtgctccaggttagtctggaggtgcacaactacatcgatatgggacccatgtttcaaagcaaatgacaaaaaaaagtctagccactacaatcggcttcacgcattagagaagcatttatgtataacattatgttattctattaatttgtacaagtggtatttttacaatatttatatatagttttgaaaattggtgaggtacgaaacatttacgtgtagtggatatttcaatgtattaatgatgtattaggcttattttattgatacattacgtagttcatctatgaatagttacttggcttttaaacagtgataataggttgaagtgacaacaagaaaatttaatttatatgtggcaaagtgattttatttaatctaggagaaaaccttattacttaaatatattaaagtatgcaatatatttctcggcttataaatggtgagatataaccttttttaaaaattgtcttcataaaactgcccgcgcatctgctcgggctttcttcttagttgttcttaaaaaagttgactaactttagtatcaaaatatcaaactttttctgattgatggatacggggtggctaatttaatccacgccacaaaagattaaacctgccacggagcttatctgcctgcatctacgagtttaaccagcacaaaccagcacatctcggcgatgcatgatcatatctacttgttacccgtgatgccagggaatagaattcgggttcaaacaaaggcacactgtttcccggtagacgcgaaggccgttccattctctctgtctaagctgaattccaaattcctcccaagccaacagacagtatgatccaacagattgagtagagccttgtgcttgttggtattgtgcatgctctacatccgagctgcaggttgatggactccctacatccaagttagacatattactttttaacaccaagatcaaaaagaaattaaatc

SEQ ID NO: 24532 - DNA, 14919 bp, Oryza sativa
ctgcagcccattttcaatccggcacatcaatttttttcaccaatttagagtcggactttttttggtttctgagagggaatcggatataggagtcggacttttttattttaattttttcgctattttttttaacggacgaaggaagcatctcttattttttaagtagtagagatagagactggggaagaatatataggacacttgcaaacctagcttgtggatgtaaaatacaaaaatgaagcccaatacattttttcttttttctatttctcctaaacaattatcagtttttccttcaaatttgattttatcttacttttgatcaaaaaatttcttcactatctaccattagaaatcaagaactacatccatgattttttttattttttctgaaaatttgaatttgctcaaaatttctcaaaccctaaccaccggtaaccgatcccctccgcacgcggtaagcgcgataaccgcaattaccgcgcgataacgtgaaccctgggtatcacacgctctcaatgtgcttacttattcttagaagcacagtagcttccttgctaaagcaaataatacgagctataatttgtttaagtaattttgtattgtcaggacttgttgaaataatgcaaattatgggtggtctgacatgaaaatacgtaattgttcatctaccaaaattcatttatcgtcgtcgtccttccccttattatgcggttactagttgacatactgaatttacatcgtggggattagtactccaaaagttccatagtgatatacattgctcgtactgaatttgtcaaaaaaaaaatcaacagttttattattgcttcaaataattaatcaacccgacgttatggtcatggatttctacaccatttcaaggtaatagtttcttctgtagtaagagataaaaaaacttccaatttttaatgactagttctcgtgtacgtacgtgctagagtcctacagatgcatgaggtcatggggacgttcgagctttgaggtcgtagacgaaggtcgttccatttccttggtctacactagattccctgtgcctcctacgccctaactaaatgagaaacatgtgtagacccttttgcttgctggcgttatgcatgctactcccgtgctggaaattcttgctaattcgacgatcggtatacgcgtcctataaactgtgcttcgtccaagatgacgcgcagctaatatctgtagtcctccttgtggaccacctaaaaatatattctatccgtcccaaaatataagagatctaaaagaatgtgatatatctggacaagttctttatccagattcatattaatatgatacatcatatccattcaaagtcccttatgttttgggacggaggaagtatgtggcatcggatctcgtcttaattatcataccatctaatctgggaggtcatacatgcctttttcttttcgagagacatatgatttggtttttgctatatataaaatgattatgatggagatttaattgattatagtgctcatgggaagcttaatttcacagtaattaagtctgaagatcctgaaacaggaagccactcagatgccctttttatcatcaaaagggttttcggtttcaaaaatcatgcatagtagtagtttgttttgatatgaccaaacatattttcatttcagatataagtctaaaggtatactatcaaactaatactgttcttgcactgctccttttcaatcgatcgcactaattacaaagggcaagatcagatccatgcaagtgacacacaggtcacccataccccactccaaacacccagatttcctcctcgatcatgcaagtcatggcgacgccttgagcttcggcttcacagttcgaaaatcgaaccacaagcggaggaaacagatcgagacagaaggcggtacctgaaaccatattggaacgaacaattcttggttatctgtatatggaattcccgatgcctcgtatgcccttaatttgcacatccaacaccacaccaagatatcaggttgtagtaagcatatatgtagagcaactttgctttcatgagaagctatcggtttgtaatgcagttatgtttttttttccctgaaaattaagtaggaagatttgagatttcaaactggagtccacttaggatatcctggtgtaatgcgtgtaatgcgtccattatgactatgtgctatatatgtaggtggtattttctccgggttgataatggttgtcgttttagcgaagtgtcgacgggggacacccgtagaccggatatagagagtattggggtacgctggtacgaggatctacgtagtacgacatcaaggaaacaagagacaaagattatactggttcaggccccttaatagccctaatccagttgatatgggattatatggagataaccacaaattacaaatggaataatagaactcgacgataccgacaagatcgtagtcgagttgattcgactagatcacccgacgactttgctcctgtaggcaccggcttcgtagactgtggtcattgtgttggctatgagattcgatgccttaggccttcccggggggtcccttttatatcgcaggtcaggtggtctccaagtaggactcggagacatcggactctgcatgatacagtgacgacccagtcctatacgggtagggacctttccattggtggacttcgtgatggatttccttagcgtatacagtgaacgtctgtacacgcgcagatgtaccatattgccgtatagcgtacatccaagggtagagggtataccttatccgtaaccctgacagtagcccccgacttgagcttaaatgaacttatgtaatcggtcgcgacttctgatgtcggagttgctgtcgttctcgactggtcgatctcggtgtgaggactgtagagacaaggagtggtcgacaacaccatgcgaagttcaactgttatgagtgaatttaaattgaagtccaaaaaaccgcctcgcgcaacggacccagaaatttccggcggccatctctctcctttccttggaattcgcaccgtcggtagtgcgcctattcaaaggagttttgggaatccattttggagtccggctgttgcaagaacattctagcctccgaacgctcttcgtcttctccgcttccacgcaaaccctaattcgctcgcctcggtttcttctccggtgatctccaacggcgatgaaccttgacaagtccacttccaccagcgcgtctttgaagaagttgcaggaggagggcgctctccccggtcgcgggaccatggagagggaaccgggaggtactgaacctaaacccgtcctgggccgcatggttgcggttgaggattatattctctgtggctttcttcctccgccttctgagtttttccttctcgtcttgaacttctacggtctttctctgctccatctgaaccccatctccatagccttccttagcattttttatcatctatgtgaggcctacattggggtagagccgtttcttgacctcctccgtttttactacgagttgcgctggatggaacctaaaaaggtatccgggtgtgttggtttttgacttcaagatggcctgaagtcacgatatatccctttctagtgcccctcttctcgtagcaaatggcgggcgaggtggttctgaggagcaaccagacaagattccgtcttggaccgccaaacccgccttgaccctatccctccagtctttcattgacatcatcgatgacctccgagtacgagggttgttggagtatgaagtcgctgccgacttcattggtagacggatccagctgctccaggctcgagcccatccagcctttgactactctgggccggaggacacgacccgggtttctcctcagggtatttttcttgtattctgggtttctctcctttcatgcgcattcctcctgacttatcgaaatttggttctcgaactacaggtttgaacagcgcaaccgtggagcgccgtgttgcccaggtgatgatcagtggtcccacgacggtgagcaacgcccccatccctctttgcgagaaagaggcggctgagcgcgaagccgcaatcaacgtgagtgtaatcgatgaccctttaccctttaactctttagatcgcatcgtgacttcatgttgtgcaggctctccccatgactgacatcatcgggccgctcgcggaccaccagacggcggcttcgttgaaggagggcattgcccaggaggcgtccgacgcggccattgccgctactgctgccacgaccagcggcggcaaagttccgacgcccaccccatcgataagcctttttggttatcaattacatagtcggaaaatgtcgccctcatatcgtactcggtttacttaggcctcggatgcgtctcccccgcctccacgacggcagaggctggtgacactcggcgagaagtaagtggacgaaatttgaggcccttgacttgatcggattttggcgttttgttatgatgaccaacatggccgtctttcgtagggcggcgcgggcgaaggcggcgcaagatgggtctggggaaactccagcgtgtctcctgcagtggcctcgactgatgtcgttgtcgtgcccaggagccgcgaggtgacgcctagcggccctgccagcgatcttgcacccggtcgaggcccgcctgctgccgtcctcacatggggggagctccaagtcgagatggggcgcatcctcgaggctggtgctcgcggcataagttgcgagatcgcggaggcaagggcggcggcggcggcgtcggcgaacgagcgtgccgacaaactggcgcgtgacctggcggaggttcgcgaggacctccagaaaatgagggaactggtagccggcaacgaacggcaatggcaggggctcgagaactgcatgtcggaactcgagaacaacccgtcggagatccgaggtttgttgcgggtcacctacaccggcctacaccagctcgccagggaatgtagtgtcaagatcaccatcccggcgaaccctgatgagttctcattgacgtcttcgctcgcagaactggcggcggcgatggaggtgatcccctccaagcacgcggcagggatcggggaggaaacgtccaatgggatctacaccggggcgtgccatgtcctcgcgtgcgtaaggttggcgcaccctgaactcgatctccagaagatcttggatcagggggcggctagcgacgcgcgtaacgatgtgatggaggaggttggcgatctgggggagtccgttctcccactttttgaagagtagggctactacttgtctgtaccccttaaccaatcgcgctttgtaaaactttcgttggttccaactgcctttgtgtgtgcagttattgccttagttttccttagcgtcttgattttgagtactttgtgttgattatagagacgtcgatgtcgaggatatccagcagcgcgggcagcctgagttgcctgtaatcgctccggtactcgcactcgagccgtatgcgccacaggacgatgtggaccaggatatggcgatgactcctttaggttgttttttttgtctccatctcctttgctcttctatctggattagcttaacttgccgtgctctcggaagaggagaacagcttaacttagttatttgcttgccgagcagacctcgagagtgcgcttgctgaccacgaccgtcgcgtccaatactggaggacgaagttcggggtcgccgaacttgagaggactatgttggaagtgaagagggaccggggcatggagacactccgaggtcgcgaggtgtggttcaactcgtacctcaggagtttttgcacagctatggtcgttgtctgcagggaactccgaatacctcgtggggatcccaaggagtcagcggccgggtatatctcatggctgaacggggcctgtgctcagctcgaaggcatcggcaagcgtatcaacgaggccttgaagcaggagtgtcgtcgatcgagccggtatgccggagggcacgtgctggcatgtatacgagatcatcgtccgcagttacacctcgagttcctccacgaagggttttctcgttctcggaggactcctgcggagatagacaacctagcgaagtcgatggcgccgctagcggagaaaatcttctagtcgatggattggcgttggccttcctggtagtctttgtatatctgtgacaagcatcttaggaaaagtgtaatatattttggaattttttgcggtctgtaagaaatacttgtgaagtagaaagggagtctatctaactaagctttcttactctggatgtggtgcgtacgagtgtcttctcacttcgcgacttcgatcagtcacttgagttatacactctccctagcccccaaccttgtcatcggagaattcttctcggaagattaggctcttagacatttgacttgccttagttgaataagcactgatcctagcccccagccgtgaagttggaaaatccatttccgattacacggcttggttaatacgcatgacgagaactcttacactaccagatcttacatggtctttcgtctctaaaggatccgacaaggccttatcagctctgggcgtccccagccaaagttcccttaggttcctcgaaggccttgtcaagacggcgtaaagggacatgaggataggtttcaacgctaggtgtcatctgggtaagggatcgttgggaagggacactttgattgaaatctgtaccttgaaacaggctttactgaagttgtaagatgtcttacaagtatggatactattgacttatacatagaatttacgcaattggtcaatgttccaagaatttgctaactcgcgaccatcgccgtctgcaatcttgaatgcgcctggccgcaagacttgtgtgatcgtgtacggtccttcccatttgagtgagagttttttcgccctgcttggctttggactcgccgaaggacgtagtcgccgatcgaaagtatgcgtgctcggatgcgcttctcgtgataccggcggagggcctgttggtagctagctgccctgacggcaacccgttctcgatgctcctcgagtaggttcacgtcgtcgtttagctgttcctcctaatcctcgtcggagtacttatgcactcgtgtactctgatgtcgtaactcggtagggagcatggcttctgagtcgtacatgagaaagaagggtgtctctttgttggacgttgtcggtgtggtgcgcacggcccagagtactgaggggagttcttcgacccacttcttgtcatgtgatatcagcctgtcgtagacacgggtcttgatcccttgttgtactatgccatttgccctctcgacctgtccgttgctctaagggtgagaaaccgaggcagagcagaacttgactcccagtccgatgcagtaatcctggaaatcgacactgatgaactgggagccgttatccgttatgatgcggtgaggcagtccatatctgcaaaatatccctttaatgaatttgatggcattgtcggccttgatttctcccgtgggtgttgcctcgatccatttggtgaatttgccgatcgccacgaacaggaatttgtagccgccctgtcctcgtgggaatggaccgagtatgtcgagcccccagcacaagaacggccaagtcagagggatggtttgcagtgcttgcgctggtagctttgtgtgtttgctatgaaattgacaagcttcacactgttgtactatgtcgcaagcgtctttgagggcggttggccagaaaaatccttgtcaaatggcttttccgaccaatatacaaccggcaacatgtgacccacagatcccttcgtgtatgtcgaggaggaggtgttttccgtcgtcagacgagacgcatttgagaagtaccctgtttggcgccttcttgtatggatcgttgccgattatacaggagatttttgcttgacgggttattttctcgacttctgcatcgtccttgggcaactcgtcgctgcttatgaatttaatgagtggggtccgccagtcgtccgtggtctcgatgtcggcaacggcacgctctgcctctgtagcccctgagctgatgtcgggggcgactaggctatcttcgccgtttgcctcttttactgatggctttgtcaggatgtccagaaaggtgccgggttctagtggctctcgtctggatgcacgccgtgctagattgtccggctcgatgttgtccttgcgatatacgtgtcggacctcgatcccatcaaatctgtttttcagcttcctgacttctgcgagatacttggacagctcagggctagagcacttgtaatctttgtgcacctggtttgcgactagttcagaatccccttttacgatcagtcgtttgactccaagtgcagctgcagctcttatcccagcgagtagtccttcgcacacggctgtgttgttggttgccctgaagttaaggtgaattgcatacttgaactgatctcctgaaggtgatgtcaagatgaaccccgcacctgctccctggctgttgagtgcgccatcgaacgccattgtccatgtttcgttgtcggtctgactgtctaacctgttttcaggcgtagtccaatcggctacgaagtcagcgagaacatgggacttgatggctgttcgtggtacgaagtggacatcaaattggcttagctcgactacccatttcgcaatgcggccgacaacgtctttgtttctcatgacctcaccaagagggaaggaggagacaactgtgaccctatgggcttcgaagtagtggcgtagctttcttgacgtcatgattactacgtagagcagtttttggatctgtgggtatcttgtcttcgcgtcgtggagagcttcgctgacgtaatagactggtctttgcacgttttctcttttgacaacaatgacagtactcacagagtaaggcgtggcggcgatatagaggaataagtcttcattaggttggggagcaacaagtacagggggatttgacaggtagcgcttgagcgcgataaacgcctcttcggcttcctgtgtccatacaaatttgtcttttttttagcagagcgaagaaaggttgtgctcaatcttccatcctagcgacgaacctacttagtgccgccatgcatccggttagcttctatacctccttgagtcttgtgggcgacttcatgttctcgattgccttgatcttctcggggtttgcttctattcctctgccagagacgaggaacccgagcaatttgcccgatggtactccgaacgtgcacttctcaggattgagcatgagacgatatcgtctaaggttgtcgaaggtttcccgtagatcgtcaatcaatgagtcgtctgtcttggtcttgacaacaatgtcatcgacgtaggcctcaacattgttacccagctgatcgctaagtgccccttagaccgtacgctggaaggtatttcatgcggttatcagtccaaacggcattttaatgtagcagaatacaccgaacggcgtgatgaatgctgtcttctcctcatactcttttgccatgctgatttggtgatagccggagtaagcgtcaaggaagcttaacagctcacaaccagctgttgagtccactagttggtctattcgagggagagggaagtgatccttggggcacgccttgttgaggtcggtgaagccgacgcacatcctccacttcccgttggccttccgcaccatgactgggttggctagccactctggatggagtacctctttgatgaaactaactttgagaagcttatcgagctcttctcgtatggcatgtttccgatctggtgcaaatctccgcagtttttgttttactggcttggcgtcgggtcgcaccataagtttgtgctcaatcacctccttggggacccccggcatgtcggacggttgccaagcaaatatgtctgcattgtcacggaggaaggtgatgagcgcaagtttctatttctcgttcagtgatgccccgatcttgactgtcttgtcgaggttggcactagagagtggaacgattttgattgcgctgtcttgtcggcgtcttagttgttttgctcactttcttgggtggctcggctgtggcgggtgggctgggcgtatgctcgaccatgtcgaggctccgcttgtcgcagtggaccgccagctttgcgttcccttgaatagtgattgttcccttcggcccgggcatcttgagtacttgatacgcgtagtgagatgcggccatgaacttcgcgagtgcggttcttccgatgatggcattgtatgctgtgtcaaactcaacaacatcaaatgttatctgctctgtttggaagttgctcatttggccgaaagtcacaggaagcgtgatcttgcccaatggtttggacgaagactggggagtgattccgtggaaaggttgatcggttggtgtcaacttgcttcgtggaatcccctttgcgtccaaggtgctggcgaagagaaggttgatggaactgctgccatcgatgaggactcgcactaccttgatattccgaatagtgggttcgaccacgatcggatatcgtcctaggataacagctaccttggggtggtcctcatctgagaactcgatcttctgtttagaacacttcatcttcggtgcaaccccttgccatgtcgaacaaacctcgcgctccacttttttgtattctcactttgaagagtacgctatggaacctccgaagatgtgcgagacatgaagatcaaaatctgggtacgccgagtccgagtcctgagtggttgcctcagcggccttctcgactacacgtactcgtttgcccttctccaaagccagttgcttttccagcgactttttaaagatgaggcaatcctccagagaatgtctgcccaacttgtgtatggggcaccatattctcttcgtatcattgccttgtaggtctgggtgtttgggagggcgctcgtattcagacgcgaggacttctgcttgagctttccttttcccactcttgccgcttttcttctcgcttgtttcaggttcgtctttggctggcttcttctctcctcccgcctttggcttgtcgttcttgcgtctcagtgcgtcgtccgcatgagcgcatcgatcgacgacctcgaaaaaccttcgagttgttgtgattcgccttgttgccaactcctgggtagtatagcgatctctgacactggttttgaaagcgcgaatcacagaagcgtcggtgatatcggggatcgtatttctgcattcattaaagcgccgaacatagtccctcaaagattcgcccggattctgtgttaatgtgtgtaaatcgtcttcgattgcgtggcgcttgtaagttccttggaagttagcaacgaattgctgccacaaatctgccatgaagaaatcgagtagggtgggaggtgcatcagccacgaacgcgcagaacctttcaactccgttggcaaatagtttgctaacgtgttgtcgtctgccccggcagcgtatagtaccgtggactagacctggaggaattctttagggtcagtactcccattgtacttctctattgctccgggtcacaatctctcatgccatcggacaacacgtagagaattgttgaaagctctacacccggcgctgggggcggtgggttgtcggcgatcgtgtgtcctccgtggatgtctatcggatgacgaggatgaagatgaagactacgatgacgatgggtcacccggctccggtgtccgattccgagggcgatgttcaggttctcgggaattctatcgtcgtccaccattgttgtcctggcgccgatccccattatcatcaccgtcatgtcggcgtcctcgtccagtatcgtccggcgtccgctgttcgcgatcgttgcggtcgcggcggttatgacgattatggtggtgttggtcttcgttcgagcggcctcctcgctcttcgttctcacgacgtcgtgaagagacacgatgtcgggaacgattctcgttgtctcgcgcacgtcgtgcttctcggcggccattcagatggtcgcggagatcgccggtgccgcaaggtggaggagtagctcatctaggtgacgtccgttgctccggtggttcgccatcggcaccgccagctatcggatgttttggttgtgctctagtagtggcctcctcgaacgcgttactaagattggctaccgattcctgtagtcgttctgtccatcgtgcgagatcatcgttaagtacggggtcatagggagcttctctcagtattgcgttgacggtgccaaggtgttgggccggcgtgaccgcctgattctccacctctgcgttagcgtgcgcagacgtgctagtcccacctatggcaaacacgtcgcgtggtgtactggaagatgacgagccatagtcttcgagcaagtgtaggactgatggctcgtgggggtcgatgtcgattactccaacgaatcgatccgaggtcaacgtcgctccttgttctttgtctgtatccttaagagaggttcctgactactagaccttaggatgcgtcgttttcatggcacggagaaagaccttgcagcttgagacttcgtgattcttcgtcttgtgaataggacaatagacatcacgagttggagaagtacgctggattccacgctccttgcaagcatgaatttcagcttgtacgttgagaaaaacccagcaagcttgcaagttgtgcttcctggacttgtggatgggacaccaggactttgttacctcggaagttgtccttgtcagctcatggttcttgtcggaaggacaaggtttggccgcactaggaaccttctcggactcgtatgacgtcgatgttctgttctccgctatggcgggaggatccttcgacacagggtcgtttgaggttatagctacggcgttctcgtttccggtcattgatggaccagccgagattggtaccgtggtgtaaaccgggaaaacaatttcgctgacttgagtccacaccagcattgttgaagtagggactccttgaatggggccggtgttgacgccgttgtcgacaaagcttgatgtcatagtagtagaaccttgagcaccaagttcccgtacctggcgcgccactgtcgacaggggacacccgtagaccggatatagagggtattggggtacgctgctacaaggatctacgtagtacgacatcaaggaaacaggagacaaagattttactggttcaggccccttaataggtaatagccctaatccagtttatatgggattatatggagataaccacaaattacaaagggaataatagaactcgacgataccgacgagatcgtagtcgagttgattcaactagatcacctggcgacttcgctcctgtagactccggctccgtaggctgtggtcattgtgttggctatgagattcgatgccttaggccttctcggggggtcccttttatatcgcaggtcaggtagtccccaagtaggactcggagacatcggacccttcacgatacagtgacgacccagtcctatacgggtagggacatttccattggtggacttcgtgatggattttcgtagtgtatgcagagaacgtccgtacacgcgcagatgtaccatattgccatatagcgtacatccaagggtagagggtataccttatccgtaaccctgacaggaaggatgatatcaaactttaaaatctttaactataagtaagttataaaatatttctcttggaaatatagagacacaaatatagattagcattaaaaagtacttccacaaaataataataataataatagtaacaataataatataatagatgatagtgctcaaagttattatttaaataccgtatccttgtccaaaatgataagtgttattagaaccgaaggaagtagtagatgctactcccttctttctaaattgatcatcatataagtttatacaccaagttcgagaacaatttaaatcacatcaatcaagacaccatgcatacattctcctacaatgcatgcatcgattaaaatctcatgccaattacacctaagtatgcacatattctcccatactgcattaattgtattccgatgaaatccgtgtccatgcagttatataatgatcaatttgagaaattttgaattctattacatgatgatcaatttaggaaggagggagtaatacgttggttagatgaattgacttgcatcaagcagcactagaacggtaaccaccatctcaattgggcacgacgtccatcatagcctagaaatcacaaatataacttcccgcctctcccaggctggaccagtcttttctacacactttgtcttcactcgtgtgcacccaggaagaatttcccgatcggtcacctattctgaaattgcttcaggccaagcacgcttaacattgtagttttttggagatcggttctggagaagaagttgtaacttgttgatatctaacagtggagggacttagaaaaattttcaatcggatctgagaaaccttactcatattatagtcaaacatacatctcaatcaggcataagtatagagcccatcacagatgactcatccgtgacggacattaagtcatctcaatcgagcattagtatagtgcccgtcatagatgagtcatccgtgatgggcgctatactaatgcccccattgagatgacttaatctctatcgggcattaactaaagcccgtcacagatgagtcatcggtgacgggccctatactaatgcccgattgagatgacttaatctctaccaggtattaaatactcatcagtgacagaccctatactaatgctcgattgagatgacttaatctctatcgggcattaaataatgcccgtcactgatgattatttttctattttccatatgaaatgtttatattgggctgcagga

SEQ ID NO: 24533 - DNA, 25300 bp, Oryza sativa
cagtgggattgcaccattgtatcatgtttagttccagtatgtacatgccaagcagcaccaccagcagactgacacagtgataggcgccgaatggtacttctgtgagcgaggtgtacgagaatctttacagacggcgagccattttccactctcgtaagattgcggcattttgctgcatgaatgccggccgttgcattctgcattctcctgctgcccatttggatgacacaggacacgacccgctcgtgcaggggttgccactgacaatgccgagctatggaagccattggcagccaaagccacgtccatatcccgaggtggatgaaagaccaggcatgtcctccgtgaacatctaattcctcatgcctcctaaaccccaacacgcacaaatgaaccgaagctttttagggcactcccaaccctccacctagtgtctatagaatttattaggctgccacataagcaaaaatatgatctgtgttggcggctgtaaaatgtcgattctataccgccaacatctacataaagttcggataataaaacatctaacatagtgataggtgcttaatctcacatattccataagtgttggtatatatttgtatgcagatgataaaccccgatgttgggaggaaaatcagagtatagtgagagaaatgtgtatccatataaggaggggttgtgaacttcatcaaaacatcagtgaattaacccaaaactgcgagaaatggacagagaagagcccagggagtccacagatcgaaggccaggctaggagggcccagcccaggttcagccgaacccctctgatcactgttgatccttgggtttggcttggacgctccagatgctctcccaatgatggttgcgaggcaattcggacatttccccttacaatcgtcatacctgtcctataaatagacctcacttcattcactctcacacacacttccaagcttgagctgaattataagaggctctattgtactatattgtatactagaatagaaagagagtagagtagaagaagtcggaagaattccggagttgtcggtaatcttctcctatttttcttattctgtttataactttgaatttaatataatattcttctcgagtaatttagatttatcttgtgagaattatctcttggttagttcctaaatagcatacgtgattattgttcactataattaactgaaatatagtgattgctttggtgagttataaacactaaagtagatagtaattgcttagacgtggtgtttaggtaattgttatccagtaattgatgtgtatcccgcagtacgtttgaggtgggtgtagaggtggtgatagccctcaagatcacttgtaagtcctccctgtccgggtacatagtagagcgacatctgagaacagcgggttgccagtgcctgaagtattgcgttaggattaaaattaagctttccctagacactgtttctcactaataaatcctctctatcctggcctatcatttgcttggtgtccttggatgaatcggaggaagatctgatcacacacgttcccttggaatcgatacccttggaatactccgtaagggaaagtgctacatcggtatatctgtgcacttgcggattttatctgtgaccgtaagaaataccaaaaatctggcaaagaaattaaagaagggagagaagaaaaaagagagaaaccgtgtctcatgcacgagacggggttgggcgcaagcaccaagactaggaaacgagagaaactagcgttgggggcaactcatcgtttcttccgtccggattttcctcaagctcccgatctgctgcacccgcctccatcccaccgccatgcctaccaccatcccacgctaaatcctcacgattttttggcgtgtccccaatcctcttcgcgccaacaccaactcgtgcttccctctatccatcttgttgcctccttttttccccaatcacttgtcttctccaatctctctcgtgatagctagaatcagccaaaatcatccccaatcactcatccctgagaaagtagttctcccaagccatgtgcaaggatgaatccgacggaatcgaagaagcgtcgatccaaatccaatcaggctgccggtgaaccgaccgcccttgatccagatgccgctagtgttgtgggagccgatggtgctccagatgctactgctgttgcttgtggtgctctacgagctagtgctccaggcgctggctttcctaccgcaggtgctcatgccgccagtccatggtggcaagaatcatctcctgatagctcggaatggtatggtgcaaatttttgggtgcaaagatttaggttgatcaatgttattggtgaattaatgggttatattagactgacaactttttgcttcaaagaattgctaatatattgttgtatagctggtacttttttgcttcaaagaatttttcgctaggcttggtggcaagatgtatagctggtactgctaattacttgtattcacctgattaatcttagtcaagctcatatatgctagtttatggggactgatttttttctgaaatatattgcgcttgtatttcaccacttctgttcttgtcatagatatcataatttttttattgttttctttttcaggatgtatccaccaggtggtttcctgaattatttacagataataagatctctccatttagccagacacatccatttgtgaactatcataatgcaagtaagcttccagaaaatttccactttgttggtgcaccaattagttattctacaatgttctaaagcgataccgtcaccaactaggaggtgtgctgcagcacaaataggttcacaagataaagaaacaattgatattgaggacgatgacaccatttagcctttccgatgctaggtccgagaagcgattgaattggtcaaatgaagaagacattagattggtatgttaatcttctctgtttctttttaaagatttgagtctgtatgcttttaattttatttgcacttcattaaaggtacggtttattcttctcctaattgtaggctagtgcttggctgcacaattcatttaactcgatcgatggaaatgataagaagtcaaatcaatattggttagatgttactgctacatacaacaacaccactaagagtaaccgtatgagaaattgtaatcagttgaagcaacgttgagagcgcattaagaaaccagtctccgaattcaacggtttttatgcaagaatcactaaaatacatcaaagtggtatgagtgaagaccaaaagatggaccaagcattccagctatatgcctctgaacataatgacaagcgtttcacaatggtgcatgtagggaggatattacgacatgagaaaaagtggtctacatatttgaagaaaattaagaaggaaaaggacaagagtgtaactcctaacccaactcatgttgtgaatgtcaaagatgctccaaaacaacgtcctattgggcataagaaggccaaagatgaatgcagtggaaaacgtctgacatcagacgctatttctgttattgaccacaaactagataaattcattgaagcaagcagcaatgctgagaagatgggagaggtacaacaaagtttggcaaataagaagctagaagtagccaaccttaatcataaagcagctcaggaacaaacaaagggtaaaatgattgacctttacaaagacttactgctagctcccacaagtgatcttagtcaagaagctttggctgagagatccaaagcattggagtgtatgagattggctttgtttgctaaagataattgaggtatgtttttaatatattgttggtaaacaaattgtgttgtgacagtaccattcaaatctgaacaagtgacaattttgtcaattgtgtgaactcattttatttttctagtgcttgtttgaacataattaattatgtgaactcattattttatactgcatgttgaacacaattaattttgtgaacccattttctttttatactacaattgaatactatcaattgtgtgaatgcatcctctttttatactgcaactgaccactatatattgtgtgaactcattttatttttctagtgcttgtttgaacacaattagttatgtgaactcattttttatactgcaactgaacaccattaattgtgtgaacctatttgactacccaaacatatttatgtgtgtgtctatatatatatatatatatatatatcctctagctcacacattctccccctcccctgccttccacattctttcttccctctttactcttccatcttctctcatccttaacaccatgtcgaaccaatctgatggtgattcccctgcgcatgatgattctcttgatgaggtgagtaccatagatccaatggatctgtacccattggatcatattaggagcatactgcgtgatcttgctaatcatgtagtagcggaattgaagccgaagttgaagctctacaagatatgagacctactatgcagagtggtccaaggaggtatgttttaggccttatgaagaatcttaagggctattgaaagattactttgtacagaatccagtctataatgatacaaccttttagagaagattcaggatgagaaagcacctcttcttacacattgttgaagccctagggcagtgggataaatatttcacactgagaatggatgctcttaaccgcccagggttatctccacttaagaaatgtacatcggctattcgccaattgggaaatggtagccctgtagatcagcttgatgagtatctaaagattggagatagtactacaatggagtgcttgaagatgtgtgtgaagggtgtgattgatgtattcggtgcagagtatttgcgacgccccacggtgcaagatgttgaacgcttagtgcagattgatgagcgccgtggtttccctggcatgttagggagcattgactgcatgcactgacattgggagaaatgccctgttgcatggtagggaatgtatactcgtggtgatcaaggtgttcctatggtcattctagaagcagtagcttcacatgatcgttggatatggcatgccttctttggtgttgctggatccaacaatgatactaacatgcttaatcaatcaccattgttcatccagcaactgagaggggagggtcctcaagtgtagtgccatgtcaatggaaggctatacaacacaggttactaccttgcaaatggcatatacccataatgggttgtctttgttaagtcaatacatcatccacaatctgaaaagcgcaagttgtttgcaaaacatcaagaagggaaaaggaaggatgttgaatgtgcttttggtattttgcaatctcgctttggtattttgaaacgacctgcacatctatatgatcaaggtgatcttgagaatatcatgctagcttgtattatccttcacaacatggtaatcgaagatgagaaagacatcgagtagcttcctcttgatttgaatgagacatcaagcacatcaactgtattagaagctacaatctcgcatggacctaacctagagatggaagaagtgatacaaagaaatgttattattcatgatcgtactactcataagctacttcaatcagacttgattgagcatatctagcaaaactttaggaattcaaactaattaggtgattgttaatcatttaaagtctaatttacaatttgtgtgttgccaataactagtatgtttcattttaagttgcaatctctgttacattttagcctagcagtaccagtttagctaaatatgttatctcttatttttcttgctctaaagcttctgaattattttgatattgatttgccaactattttcttttttgtagatcaagtcctgctattttggtgctgctgtgctgctggaggaaatgctatggatcaagtttggatgctgtcgaagcgtgtggcagacttgtggttacatatgtttctttggtttgctgttgcagtgcacctagaagaactgctcatgtcatcagagactaatttgagtccaactatttcggctaccagtttgggtcctaccattttggctacctatatgtttttttcctttttattgtactgagatggatgaacttgaaaatttgctacttctttatgctcatatatgcactgatatctgctagttctactcatataatgtgatttgcactaatatatgttcatgttttgatatttggcactacagtattatgtagattgatattcaaatttggatgtatgtattgatgcgtgtcacatggatgtatgtattgatgcgtgtcacagttgatccttcgtttacatgacatgcaaatagttattaaattttcttctcttaagaaactgctatagacactgtgcattggggaggtagtgtctacaaatacatttattattgtttctctcttttagacactacctatagacaccgtgggttgggagtgccatagcatgttcacatttcattgtgattttcagtaattgtgatcggtatcccgggctcccaagttccacccagtacctatactgctcccagattaatcaatgtaccgacactaactgaaacctattaatgtcactgggagcatgctgctgccatttgagtcagtgctcctagacttttcttttcccggaagaaaggccatccaatgatagaaggaaaaaatattataataaagtttttactcccgccttatttactctatggatacttcttcagtaaaggcaacgtactacttgacaattgatgaattgtgaagtaactcagatgagtattactccctccgttccttaatatagggtgcaactgctctggaccctaataccaaggaggcgtaactattttctcgggtgacgacgcatgcaacgtttgctctgcccgtgtgcagcatgcatgcagcccttcgcatctgcctttaaatgcatgcatctgttcgcatcctcccccacgaacgaccagctattttggcgcgcgaaagaccccgcgaacgcatgcacgtaaaaatagcttggagatttggaggcatcatcaatggaatgcatcaatgaaaattttggacgcgccatcaacgaaaatttcgaacgcaccatcaacgaaaatttgaattgagctaatctaatcgccagcttgttctataaatatggtgagagacattcattccacaataagcttgtctcagctttcctcccatgattgaacacaatggcaggtttggatctaaatcaaccttttaattgggatgaagttgaggatttggagggtgaaatacttgatttgaactacgattatgtttgctatttagagaacgaaggtgtgtacggttgctgctagtgttttcttatttttctcttatgtacctagtgtttcgatcttcttctatgatctgtatgtgcttgatgatctagtttgttatatcggtcagatgaagaaggtgggcacgaagacgttgacaacacagccgcccgcggcgacaatgatgatggcggcggcggcggtgacaacgatgatggcagccgtggcggcaacaacgatgatggcagcgacgacggcggtggcagcggcggcggagacggcgacaatgatgatggcggcggcggtggcggtggagcacacgccggcacaggtaatacacttaagtgtttttttttgctcagcttgtttactggatgagcctttgcatgtagctatgcatgcacagtaccatgcaaaccatgagtaatcttgttgttgttgcttgatcgcggtcgatatataccatgagtaaacatgacaaaactatgcaaaccatgcaaatcatgactgtaatatatgcacgtactaagcatcatcaaccatgtctaggtatcaatatcaagaggaggaggcactaccctcctgatgtaaaacgaaccatatatgccaagttattagagaaatcaaatcctggcatgatgaaggagggagtgacaaagtcagttgctaatgaaatgggggtgccgttgagagttgtccaacgcgtatggcgacatagacagattggagatggaattgaagcttttgagtccaagaagaagaagtattgtggcacaaaaaacttccgtttgatcctagtgtcatcaaagatgtgccgcttggacaacgccatagcatccgtgacctggccaacgctttgcatatggcaaaagccacattgtttaggcgtttgaaggaaggattgtttaggcgccatacaaatgccataaagttcaccctgaccgaagataacatgaaggcccgtgtgcatttttgcatacaaatgcttgatagctaaagcataccggacgacccaactttcaaatctctgtataacgtcatatacatagatgagaaatggttttataggacaagggtagaccagagtttttacttgggcaatgacgaagagaatcctaaaagaacagtggtttcattgataaggtaatgtttatagcagcgcaagctcgtccaaggtttgatgagcatggcgtatgtatatttgatggaaaaattgggatttttcccttcacttactggcagccggcccagaggagaagtcgcaatagggagaggggtgaattgtttagtttttcttaattacttgaaatatgactactactcacaaccatattaatctttgttactcgattgaatgtaggaaccttggagttgaaggccatgatatcggtcacgagggacgctatccgaagctacctcattgaaaagatcttgcccgccatcaaagaaaaatggcctatcgaggaacgcggacttcctatctacattcaacaagacaacgcgaagacacacattgctgttgacgatctagaattcttaggtgcggcacaagaagatgggtgggatatatgattagtatgtcaaccgcccaattctcctgatcttaatgttttggatctaggtttttttgcagccctgcagtcgttgtttcataagtcatctccatcaagcatcgaagacattgagacaaatgtgatcaaagcatatgaagaatatccggtggataaatcaaatcgtgtgtttctcacacaacagggttgcgtgagagagattatgcgtgcaaaaggagggcaacattatgccatcccacatctgaagaagggaacattggaaagtaatggtctgctgccaataaggttgcaatgtgataagcaaatctatcttgatgcattggatttcatcaatgcatagcttaggattttactcttgtaactgtgctttgtccaacaactaaaaaaatggagtattcatgtttgatttcattttatcttcaacaaaaagaacttgcatttaaccgaactaaaaaaatagaggatggaacaatatgaaaataaagaactgatcttgaacaaattagaaaatgtgcatactctctcaacatactcagggaacattagttttgccatttccatagagacagatacaataattctagctgtcttccttgtcatcggtctgttcgagtgaatatggaacaatagtgtcgttcgctagtgaatcaataacataccgtacatcgtcggagttgattaaatgatcagcgctggccgcgagaccttcgcccatgatcgtcgattcaaccacgctgtcatcacaggtttcggcatccatcgctgtcctcgcaatcattgacgtggttagctcgctcctcctgcagccgcatgcgaacggcgtggagacaaaccattcgcgcaagagctatatccatttgcccttgctgccgcatgcggacggcggcgtcgcaaagcactcgggtacggctgagctccatttgcgcacgctaccgcattcggatggcgtggacacgaatcgatcgcgcacgaccgaactccatctctgcttgttgccgcatgcgccggcaactcctggccttcgtcttgccgctcgccgggcactccaccatcttctctgccatatccatcgctgctcgccggtgctcgccgatgtgttacaactaatgcaagtgagcttgtaaatggagtccggccagtgagccaagagctttaaagcaaccaaaagaaagaaagaggccgtaagcaacatgcaagaaatgaagagccaactccacgcattgaaaacctttgcatgcatgcgcacggaagtcgaccagagcatacttttgttttaatgctacttgcttgcatgtgcatgggcgccctatattctggtacacttcaaaaaatcagttgcgccctatattatggaacagagggagtatgtaggggatattggactcgaatttcattagttgcacctactaatatatgcatgcttgccaatagtctactaatttgtcatgctgcagtatagtatgtgcaatccgtttttcttgacggatttttttcttgacgaatctttttatttctccacaaagccgaacgtgggaatctggagatggtttggcaaagtgaccatgtcttggcgtcattttttctctcaaataatctagagacttatttgctaagggaaaggcaccacgtggcctaatcaaagcttgctagcaatatcagcattagaatataagataggcacactagttgacgcgctttctactagtggttttataaaccgtgcaatactcattttatgtgatattatctaaacgttttagaattcattctatactgtgaaaccaagttatcaggaaataagatagcattgatacattctgtttcttgaaaggaacatataatatacattttccaacctgtggtatttctatgctaccaaatcaattgccaagtaatgtgtgtcttgattgttaatttcaagtattatatgatccatcatcacctatccggctatcttatgtatctctattgtcaaagtgaacagaataaagttggtcggttaaattctaagctactgaagaaacaactttattatgtaaacatgtcaaacaatcaactgacaaatgtttttccttatttactgattaggacacactgaaattgtcacaaaggcaacataggagatacacttgatatgcggtcataggaggtatatggtctcaacccccaggtcccgtgtttaatatccaacacgctcacaatcccttcaaatcttgtgttttttttacaaaggcagcatgctttgacattcaggtcaggaggacttcaaatgaaattcttaaacactattatgttgtgatattcccctcgtccaattgtaagtgcaaccatgagttttttttgcccaaatttgatcatccatcttattggaattttttttatacttagtatttttgtttttatgagatgataaaacatgaatagcactatatgtgtgacttatgtttttaatttttttcaaataagacagacgatcaaagttgagcacggaaaatcatggctgcacttcaaatgggatggatggagtataaggccctgtttagattccctggcaagttttttcacactcacatcgaatgtttggacacatgcatgaagtattaaatatagacaaaaataaaaactaattacacagattgcgtgtaaaatgcaagacgaatcttttaaacctaattgctccatgatttggcaatgtggtgttacagtaaacatttgctaatgatggattaattaggtttaataaattcgtttcgcagtttacaagcagattctgtaatttgtttagttgttagactacgtttaatacttcaaatgtgtgtccgtatatccgatgtgacacggtaaaaaattttaccgctggatctaaacacaacctaagtgaatttgctgcttcttattagcagagtgggaaatccatatgcatttcagaagaaggttaagcatgtgatgatagagaatcaactgttgaaagcttgcttattatgttcagaaatttcacaaatgcatctccttccctgatgtataaaattactgctatagccaaagggaaaaaaaaagggccttgcactgtcaaaattttcattggggcttacatgcttgtatggctgcttggaccattgggctgcacgccgacactctatggggtcgatgagtctatcgcacctgccagataaatcacgaagcgccatacgagtcgcgagattgaaggagcgaggccacgaaaattatggcacgcgtttacatcctcgaaccgcgccacgccacgaggcagggccgtccgcccggaaccagcgttgaattcgataagagatttgtcacgctgcagtatagataggctaagaaaatttaaaacggaaaacaattttaggttggaaaacaaatttataacaaattaaatttttcattcctagtttcagtaccaccaacttgtaaagaagtcgatcatcttttggacgagtttgaggggactagatggtcactgcgaccaagtcgataactgcttgcactggaccacacaaccacagtcggccggaactcaaacaggaaggtagattgatggccgcttgtggttctaggaaatggagtgtcaactgcagctgggacaagcatccgattgcggcgtctccaccacttcaccaccttcgaaatcgacggagatccatctgaccgaaattggtctcggtctgatcgtgtggatggcgccggtctgactggtatagatcacccggactgactaccgatgtcgcctaccgcgcctgtcgccgccgccggtcggaccgcccgaatgccgccggtctgaccgccggtagatcgccggttagaccgccgaaacccggtaaacacaaatcgaagaactcttaaagtagatgatgactttattgattctctctgtgtttacaaagtgcaccaacagcactcaaccaaagctacattcttcaattcaaaattttcatttactttaaccaaacctgtagcgagaacggcacatgtagaagcatcaccaaagataatcgattcagtcttgcatgccttcttgagggaggagaaccaatttttatcaccggttgtcacgtcccaaaaggactctaaaatacatcctctaaattatgcctagaataattaaaatccgtgtgaaagcctccaacaattaaaatgtgcaaagttaaaagttaaataaggcttggaggatttttgtatatttcctaaaagcctaaaatgcgtaaataaattttagtgcaattttcagagcacaaataataattattaagaaataaacaaagttaaaatgattttataaaaagaaaaactctaaaaagtcccctttccctccctctccctcttgggccggctcagcccatctcactccccctccctctcctctccccgcggcccatccggcctctccccgcgcgcgcgccgctgacgggcgggcccgcccgccaccctcgctgacgggtggggcccacccgtcatccccttcctcccgccgctcccgccgcctcgcccgcgccctagcgccgccgccgccgcgaatcccaccgcctccagccgtccccgcgtgcaataaagaggggaaaatcactccccgtgatcccctctccctttccccccatttttccctctctctctcgcgttcaaacgggtggatttgcccccgcaaatctcgccggcgccattgatggcggccggacctcccgcgcctattccttccccgccggccgctctctcccccttccaaccctatttaaacactccctgcacctcctccgtccgtttccgcctctcgccgcccttccacctcgccggaatcgagctcgcgccgtcgctctctctctccgccattgccgccgagctccggtccgccgccgtcgtcgccccagaccacctcccacctcggcgctgcctccttcggcttcgccgcatcctcgccgacctcgtccacccctccgtttcgctcgtcgaccaccggagcgccgccgtccccgttgacccgagccgcgccgccgccttcctccgctccggctgccttttcgtcgtcgccgtcgacctagggtgagccttggaccaccgcctcgtttccccctttccctcccctctctcggctgccgctccgatgtgcccatggccgccgccggccaccataggggcgcgggcgcgccgcctcccgccggccgcgccgacgtggccgccttcgggcgcaccgagcggctgccgcgtggggcccggccgtcagccgcccgcgccctcgggtgcggctgacgcgtgggacccacggcgccggccggtgtgagcccgagtgcacccggtccaccgtggaccgtgagactgccgcgtgggccccactcccgtggacccggtccacgcgccccctcccctcggctaacgcaataaacccttttaaaattaaaatttaactgaagaaattcgcaaatattcatttaaagagcatataaacttcaaatggccataacttggccatttgaattcggaattggaccgttcaagtctctaatttttccttaagaagtcaagaacccatttttgtgctttgttcctgcttgttatatggagtttattagagtaaaagacttttcttttccgttggtcgtctagacgctgcagcttcggaagatccgctcttcgtggaagttgaagccgacgtttgggaaagcgagcaaggcaagtcacatcatccttgaacatattgaatcccagtttataaaattatgttgattaaaattattgcattatcgctttatttaaattcccgcgttattactgttttatctagccatgcctatttacctttgttatgaccttattattgttattgttattatttccttattcaccctagaataaacaaaaccccaactagtggacactctactcatagtaccactagtatgattttaggtagatgcttcgctggttaattaggcaacattaggtggttttacaactctagactttgggatattcatatcacctggacactatggaatggttggattattgtggaattggattcacacctccccctctattcaaaatcctcaaaatggttttaggctgggctcggggtgcatggttttgatattagcacctcggccatataaggaccggtcttcgggcctctgttgcaaagcactaccgtacttccacatgtctagtgggtaaggcttagtttgtggctcagtctggttataaacaaaagtacacggatggagatggacgaagtcgggggtcgatggatatctctaggacaaatgaaggctacacgagctgcggcccggtagtcgagatgtcatggcacagggccggtgtcctgctgctaggggttcagtcctgcctacctgtcccgggggttccggccgtaggtggggttgggtcggtactcttgtctatggctaggatgggttggaaactatgtcacgtcttccgtccgtataccgtggtggtatgtggcacgtgattacacgtgaggaagatgtgtcttgtgggtaaagatgtacacctctgatcagagtataatctattcgaatagccgcgccctcggttatgggcatgccgagcaatgtacccaagttagtgttttaattcttaaaaccagcttaacaactaaaatatggaatggttggcctgggttggcttgggacgagctgggacccagggtcgggttgccagttcggtctgaatcatcgtagaccttgggttaaggcaggttcgtgtgggttcacggccttgattaataatatcgtatagctctggaatcgtgtttacaaaatagctttgagcaactaagtgtctcttaatgctgtttactgcaaaccctaaccctttatattataacccccttgtactcccttgcatttatcctgcacttgtgggtgtgtcttgttgagtacggtggttgtactcagtcttgctcaatttttccgaaacccagaagaggaacccctggaagatgaaggctttggtgtctagctcgtgcttgccgtcaagcgcctatggtcattgccctagtcttccgctgtttcccatttgtctttgtgtgtgctgggccttcgccgcccatataataaattaactatttacgcttccgcttgataaactctgaaatgtatcaacttttggtgtaccttgcctcctgggacaaggaataatacacgcacgtaaggaacgcccgttgggttaattccggtcgtgacaccggtcatgtgccgcgaacaaccggaatccacgatccacacgttctcctttcttgccaccaaagcctacacagaagcagaagttgaagcctcagtactggggttagatgataataaaaatttaggaatccagtactgagacatacgaccagaagatccaataggcatatatccatgtgcaaaatcaattttagaattttcagaaaaattcctccgaggccggtctaaccgaggtacagcagccggtcagaccgggggccggtctgaccgcttctgtaccgccggtctgaccgatgctcagtagcaggtctgaccgcaggacctagtgcggtctgaccggtttcctcgagggaaaaccagatttttgccactttgattttgcaaaagcaatctctctctcctttttctgtttatgtgctaatctaaaacaaaaaccaacaatatgtccatctttgccacaaaaggaacaagtatatttttggcgatgattagacacattcgtagaattagaagacttagcaacacaagcaacaacaggagattttgaagaagatgcattcaaggtagacatgataccagcagatttaaacacagttttgttagtatcaggtttaaccaaaatctcaccacttctagcaccaacacctaacacaacaggaggatgtctagaattatgagcataaggattaaaatctaaaccacggttatgtgtgctaacctttgattgatccaaaatcatgttgaggttctctttaccatcagaaaatcttagcaaagaatttttcaaataagaaacctcttttttccaaattagcacaattttcacaatctaccatgacacttttgcttttatgacatttggggcaagaaagcacttcattgtttttcacaacatcttccatgtactcaacacgacctaaagcatctttcaatttcaacttattcaaattacatgttgagcaatcgaaaacatcatgaggttgttttaactttttagcagaaatcatgttaaacatcaatctagcatgaaaagcaattatatatttttacaacaactttttagttaaaaaaactcatccaaagtgcgtgtgtgcaaagcaaaactacaagcaagagaagatctatttttcaaatcatgtgcagcattaacatctctaatttttgaaatctcattcattaaaacctaacaatttgagcaattatcatcattaggaataagagattttaatctagcaatttcagatttaagagattcagtgataaattcctgttttctatacatcttctcacacttcttattttttgcactcaaaatattaatagcttcctcaaaagcacctacctcattatcttcatactctgtgtcagattcaccacgcgccatgaagcaaacatcggagatgttctttcccttatcatcatctccactttcaccatctacatcacttagtggctcgaaggcggcgcaaacttgttgaaaagccttcctaagattgtccagcttcctcccttgggatgaacccttcggcttgttgttgatgttggtcttctcaccatctttgtcttctcttttgcctctcccaagcttaggataatgcgaacgaagatgatcaattgaaccacattcaaagcaatgatttggaccacctcttttcctgttcctggcattattcatagctcgagcaattctgttagcaaccaaagccaaatcctcctcctcgatttgttcgagttgatcatcggatgtggcattaaaaacagtaagaaaagaagatttagatgaagaagcatcaacatccaaagaggaagaagaagaaaccaaagcactcgacttagaatcaacttttcgagaaagaacattcatctcatgtgttttcaattttgtataaagtgaatccaaagtcaaagtagacatgttaacagactcctaaatagatgtaactttcatcacccaaatagacatatcaagaccattcaaaaagtgacgagaaatctcatattgtggataattagcatcataagaagaatctacagatctaagatcactcgaaattttattaaacctagagagatagtcatccaaagcttctccaggtttcatctcaaatttaatatactcctttttgaaaatatcacgacgaagttctttaatgttatttcttccttgatgaaagttactcaaagcattccaaatttcatgagcagttcgaaagtgcgcaacacgatcataatccgaacgagaaataccactcaaaagaatgttgcgagctttgcaattttgttcaaaagcagtttttcagcagcagtattaatagcttcaggaatcacataaggatgagaaacttttctccaaatatcataatcttcagccataatataagattgcaccctaatacaccaatgagaaaaatcctttccatcaaaaacatgaggcttagttgaaaacttagcaggagtagccatggtaaaaactctagatcgataaaaatccaaagaagaaaacaaggctctgataccacttgtaggatcgaatcacaagaactaagccaaccagaggggggatgaatggttggtatacccaaaaaccgaaaacttttagcggaaataaaagttacccttgaaatcgacggagatcgatctgccggtctgatcgtgtggatgtcgtaagtctgactggtatagatcacccagtttgaccaccgatgtcgcctgccgcgcctgtcgccgccgccggtcggaccgcccgaatgccgccggtctaactgccgcttgccgccggtttgaccgccggtagatcgccggttagaccgccgaaacccgataaacacaaatcgaagaactcttaaagtggatgacgactttattgattctctctgtgtttacaaagtgcaccaacagcactccttacaaaaattttgactaaactcgaaaccctaactcaaaactcaattcaattgctctctaaagcgataccgggaagcctcacgctccccctctatttatactcgaggtagagagcctaaagccacgaaccaaactcatactaggagtcctaaacaccttagaaaaccctctagtacaagaaacaaactttacataaccaatcatatcaaattcggactccttccaaattcgactccgcatcccatacgcacacaatacctccatcgtatgccatatggaatctccatcaaccacgctcatcaactctagcctaagtatcccgcatgatctctgaccaccacggacgtcgtcttatccccaagccgactcccggtccatcaccgcaaatactctcccgaggcatcgagtcacctacacatgaaataaacaaagaaaccatattccgagaccaagctatctccaacttgactcattagtagcaaataacagtattacatacgtatagtatccatctagaagccataatcatgaaataatcacggatatccaaacaaataacccgaaaccgaaaacgacacagtctgaccggcctgaccgcttggtcaccgccggtctgaccggcatacacagcccggtctgaccggtcacataaaataataaaatcctgcgatcacctatgaatccaatcatctccaaaaccacttcgtgaataaattccaaataacaaaaccaataatttccaatgcccaattgttcatcacacaataataatcaaaaacacctttgattttacaatacaaacatctggctggtaggatggctacggcagtcggcagttgccttgcaacccttgaccacgggttgactccccaccaacgcaccttttcatttgatttttgctaaaaaaaaaacaagtgcggcccaaaaaacgagcctaagaactaactaggctgtcctgtcgcccattcattcaatgacttgccttagtctggtccgactgaaggcggtttattgcccagttcatcataaaacctgccggttaaagtggtctgaatcgattcaattgcatgtcctgtctttctattcgaccgaactatgccaacctctattttcggttttctccggttgaactgcctgttcggtccggttttttctactatgggcacaagacgcttcttgttcacgctggatttttttataacattgaaactattcttctccctcttccgttaatggaaaagaaaggttcataacagattacggagtttacaaagaaactactgttaaagcagataaaactagctacacttcatagccggagaaatatgctttcaataggtagagccgtactgaggcctgttttattttccaaatttttttttccaaaaacgtcatattaaatctttggacacatgcatgaagcattaaatatagataaaaacgaaaactaattatacggtaaatagcgagacgaatcttttgagcctaattagtctataattagccataaatgctatagtaacccacatatactaatgacggcttaattaggctagattcatttcatggtttccagacgagttatgaaattagttttttgattcatgtccaaaaacccatttcaatatccgatcaagcattcgatgtgacacttaaaaatattcttttcgtgatctaaacagagcggtcaacatatatcggggcgttcaacaatattatccagaacacgacatgcttgactgccatcatgcatatgtaccactactgcaaccacaactgtaagtctgcaacaagatcacactataacatgggagagagaaaatgaaggccgataaatcggtacataggctaggctgtgttcggatccattcaaacttccaattttttcttctgtcatattaaatatttggacatatgtatgaaacataaaatgtggacaaaaaaaatcaattgcacagtttgcatataaattgtgaaacgaatcttttgagtctaattgtgccatgatttgacaatgtggtgctacagtaaacatttgctaatgacggattaattaggcttaatagattcatctcgcagtttacaagcggaatctgtaatttattttttattagtctatatttaatacttcaaatgtgtgtccatatacatcaagcaaccgaccaccaagcaactatctctccaggatttctcagattgtccattttttttaaaaaaaagtcaaaatttagtcaaattcaattaaaatttgttacaatatcaaatatttcgtgcaaaaaagttccagtaatcccgaggttcacgaaatttcggtgaccactgaaatgacaaaaaaattcagccatttccgaaagtgtaaaccctgtacataattagctaatcctgtgcaactgataatgcgattttccctaattgtatctggtatataattttgtcttttttctgcaaatgcaattgcattttgtatgcaactctatcaattaatatctaatgttataaattcgttctaccaatatcgaatgatgcatttttctcattttcttctattaactttgtaatttatagggacccggagcgaacatgtatctcctttctatcctcttttggtaatatattaagatagattgtgctacaaaaccacctaatacaacaagtagcagttcctttttgctttgagtgagtaattgaaaattaaaaatatagtccaaactaggaaaagagaacacgaaatctaagatagttggagtaaaataattcgcgcaaacagtaagaggaaagaggttgaagagaagtctacaatagctggagggaggagctctccctgttcaattaagatcttatatcaagttagtcattcagtctgaatatatgttcttccgtgaacaagcaagatttgttgcttcaatcccatttctataatcgattagctgcttctatatatgcaattacatattttgcatgtgctctaattaagtgatcgatctgcaaactgagatctctatggtgagtggtgcccatcactacaatcgatcacttaggatagcttcgaggctgccgacggtcgatcgacggtgatgccaataaatcacaaagcttagtgctgaagtacaagagcctatttgatctgacagtgaagggaatcgatctgaagccccagattaattgtacactcacctgcagctcagggaaaatatattgccctctttcctaacctttttcttttttgcctaatctgttttttctccatgccacaacccgtgtactcctactagaagcgcagagttatggaagaaaaaaaatgcgatggccaaacatatcttcatggacacgtcgagtacccgatgccttctaagccctatacgctatagcaccagcaccagcaccagcatatataccagcctctcctatatatatatatagtatatgtggtaactttcagcctgaattgcagattggattaatactagacatatggtttctttacggggctgccggctgcagataggagtattgagtatcgcatcttgttagtttaatttcttcgaaaatatctaccaactgagacggaaagcgcatagacaaattttatctcggtgagataaagatttttttcttgattttctttagcacacttttcaaactattaaacgatacgtttcgtgcgaaaaatatctataaattgttttaaaatattaaatatatccatttgttaagtttgtaataattaaaatttaattaatcatgtgttaaagttttttcgttttacgtacgtcagcttaatctttatctcttcatcagtttcaaacaacactaaaacatagggatctaagccccaactccaaacgtacgaccacagcccacaggacacaggtagcactgaaaagagataaatgaagatggttctgtgaaagaacattagcaacctggaattaactcgtccccgcacttggcccgaacagtttacacttggttttgggtgagagatataactagggatagaaaggtcaattcatataccgtaaatcattggattctttctttatcatttctttaattccatagttttggacccacagagctgccatcctgactaggggcaaacggtgacttattaagggcgaaatcacgtaccctgcattttacctctaagtacaagctaaagcatgtgcgttgtaattatattataaagagtaaatttcataaaactacacgttttatggtccaagttgtagaaaaccacacacactttgacacttagcacttaattacatatatttggtagtgtagttttacaaaaccacactatcaatgaatggattcacccgcgagatgacatggttgtttcacataggacgaggacgtgtgatcctattatcagccatcgcacgaaattaataggatatgccacgtcatcatcctagatgtaacaaccacgtcatcacatgggtaaatccattcatcgatactgtggttttgtgaaactaaactaccaaaatataggtacttaagtgccaagtgtcaaaatgtgtgtggttttcttcaacttgaaccataaatcatgtagttttgtaaaatttactctattataaaaggtaaaagcaaaagtaaaaattacaagtttataaaatagttaattgattagacatataatattatcttcaagggacaattgcttatttgaccctgttttaaagcctaactaccaatatgaccctattttttttagtttgcttatttgaccctacctttttaaaacaaacactccgtttggccctttttccgtagcaccattaagtttttatttaaaaaaaagaatgaaatataattacttttcttaatgaccaaaataccatcgaacaaaccctatccttatctatcctgtctctccccgtttctcgtctatctctctctcggcgagtgccggtggcggctcgtggagggagcggccgtggcagcggccgcagggcgcggagcgggggaatccacacggcgctggctcgtggagggagggagcgacgtcggcggcctaagagcaacttcctcccgctgccctccttgtgcaacggcagccgcgctgcggtcggcggcggctcgatgaggtggaggagtggctgcgacgacagcggcatgggagggatggcagtggctcaacgaagaggaggagcgacggcggcttgatgaggaggagggtcggcagtggctcaacgaggcgaaggagtggcggcggtggctcgacgaggaggaggaggggcgacgccgacagggtggatccggcaaaggctcggcgatgaggcgacggatccggtggcgccgagacgcacatgcgatggatctggctccagcggtcggcgaaggcggcgcggcggtggcggacttcggtggggaggaggcggttctgcggggagggagggaacaccggtggcggcggcgcatggtgaggcaggcgacgatggctcgcggagggtcggagggaggattggtggaagcggctgctccgcatggatgggcttgagagtttgccgtcggcggcgcggtgtcaacatgtttttttcttttctttttttggtacacataaatctgtgccatgtatttctgtttgaggcaatttaatatatactaattagtgcacaaaactgcattgaataaaaaactttaagaaaccaggttaaattcacaagggtataaatgacatatttgtcttgagttaacaccgtcatgttgacttcatggaatagggccaagtctcatcttcattagtaaaaggaaaaagtatgaattaccccctgaactatcgtggtcgtccgaattaccccctgaacctaaaaaccggacattgctcatcctgaactttcaataccggacgaattacccccctcgacccaatccagagcggttttatcctacgtagcgtacgcgtgccaatccagtcagcatttttttttaaaaaattgtgggacccatatgtcatacatacccttcccctcttcctctctcttcactctctctctctcacggggcgcgcatgagcggcagcgcgagcggcggtgggcggcggcacgctgtgaggaaggggcgggcggtgggcgacagcgcgaggcgagcatggcgtcaccggaggcggggtcccgtggctcgcggtctgctcccccctcgccgcagccgctcctccccttcctttccccttcttcctccaggtccagcggtggtgacggcagaggggcgacggcgggagcagcgagcgtgggcagctgcgagggcgtcggactccggtcggccgaacgggatggtgg

SEQ ID NO: 24534 - DNA, 8809 bp, Oryza sativa
ccgctgcatgcagccgtccgccgtccagcgcccacccactcatctcgcgccgccgcctgcctactgcccggcctcgcgcgccgccgtccgcccatccgccgctcccttgtctcgcgccgccgccatccaccgggaggcccctgtggtcgacgcggccgcggcgcgcagccccctggcggctaccgcctcgcctcacctcgctgctgcccacgctcgctgccttcgccgtcgccgtctgaactctgaaggacaagagagagagagagtgagtgagggatagaagagatagaagagagatacaaaaaccgacaggtggggccacctattttttaataaataagttgctgactggactgccacgtgtacgtcacgtagaccaaaaccaccgcggattgggtcgaggggggtaattcgtccggtttgcatagttggaggtgaagaatgtccggttttgtggttcgggggtaattcggatgaccgcgatagttcgggggtaattcgtacttttttccttgtaaaaaagagggtcaaatgggtcaaactcaaaaaagaagggccaaattagtagctagtcctcaaaatagcgtcaaaaatgcaattgccctgaaaaaactaatagacaaaaagaaataaatataatatggttgtaagtagttttttttatcttgatggttgtaattagttgggatgagggaatatgtgaattagctatttatatatttttaggacacattttaaatgttaaaggcagcaatatattgagatggaaggagtaataaaattgacacaatgatagatggcactctgctattgtgtgctcccataccaccgaaagtaatataatatttataaactcgcttatacattatagctggtatatctataaaagtaaattggaaacatatgaaaattacacataaacgtatacatatatatttaaacctgacgtccagtgatcaatatatacaatatacgacttctcatatgtacgtgctccatccagggaaataaactctcttgttaatcttgcagcaaatcacattattaatgataatcacagggattaataactccattatgaattcaaggttgaggtcacttttattctttttcctttatttatcaaccgattaattaatcaaacataatattaaaaagagtagagataaaagttgtgcgagcctcctgattagtccaatatatgtctcatatatgatctaatggtgtagttttatttatcagttttatcaaacgttactcgtattttagaagatgtggctcattctctttgagataactttggtgctttcacatattaagatgccaccagctcaatatattgagaaagcgtactgtacaaatgccaaagttaaattatcatcaaccttccccctaattaatctgcaagtactaagattatgtcgctgcgatttactactccacaagcacaagtccacggaacttgccgatcgtgagtttgtcaaaagaaaaaaaaaagggtaaagtttcagagtagtttaatgattgaaataatcaattctcagctgatccgtggaatggaaggaccgaagtgtcagtgatatgccctgcaggcaatcatagagatgattgtatcacatactatgtttatatatttatccgactttatttcttgaaatagataactcattattggttaataaatatgtgattctttcatgagactctttatgttgtgtgttgctatttctaaaggattcctgatcaaatatcatatgtggaacaaatatatttagatgatcagcacatatgttaattaatgatcatgtctcatggatcatggtatagagataacaaattaataatgtggacacatgttggtgaacatgttgttggatagatccaacatgagacactgcaagagccatatgtgttgtgtcatcagtgatctcatttagtgttggtgttgaatccttagattatcatggttcctagctaacatgtgtagtagcttacttagggattgctaaacgctactctgtaattgggtagttataaaactagttttcgggtatgctatgaaatatgtagtggaatatgaataatcaagatgggatttgccccttctatggagaaatatctctgggcccttcgatgttgtagattatggaaatgcatggccatgccaaaggtgattgaggagtcaatcacgagttatataatctatcaacaggttcgagtgaatgattgagctattagaggatggcacatatctagccttgagcttaatcgatatcgtgaggcaaaggggttcatataagtatacactagaggttcagtcgatatgatctttttgtatgcccggtggctcaatatgttctgctaggggccgctgttgatgcgtggaccgaaaaagagttttcgggttatagccgagtgtacatgaacctatagggtcgcacgcttaatgggccggaataaggggattggatggagatctaatatgagcttaattcggataggaatccaaatatgagtcctacgggccttggaggtccgagtaatggatcttatatattcgtgaggagtgtgaccggcggagatattgcatcacgtgagaaaccctagccgccactcccttcccgagcagaaccctagccgcacgagggtgcagcacatctgcgcgtggcgttccatccctgtacgtgtggataccgatagaggcgctgctggtttacggtgctgatcggcgtgggagtacggcgagcacgaggaggagaaggtcgagccggtgtgatcgactacttcctctacatcgacgcccgctacttcgcgagagttccttcaacttctcagcgtcttccgctgtgcagcttgtcgagtggtaacgatctatgatctaatacttgtatggttcctgatttacacgatataaaattttgattaagctatcgtaacctacgggtatcccaacagtacccctggctcacctctgttctactgcacagcggcatcactgatccattgatcaatcattcacacatagatagcatatcgattggttacaccacaagtaattgtaaaattagaagatgagtgtagctcgacagcgaaagatagcgagcaacctcatcttttcgctaatgtttatgtttattagctaaaattttatttttaaccttaaaaacattgcgtactgaggctaaccgagttattttcatcgaagtttattttttagcttttatttttacatcgttaagaacatgtattttacaaattattttcgattgcaaatataccgttggtttatttctcaaaaaagtaaaacaatgcggacgaggccgactgagtcattgaccgtttgctccgcacgcgcggtgctgaaatatggtcatgacgtgcaagaaacgaacttgcctgcagctagtccagccggccgacagcagtagtagcatatcagcctcatcgattacccatatttcctaataagctattttaatttattataaaataaaaattaatttataagtaaagtttttatatatgtgttcctgacgagttaaaaataaatgctaaaagaactacattatatcagtttcaaaattatgtttgaaattttaaattttgattttggctttagcctattatgacaatcgatgaggctctatgtaaccctccttccttctgcatttgctttacttggtcacagactctgagctggaagcaggttacaatcaagcacaggtcttggggaatcaggaaatactctcctatgcatcaccgtataactagttcccaaggtctcctaagccctatatgctaaagcacacaccacgcatcaacatgtcaacatatgcacatgtgttagctagtgttgcgttcttttctgaaaaatgataacgttatgctggatatttgctcttttttttatgcagctgagatatatatagcggcatccaactttgtactatctcttttttttttgtaaaaatcaaataaccaaggaaatttgacattgatttaggtgagatatattcaacaactggcagtgtcgaaacatgaattcggcaataataaaaggggtagcgcacgagacctaaaagtggatggatgcggagacaaaggatttagataggttcaggccctctcaatgagagataataccctactcctatttggagatttgaatccgccgggtgtagtatagatctgacgatcatatgtgctcatgcaccctagagggcctcctgcccatcttatataggatgggcggcaggattacaagatagaaaccttaaccaatacggtatcggtttcctaaatctattttacaatattatcaaatcaagactttaggccgttccataatatacagggaaacgtaatacccaagtcatgatccgttacatattctatagatataagttatcccatataaccagtcggataaccatgtcgtgtgggcatgtggtacccataatctccatagtagcccctgagaccttcacagtcaaaaaacaatcttctctcgaaccagattactccaaagccaaatgcttcaattatctttgccatggtctctcgagtacttttaccaaatatgaagactgtggagggctgaaaaataaagtcaggtgcatcgattagacgcacctaataggtgtagcccccgactatgtggttagctaaataaactaagcatatagtcaaggaataaataattcaaccaaccgagtggctttgataattgtaatcaaccaagtgaattgatatcaatatatagcatatgcggtgtgaatctccgaataatatgatccgagtaatataccgactgctttgtaaaatatgatgtgtgcaacctaaagttggctacatcattgaaaattcacatagcaaaatagccataaagaagcttgtatgctgtgaataaagaattttctaaagtattgggcatacgccatgcgcacactgctttaacagatgtgcttaagtccctaaaagacacatggtttcaccacacctaaaaatatatggcatatgtggtgtaacatccgagtaaataaactcataaatgatttaccaaccacctagaaaattaccacaatatataatcagcctaagccataatattggtcaataaaagtgcacacttacgtgccaaaaagcaatgatatcgtatccaatcaattgctttattaacccaaacagcgccttgactatatataaaaaagtcagcggggcagctatgaaaaacttcaccgttgggtaccttttaagatgcattgtaccaactcttaaaaagttgagcaactgcggtataaaaggattttaaggtattgggcacttgatcacgtgcactttggcctaagcaaaaagtgcctaagtccctaaaataacgtgacaggccacacctgaaaatatgggctgcagacatattaggcctaggccaaaaaatatgccttcgacaccctttaaaggatgacgcatataacatgctcctaagtaataaatcttctgggtgatatataccaagtgtagctcatgtgaatagcttctgatctgagtgattatccctcatgggatactccaaaatagatataaaaattaaatcccgactggcacaagtattcggttgatagcccttacggggaataatgaataatccagtcattgagaataagaaatcgactcatgaccataaattcaagttgaatgtatctggaacaagtccaaattgaagatataattctcgcgcttgagttgatgagcccctatgcatgtagcttatccttctgtcgtagtcataattgtccattgataatagccattagcaacggcgaagacgtcagggccgatgaagtatatataggtaacggcgagcatgtgcataacgaagatgatgcaatgccccttgatttataaaaatgacagtagaacttgatgttatagctgttgtagaagcttcacttagaggaatgtagatgttgttgtccaactcgtcgaaactgagctgattgattgataactctaaactcccggacatgtatattaaatctcaaacttgacacttgagcaatttgaagcagattgtggcggcatccagaagtcaaaattgccagtgaaataataagagttgctgaagtagaacgtctgctctgaagtaaagacgaagataatgactcctaaagttgactccttgattgattgattgctttatcttgacataaaacttgtcggattttgagtcttgtatttgtgtagcctccgactctttggttagttgggaaacaactgaacatagagtcgagaactgtagcttgtcgtcgagtactcattgcttaagtgaggttacatgttgaagatgtccgagtataagtcttgaaaattatagaactacttgtagtagtagattagcacgacgtcaaatttcgtgacgcatgccaatatgtcgaggctcatgtagacgtcgtagttggtgaagtagcacaacttgcgaagtagcagcaatagagattgccggtgcagaagaccatgaagatgaagttgctccaccatggtgacaaagttgcatagcagtaatgaagttgcacatgagtcagcggcaacagaagcaaaccggtagtgaagatgcgcagttgtgaagataaaagcaccagtcggcggtggcataaccagtcggcgacggaagacgatgatgtccatcagtagtggtagcggtataaaccatatgtagaggtgagggcactagtcaacagcagacgagatgaccggcagtgaagaagataaggccaattaacactggcagaatcatgcagccatggaaatgaataaactagtcggcagcagacgtagacagcttgcgttgaagatgatgacgcctattagcggtggcggcgacgtagccagccgtgaagaagatagcatcagttggcgtcataacaggccagccgtgcaggcggaaacaccagtcggcggtggacgaggcggccggtcggtgaagacgtagacatccaacaacggcggcataataggcaagccgtgcaggcggaaacaccagtcggcggcggacgaggcggccggtcggtgaagacgtagacgcccaacaacggcggcataataggccagccgtgtaggcggaaacaccagtcggcggcggatgaggcggccggtcggtgaagacgtagacgcccaacaacggtggtgtgaccaaccaaccgtataggcgaagacaccagtcggcggcgacgacggcaagctggtggtgatgttctgactgattcattcctggagcgtaagagataagcttaaagccatgaatcccttttgtgcatatctggatctggatcttgcagaacaaacatataggatgagtagtatctgatgtaaaaacagtcctcgatgaaaattcaagtactttaaaatatttataaatatgtatttcttctcttgtcaattttgatttccacgagcaaatgactcattacgtttaaacactctgcccgactagtcatagccaccaggcaccgggagtcagcctaagtacttcccaaacatgcatatgagtgacatgagttcgtcattaatggaacaaagtttcacggatcagaatttactactcgggtacttttgcaattattaagagcagaaaataaatttatctcatctctatgcttctgatttaattattccgagtaatactaagcaccttgcgttattcggtccatccaacgagcccccgggtgctaggaatcggcccaaaggcaactatccattggcaaaccaaacggaaagcataggaagatggaactccataactcgataggcacttttgtactcagattatgtcgcaagcaatcaagataaatattatgaaaattgttaaaaaatatgatataacatatgtagcccccgactcactagtcaacggcgaaccaattgatgtagtgaggtagaggaaaagaaaaatatcatataaagaaaaataatgatgacttagctttgtaatattccccttggtgatggcagaggtggccaatgtgggaacaaagtcgtccatcaataacaatgaagacaccaatcggcggcgacgaaggcggtcgacggtgaaagcgatgcccaccaacggcggcataataggccagccgtgtaggcggagaaaccagtcggcagcagcgacggaagcgagacggtcggtgaagatgatgtcgctatcagtagcaacgtagtaggccggccgtgaggacgaacaaaccagtcagcgatgaagtccatgtccatgaagatcgtgtcagtgatatcggaaacaacgtgcctgttatatggctgtcgcatagtcggacatgtaaatacaaatcatatctgattaggagataaaagaatgtgcaagcatgcatctgtatttgctccagtagattaattgactcatatgcactgatcgatgcttattggacgatcggtctcaagcctgcgattgttggtagcagcctgtagattaaggaatcttgattggttggcttgtagcaggcagccatgcaatacatggtgatgatgagtagatgcatgtaataagagagctgctccgaagcccctgattatgtcgctgtgagatcgaggaaagatgctgaccggactgtttggctatcgaagcagtcggccgggccatgatgcgcgtgcgtagccaaccgcacaccacatatgtcgcaagatcaggactgcaaactttgtagcatgccgtgtatcgtccaaggcatgcggcccatgctattgacgatcctgttgacagtagtatccggttattctcctgacgataaagtttctctctctgaagcga

SEQ ID NO: 24535 - DNA, 730 bp, Oryza sativa
atactatatatcaagcagatcgtgatagtctgcaacctagctcggtggtgcacaatgctgagactaggaattcggaagaccatagacacattgtttcgggagatcacgatgattctataggggttgatgaaattgccatcaactactctgaaactagagaatcttttgatagaagagctacaattgtcgacattaatttttctgaacaaattgctgattgcctccaagttgatccagaacctaggtctataaaagagttccaaaagcgctctgactggaacaaatggaaggacgcaattgacgcataattcgcctcgctttacaaaagagatgtattctcggctgtaatgcctactcctcgtagtatctttcctgtgggatacaaatgggttttcgtccagaaacggaatgaaaacaacgaggtggtgagatataaagcaaggcttgtagcacaaggttttacgcaaaaacctggcgttgatttcaacgaaacttactctccagttatgagtggtataactttcagatatttaatatcattggcaatacaaaatcgtctatttatgcagttgatggacgtagtgacagcatatctttatgggtcacttgattctaatatttacatgaaggttcctgacggaatcgacatcccgaatcagaaggtaaatcgtaacatgtattgtgttaagttgcagaagtcattttatggcttaaaacaatccggcatgat

SEQ ID NO: 24536 - DNA, 1565 bp, Oryza sativa
taccatcttatggagcaaagatcagctacatggtatttctttgttgatttgaattatgttgtagtgttatgatttttctgtttgtctcaccaatttcatttcattttgtttgtagccgtcattttgttatccctttgtggaaaggaactggatatactaccatgttcatgcaaggttattactcagtcttttccatatagtggtaattatcttttgttgtttcactaatctttgtgttcaatatagcgtttctcatatctcaggctgtgttcttccccctcctttcccaactcacccctctcgttttccgagcacgcttttcaaactactaaacggtgcgtgttttgcaaaaaaattctatacgaaagttgctttaaaaaatcatatttatccatttttcaaaaaaaagagctaatacttaattaatcatacgctaatgagtcgctccgttttacgtgttggagggattagttcccaactgtgggaaatgaacacaacctcagtcccttacgtagaacatgccttttgaattgcaagataatatcaaatcttgtttacgtcttattctggaagtatctaactgtatatcaaatgttttgttgattactgttaaatgaaacaagtgaagtttcccccttttttgtggaaaattttgatcaaggacggaacctaaatctcgtttaactcttattctggaagtatctaactttatgtcagatgttttgttgattaccactaaatgaaataagtgaagtttccttattctttggaatattttgatcatgtgccttacaaattgaacaattatatgaacccacgtcctgatccattttctgtttgtagaagtaaagtaattggttatttttgatatggttcatgtttgtgtctaatatcctatccacatgcaagttagtgtagaaactaaggtgctgtaaccaatttcagcatttgatctttatgtttagtatcctgcacctcatttttcatggtgactggtagtagtatttgtttgttttcctgttactctgcaatggaaaaccatatatagtaggtttgagtacagtatttcacctcttctgtatatctggtttaattgattaagttcactagaattttgaattttcagcacgttttctaatatttaggccttttgttctaccctttcttattgaacatcccagttcagatgccgcatatgatcttcaccggacttgaagactacaaagcaaggggcactcaagcaagcccttactatacgatcactcattatacagagtttgcagaaaccaaggatacagtgcttatccgaggagacgttgttttcaccagtaaactgactgattcagaggcgaaatgtcttttagagagtgctcactcattctacctgaatgatgtgaggtacaggcttgtagagcgcttcaacaaagaaccacatgagtttgagttcaaagatgtcctgcaagtgcttgaaatgccaaccatgtgacaagattgaagacctgcaatagcaaagcttcctggagcatgtcagtgcatttttacagtggcagggtctagattgcact

SEQ ID NO: 24537 - DNA, 614 bp, Oryza sativa
tcttcctcaatctctactgaagctacagatgccagtgcaaactgaccaacataatcttcaaaatagtcgctcccaaaaagcattccaaagacagcagttggatcaatcatgttatccctaaaaaagccattttaaaagttcaatagctttatgttgataataactaatacaatgtacatgcagcatgcagctaaaacttcaaatcgcttgtgcaattgaattttgttttacaatttggccgatccaattctatagaaacaaagaatttggagcttaatttctatctaggttgatagaatagtgacagaaatattcaagacttactgtggaaggccttcttttccatgcttgtcataagaatcctttcttacaggatcactgagtatttgataggcctcacccagttccttgcagaagtaaccaattttagttagtaatcctcctataaaggtagtgggtgaattaataagggctactgatagggatgcaagcgggccgacccatgaacccgcttataggcaaaattagtgagcagtggcggagccaggataaaatatagtgggggctccttagtcttttgagccttataacaatctcagacaaagtttatttta

SEQ ID NO: 24538 - DNA, 602 bp, Oryza sativa
cccatccacatcggcagaatcgtttcacgtcacgtccacccgtgcacgcatctcgctaggctagcattacatatagccagcagcgcatggtcaccaccatgatcaactctcgagaaaaatcgagcagctagttagttcctcacttctagggattcgctttggctacgtacattggtgtacgatggcgtcgtctcgctccgtcgtgctccgggtgctggtcgcggtggccgtcgtggcagcagccggggcgccgcgcctcgccgtcgcggactcgccgccgcttcaggacatctgcgtggccgacctgcgggcggcgacagcggtcgacgggttcccgtgcaagccgacggcgtccgtggtgagcgacgacttcttctgcgacgccatcgtccaggcgcccagcacgagcaacccgttcggcgtcaactccacgcgcgccacggtgtccgcgttccccggcctgaacacgctgggcctctccatcacgcgcaccgacctcgcgcccggcggcctcaacccgccgcactcgcacccgcgcgcctcggagctcgggctcgtgctcagcgggaaggtcatggtggggttcaccacggcggccaacc

SEQ ID NO: 24539 - DNA, 762 bp, Oryza sativa
attcctgcagccctgggtgatggtagaagtggccaatgtgggaacaaagtcgttcatcaataacaatgaagacaccagtcggcggcgacgatggcggtcgattgtgaaagcgaagacgcccaacagcggcggcataataggtcagccgtgtaggcggaggcaccactcggcggcgacggaggcaggccggcggtgaagtcgtagacgcccaacagcggcggcataataggccagccgtgtaggcggaggcaccactcggcggcgacggaggcacgccggcggtgaagtcgtagacgcccaacagcggcggcataataggccagccgtgtaggcggaggcaccaatcggcggcgacggaggcaggccggcggtgaagtcgtagacgcccaacagcggcggcataataggccagccgtgtaggcggaggcaccactcggcggcgacggaggcaggccggcggtgaagtcgtagacgcccaacagcggcggcataataggccagccgtgtaggcggaggcaccgctcggcggcgacggaggcaggccggcggtgaagttgtagacgcccaacagcggcggcataataggccagccgtgtaggcggaggcaccgctcggcggcgacggaggcaggccggcggtgaagtcgtaaacgcccaacagcggcggcataataggccaaccgtgtaggcggaggcaccgctcggcggcgacggaggcaggccggcggtgaagtcgtagacgcccaacagtggcggcataata

SEQ ID NO: 24540 - DNA, 29949 bp, Oryza sativa
ccgagtaataaatcttccgggtaatatagaccaagcgtagctcatatgaatagcttctgatctgagtggttatcccttatgggatactccaaaatagatgtaacaattgaatcccgactggcgcaagtattcagttgataacccttacggggaataataaatagtccagtctttgagcatataaaatagacccatgatcatgaattcatgttgcatgtatccggagcaagtccaaattgaagatataatacttgtatttgagctagtaagcccctgagcacgtagtcacaattgttcattgatggtagctgacgcagttggcatagagacaagacaaccaatatagagagaatattgcccaccagaggtggcaaaaatattggtggtagtgaagatagtgataccaatcaaaagtactgaagtcgcatagccatggaggcgaagaaaccagtcggcggcagtcaggtcagccagcaatgaatatgaaggcgctcagcgataaagttgtgtagttgacgacaacaaacgcaaccgacatgatgaagatgacgatgtcggtgatccagccaatagcagtgtagcaaccaatgaaaatgacaaagacgctcatcagcatttgcatagtaggtcaaccgtgaaggtgaaataataagtcggcgaaaacataatcatccattagcaacagcagagatgtcagggtcgatgaagcagaggtgctggtgatgatgtcagtgacaataatccatcaaattaatgttatagctgttgtagatgcttcacttggaggagagttgatgttgttgtccaactcgtctaaaccgaaatatttgaagttgttgaagtagaatgtctgctccgaagcaaagatgaagataatgactcctggagttgactcgtgggttgatgaattgatttcttcagcttgacataaaatttgtcaaattttgagccttgtatttgtgtagcccccgactctttgattagttgggaaacaactgaacatagagtcgagaactgtagcctcttgtcgtcgaatagttattgcttgattgaagatatgtgttgaagatgttcaagtagaaatcctgaatattggagagcctcttgttgtagtaaaataacatggcatcgcatgccgagatgtcgaggctcacaaagacgtcgtggttggtgaagtagcaaaacttgcgaagtagcatcaatagagtttgccagtgccgaagataataaagatgaagtcgctctaccatgatgacaaagttgcattgccgtgatgaagtgaacacgagtcgtcggcaacagaagcaaactggtagtgaagacgcgcagttgtgaaaataaaagcactagtcggcgacaacataaccagtcggcgacggaagacgatgatgttcatcagtagtgatagttgtataaaccagatgtagaagcgagggcactagtcagcagcagacgagacgaccggcgatgaagatggtaaggccaatcaacactggcagaatcatgcagccatggaagtgaagaaaacagtcggcagccatggcaaatgtaggcagcttgtgttgaagatactgatgcctattagtagtgacagcgatgtagccagccgtgaagaagatagcatcagttggcgttataacaggccagccgtgcaagcggtgacaccagtcagcggcggatgcggcggccggtcggtgaagacgtagacgcctaacaacggcagcataataggccagccgtgcaggcggaaacaccagtcggcggcggtcgaggcggccggtcggtgaagacgtagacgcccaacaacggcggcataaaggccagccgtgcaggcggaaacaccagtcggcggcggcgaaggcaagccggtcggtgaagacgtagacgcccaacaacggcggcataataagtcagccgtgcaggcggaaacaccagtcggcggcggcgaaggcaagccggtcggtgaagacgtagacgcccaacaacggcggcataataggccagccgtgcaggcggaagcaccagtcggcggcggcgaaggcaagccggtcggtgaagacgtagacgcccaacaacggcggcattaaaggccagccgtgcaggcggaaacaccagtcggcggcggcgaaggcaagccggtcggtgaagtcgtagacgcccaacaacggcggcataataagtcagccgtgcaggcggaagcaccagtcggcggcggcgaaggcaagccggtcggtgaagtcgtagacgcccaacaacggcggcataataagtcagccgtgcaggcggaagcaccagtcggcggcagacgaggcggccggttggtgatgttctgactgatccattcctggagcgtaagagataagcttaaaaccatgaatcccttttatgcatatctggatctggatcctgcagaacaaacatataggatgagtagtatctgatataaatataatactcgagaaaaaatcaagtattttaaaatatttataaatatgtatttctcctcttgtcaattttgatttccccgagcagatgactctgtacgtttaaacactctgtccgactagtcataaccatcaagcaccgggagtcggcctaggcacttcccaaacatgcatatgagtgacatgagttcgtcattaatggaataaagtttcacggatcagaatttactactcgggtacttttgcaattattaagagcagaaaataaatttatctcatctctatgcttttgatttattccgaataatatttagcaccttgcgttactcggtccatccaacgagcccccgggtgctaggaatcggcccaaaggcaaccatccattggcaaaccaaacggaaagcagaggaagatagaactccataactcgataggtacttttgtactcagattatgtcgcaagcaatgaagataaatattataaaaaatatgatataacatctgtagcccccgactcactactcaatggaagaccaattggtgtagtgaggcagagaaaaaggaaaaatatcatataaagaataaaataaatgatgacttagctttgtaatattccccttggtgatggtagaagtggccaatgtgggaacaaagtcgtccatcaataacaatgaagacaccagtcggcggcgacgatggcggtcgattgtgaaagcgaagacgcccaacagcggcggcataataggtcagccgtgtaggcggaggcaccactcggcggcgacggaggcaggccggcggtgaagtcgtagacgcccaacagcggcggcataataggccagccgtgtaggcggaggcaccactcggcggcgacggaggcacgccggcggtgaagtcgtagacgcccaacagcggcggcataataggccagccgtgtaggcggaggcaccaatcggcggcgacggaggcaggccggcggtgaagtcgtagacgcccaacagcggcggcataataggccagccgtgtaggcggaggcaccactcggcggcgacggaggcaggccggcggtgaagtcgtagacgcccaacagcggcggcataataggccagccgtgtaggcggaggcaccactcggcggcgacggaggcaggccggcggtgaagtcgcagacgcccaacagcggcggcataataggccagccgtgtaggcggaggcaccactcggcggcgacggaggcaggccggcggtgaagtcgtggatgcctatgaacggtggtgcgaccatccaaccgtataggcgagaacaccagtcggcggcaacgaaggctagccgatcggtgaagacgtggacgcccatgaacggtggtgtgaccaaccaaccgtttaggcgaggacaccagttggcggcgacggaggtaggccgacagtgaagtcgtagatgcccaacaacgacggcataataggccagccgtgcaggcggaaacaccaatcggcaacagcagtgccacagcattacatgtaaacaacaggaaataccaagagattaatctgatatttagagatcaatctaataaacaacaataagttgaaaaggaaaaaacccggcggagtcggagatttaaattgttgaactcgccgagattgattttctcgaccggactgactccgagacggagaaaattggttgctggtgttgcactctgtcgctaggactaatcaagcgatccatggctcggcgtgcttacagaacaagacaacaaaccaacttggttaatgataaaaatatataggcatgattaagtaaattaatggtgcttgttgatcggtaagatcaactttctgcacgtgttctctcctgattagccataggctggctgttcccatgtgtggcccgtggtggccatagcccgcaggacgtccatcggtgatgctccgagattctcatggaaacaaataaaataaatctgattaatatcagcaaattaaatgtataaatctcagcgattgaatgcatgtatggctggattaattaatccatgcatggcggttgaatcgacacatcctgtacatctccagcgatctcgttatgtgaactttcgtgcatgcctgtccagcccacgagttggattcgctcagagagtggacggcttcgccttgcgtagcgacggcttaatcataccgtgcctaattgaacaccttggtcgccggcaacatgcatacaccagaagaaagagcaaagaggaaaaagaccatcaatcaatctgatttaataatcaatctaattagcaggaagaagattagatgcatatgccatagtcttgctccctgcttgaccctcgtcatgtgatgcacatgcggatcgatctgacgcgtggactatacagccgcatggatgtagattgatcgaggtggtcggccggattgaattagaccaagcgacgtcgacggagatcatgcgccggcggctggttgctgccggtcacgcgtagctgctcgccgatccggaagtccaaacagcacacgaccgatcggcgcgatctctcgatctggcaggcgctcaacgctctgatgagacgcgccctccgtgcttcttgcggcggtgaatgacgcgcgtgtacgatccggtcatgttggtgattgattccaacgcactttaccgacgggaatctcgacgcacccctacctggcgcgccaactgtcgaaacatgaattcggcaataataaaagggggtagcgcacgagacctaaaagtggatggatgcgaagacaaaggatttagacaggttcaggccctctcaatgagaggtaataccctactcctgtttggggatttgaatccgccgagtgtgtattgatctgacgatcaggttgtctcatgccccctagagggcctcctgcccaccttatatagggtggggggcaggattacaagatagaaaccttaaccaatacggtatcggtttcctaaatctactttacaatattatcaaaccaggactttaggctgttccgtaatatataaggaaacgtaatacccgagtcatgatctattacatatcccatagatataagttatcccctatgactagtcggataaccatgccgtatgggtatggggtacccataatatccacacagggtttcttgacacagacacaaaagcagaacaatcgaattgctccctcagctcctcaaagatgaggtttgcgatcgttgtcttccctaatcccccaattccaacaatggagatggtccttagatgctcggatgccacatgcccatcatctttcatcaacagatcgatgagctccttcttcggctgatcaaccccaactagagatgacacatcctgaaagatggtaagagctctttggtctacggtcgcattagctgtcctcatcaaactgatcccaccattcatatatcgcgcattcctctcccccacttctttgatttgtgccttgaactcagcaatcatcttggcaatccgacgccgggccatggtcttggtcagcaaattcctgcatttgacgatgaacccatccggattagcggatccgtcgacgacatggagcatgaactcgtcgaggctgtcctcgatgtcgtaggagagctcccgcacctccctcgtccaggccttgtcctgagggtcagcgttcccctcctccgaatccgacatcctgaggaggaacgcgtgcatggcggcgaactcgtcggcgaggaaactgatctggccgcgcaccccttcgaattcgccggccatggcggcgagcttcaccaggacggacttgagtgccccggtggccgcggtcaccagaaacccctccatatgctcctcgaccgtacgcaaagaaagatcctgcgaaacagaagcagaagcagatctagatcagcaggtggggaatcaacacgaaccgcaaaagacggcgggggcgaatgttgattgatggccggagctcaccgccgtgatcctggggaagctcggcggcgagctggaagagttccacgcagcagcagcagagactgatcagtggtcagtggagtggtggtcaactggtcatagacgaagaggacgagaacatgtttgactcgcagcagacggagcaggtggagaagtcgataggccgggcccacagcgagccagcgagttggttgctttgctctctccatttccaaattttactcatcgttttttattttttatttttattttctagcagtgcagaccatgggtttgagatgaaatgaatatactgtgagtagagccctataagggctaattgagtttacgattttctgttagcacgtttttcaaatactatttctgtctcattttaagtatagttatagtttttatgtccaacgtttgatcgtttatcttatgtgaaaaaattataaaaacaattagtcacacataaagtatcatctaataacaacaaaaatactaatcgtaatttttttttcaaaataaaacggacggtcaaacgttaaacataaatacaaaactacagtctatctaggaaagctaaaaacaaagagtatgagttaggaaagctaagtgccaaaatcagccttattgcacctgctctaatacacttgttgatttcggcaatcaaaatgtctttatttgtgggcgagcatacataacaacttcatgctcctctttaagtggacatttcaaaaagcttttgactctataaagtggaactacatcaacatagttttccacaaagatatgatgactgggttgtggggttgttgacaactttcggttttaagatcccgcaaaatagcatccccgcaaatgtgatacatcatgccatggacctatttcaaggagacccactttctatcatcacagcaatagacctatagcaacgactgctatatatccaaagcaacggaccttgggctgattagtaatccttgaggaaggtcggtgcgtttccgaatcttaatatatgcatatgactggcggtcttcatcgacctaaaaacaagaagatgtccaggcattgcaaaactttgggcaggcaactgggttgtgcgccaacatacaaaagtcacaggttgccctattagatgcagtgacatcggcctcgatgagatcctagaaaacatcctagtgaccagacctttgttcccaatgaaatacctcggtctaccattgtccattggaagactgcagaaaatagaccatcaagctttgttccacaagtcaatagggcggatggcgggatggcaaggcaagaacttcggaatggctggctatcacaacccgccctggcaccacctaatagtgacaccaaagagggtgcgccataggaaattggcgtgaactgaattccatggaaccgcattgccaataccagtttcagtacacaattattggtactcgtggtcaaccaagatatgcatcattgcaacttaggataacataaatagataattccaaattgccttaatcgagttttatctctaattggcaatgacggatattccaatctgggcccatatcgaacccaagtcaggccgtatcggccacttgccatatcggcttagtcaaactccgactctgtttctagctgatacgatgcctagacgatgcgcagtccgactccaaatccaactcaattccgcacaaaatccacttcaatcttgttccttcttttccaattctgatgcaaaattccgttgttaacagatggttaatttaaaaccgataccttccaaaaccgagccgagtcaagtggtggactacaaagtgcacgatgcaataggtcatcgagattctttttctcctcatcctctccgcgatcccctctctctccccctatctcttcttcttcttctcctcctcttacccctctctctctatccactctatctctctggtgatggaggtcggggagtgttgcaggggcggcgtgcttcccacggggaggtggcggcaagcggtggcgccctctcctctgccagatccagcgggaggggaggcggcagcagggtcgccacaggaaggcagcgctgtcgacggtgggtacccgtagaccagatatagagggtattggggtccattggtacgaggatctacatagtacgacaacaagcaaacaaaagacaaggattatactggttcaggctccttggtaagtaatagccataatccagttggtatgggattatatgatgaaaaccacagattataaagggaatagcagaactcgatgataccgacgagaccgtagtcgagttggtcccactagatctcccggtggcttggctcctgcgtgctccggctccgtaggctgtggtggatgtgttggtggtgatattcgatgccttaggtcctacccagggggtatcttatataccgcgggtcacttgatctccaagtaggactcggagatatcggacccctcacgatatggtaaagacccagtcttgtccgagtagaactccttcaatccgtagataccatccaaacaacgtatttaacaaccccacccctcaaacttccattcttttctaactattccagaaaccaaacacacacagagtggaggagaatttttttttaaaattacacagtacaatgcagacacatcgaatctttaacacatacatggagcattaaatataaataaaataaaaaactagttgtacagtttgcatggaaatcacaagacgaatcttttaagcctaattagtccatgattagccataagtgctacataaacccacatgtgctaatgatggattaattaggcttaataaattcgtatcgcggtttctaggcgagttatgaaattagttcttttattcgtatttgaaaatatcttttaatatccggtcaatgacaaaaataaatttcttttcaccaactaaactgttcgtctccccactaaaatccctaaccccatcgatcccagccaacaatcgaagcaccggcgccgccgcctcgtgaccggccggctgacggcggagagcgaagcgggaccagcgacggtggagagcggctggacaacttttcctgcctcaatgcgccgcctctttgccgcctcgtcctctccttatctcctgtctttcgtggcatctccatggtggtggccatcagcgcttgcgcgacgagttcattgctttgattccgcagccaatcgacctacctgtagtgtttcccggtgagcccttctcttctcacggtaatgtttgtgccttttgttgctactatatagattttagggcatgtttggatcaatgccaaaatatatagtattttttagtttaaatagttagtaatgtggtggcttggtttcaagccaaaggttggtaatgcccatgctcaatttgacacaattctagaactttcttcaccataatataaattttggctcctaattgacatcaatccaaacacattcattttcaatgttaccttaccaaaacattgctattgtaaaaaattacctagattttgattattttttttggtatgatagtaaaccaaacaagcctttataaaggatctggattgggaccaagtctgggtttttatttacacttcttgtgttgttgatttcttttataaaaaaaggcaaatgggggaaaaccacgcaattaatccatgatgatttccaaacacagagaaaagaggctcacagatagaaaccagaaaccaatttcaggcttggatatactagtattctatatgacttcattcctgactgataatacttaccatcttatttatgactttgatgctctttgtgatagatttcttcatggatatcgaaatatggctagcagcaatatagtaaatggcgaggagttgggtgaaccagaaagaagacctctcaacccttctgccaagggtttcattatttccttgggcaagcactctgccatttcccaaggcacgaaggatatagagaaaagcaatactgacacaatgaacaagttcattactcattgtagcgggaatggtgcagaagatgggaggacatcaagcgggaatgtcatttctggttacgaaggtgtttgtgggacaacctttggagtcatagacaacaaagctgatacaacaggagaaattgtggatgttactggttgtgaactgagcagtggagacaaaagagagcttggctgcaggggtaccacagctaattgtttacccaattgaggatggtgtaccccctatggagatactcccatatagcagccattgtgacggttctatatacaggggcacagattgctggaaaaaagagtatcatattgctgaccgtaatgaaagtaagtggtcgatctctttttcttatttttattcattattagggcgttttccaagctatagggtcaactgatatattctctccgtaaatctcgacttaatttttctttcctctgtttacttataatttttgattgcggtgcattggcatatataaatggaaatcttctgaaattaacaactcatggtttcattgcttggtgtgtgcaaaagcacgaggcatctaacgatcatacctttagcagattgcagcctgtgctgacatcgccctgggtgtaggacatcatactcaaggttgtgatctcactagacattgtatctcctatctatccaaagttttctgattgtccagataactccctaagccatttttttgcctggaaatttgttcagttaactccagaatgttattgatcttcttgtttcttataaaagcatgttttattttgaaaatttgtgaagtgatagatgtaatcatgccctgtgctatggcttttcattctttttggtgcacacatgtgcatactaagtgttgaacaggtctagctacaccctactatgcagatagtcatggaaatcacgaaaataattataatatagaatgtgttgtctaccatcgggaaaagatcaacataaaagaggatttctagaaaacgaaaaaagaaaatatatttcattacggggtgaaatgacctgtcttgctagttctgggagtatagtgaactgaggaatagtttagggggttataaaataaatgaaccttttcccttctggggtggttagagattactctcgttttagagttccagtacatttgcatggcatcaagatgaaaataacatcatatatgccaggttttccagagcacattccctctgcatcatttgcagaagaaaagctagatacaaccgtgcagtgcagctcagcacagcaaaaccccccttccagctcatcatcctcgcactgctctgattcttcaggctttcgttgctctccagtgagcaggaactcactgaaaggttcttcactgatttaaaactaatgcctacatggactccgatcttgtcaggttagctatatctgcgttctttctacttttctagtggagacaacacactggaagaacagatgttggataggttccttgcctgtacagaaaaaaaaaaacatgatcaatcccggactcctgatatggctctctttatccttgggatttcctagaagaaaaatttttcaagggagcggatagtttttcatttagatgagaggggaactttccaatgggactatggaatcctcaagaagcatgtttacattttgtatcgccagcatttgtttattgtgttattttaattttaacagaacttgtatttttctgtgaagctcggtgggaggcaatgatgttttcaaagcccacggattgcaacatcgacagcaatggaatttgcatgtcacacggaacttgttgtatgttgcaatttttctcattaaggttggctaaagtacctgcggaccatggtttggtggagttgtatggatacatagcagtgcgggataggctggatacatttcttaattattttgtcaattttagcagggatgatcccattgtcgtggagcaggcgtgcacatttatacatgtatgcaattattttatagttaataagtctgttaacatgttatcatcggagcaggctctggtttaacctagtcttctgacagtagttggatagttagtactgggccgaatatttggccccatgcttatcatgccattacaaaatctggcccatgacaataagccactaccttacaaagtcttatatatattgtgaaatgatgatttacaacaaaaacagatctatactatgaaactaagtatcatgtattccaaacaaaatcaaatagaataattctggactcttggttgctagcaagtaaacctcacaaaactgaatcatttgtttataggcatatgaacatgcatagcatgaatactaagtcttataggcacatgaatatattacatgcttatttgatttagtacctgtgattcagaacaaaatcaatttccctctctaacaccgttatgtattttgtacattctgtttgatacaggacaaagttcttggccatcaataataaaacatgtcttagatattccttactttcatttgattctgtagggtataaaaatattgctacaagtgaaacatcataagggaagcattcagctttagatatttcttactcttatttgattctgtagggttctctcatccacatggctggccctaagcgagggatccaattgatcggcactaatctaatcgaatatgacatgaagatcaagactggtgaatatatatatgaaaatgaagatctacagctgatcgatggtgtatcaatcatagatgacatagacaacatggaattatagctcgtttacatgccgcatccatggttattgtggcgcgattgacatacctgcaatatcacaagtgagtcgaccatagaggttgcaatatcacaagtgcaaagcagttttgctatgcgcctgatcggttgtttaccagtgggttacatgaagaaatccggctctttgatggcactataggtgagttccgtacgtggcttgaagtggcgtgtggttgctgtagtgatgggtgctcaaatggatttgaagttcaaggtagccacagactcatgcatccctgctgaacatttgctgttccgtcgaggagatagagactgattttgcattaatcgcagtgaaggtgacttggtcgacttttaatatgaaaagttggctctgtgatgagtgggctaaaagtggggcgggttatgcccctaacccaacgggctggcccgcatcactaaccatgcctgccttgactgatgcgggccaaagcggcagcctgcactaacccaacgggcaatgatgtcgcattgctcaccattccagtccaggggaagtccatatcgctgctagcgagagatgatgcatggctagctcccttcgctcccctcagctaccattgtaagtttgtaagtggatcttgcttggtggtagtaaaaagaatatggccattgcagccatggccgcccgaggaaacgatgacagcatcgatctatatgcattcttcacgaatcagccgggttttttcagtgcttttgcttcaggagttccaagcacaggcggatgcaaaagcatgacctggcgataatggcatggtgttcgaagaacgctagagagcaggaagatgacattttagtgtgataacaaacacaaaaatgtaatgcatgaacggcaaggaatgcatcgaatgcatgtcgcagacagaatcacactgattttgccatgaacttcatcgaacacggaataatacagcaatgaaaggcttcgacagcagttcttgcctggttttatgtatcataaaaaaagcgctgcatctgacagcactgatgatggacgtccatcgtttttgccctgattcgtgtaataacccaaaagagaaggtcaaagtggctgcttcaaagctccagtgtggagatccatttgctgcaattttgttgcttgcctcaacaagcgccattgaattctgttactgcctcacttaggaaaggccgtaaaaacttcaatgataaatcgtactagcatatttcaaacacactgcaattaccaacattgtccagagcaccaaacttctcattgaaactaagagaaagtcttgactaagtactacccccatcccatatatttgaaatttttcagaaatatccacccaaagtgcttcagcaaacacaaccagggaaaaaacaaagagagaactttgttccgcaaatcaataggcacattatgaactcctaacagggtaaccaagttctcttaagtagactttgaacggatgaaatcaagaatcgtatcatgaactcagcaggatttcacctcaccaaacttgacgttatacctttggttcgatcgaaaatgtattgatcacccataaaggagcaggaaagatgatgtgagcgaattgaagagggagattgatcacccatagaggagcaggaaagatgatgtgagtgaattgcaacgcacgggtgtggagattatgggtaccccatacccacacggcatggttatccgactagttataggagataacttttatctatgtaatatgtaacagatcatgacttgggtattacgtttccttgtatattacggaacggcctaaagttctggtttgataatattgtaaagtagatttaggaaaccgataccgtattggttaaggtttctatcttgtaatcctgccccccatcctatataaggtgggcaggaggccctctagggggcatataagacaactagatcgtcagatctatatacactcggcggattcaaatccccaaacaggtgtagggtattacctctcattgagagggcctgaatctgtctaaatcctttgtctcggcatccatccacttttaggtctcgtgcgctaccccttttattattgccgaatttatgtttcaacagttggcgcgccaggtagttgtacgccgagtttcctattgaggagtgcgatggaatcaattttatgagtcgccagcttcgcctttgcctcaggagctttgacttcctcgccatcgacaacttcaacaagcctcgctctttgactttgattcaaatcagtcggggaagatctaatctagctaaggaggataacaaccactctaccacggcgagtttaagattcgatctactatggccgccgccagcgtcaccttcgtcagcacgctttttcgcttcagagagaaactttatcgtcaggagaataaccggatactactgttaacaggatcgtcgatagcatgggccgcgtgccttggacgatacacggcatgctacaaagtttgcagtcctgatcttgcaacatatgtggtgtacggttggctacgcacgcgcatcatggtctggctgactacttcgatcgccaaacagtccggccagcatctttcctcgatctcacagcgacataatcaggggcttcgtagcagctctcttattacatgcatctactcatcatcaccatgtattgcatggctgcctgctacaagccaaccaatcaagattccttaatctacaggctgctaccaacaatcgtaggcttgatctactggagcaaatacagatgcatgcttgcacgttcttttatctcctaatcagatatgatttgtatttacatgtccgactatgcgacagccatataacaggcacgttgtttccgatatcactgacacgatcttcatggacatggacttcatcgctgactggtttgttcgtcctcatggccagcctactacgctgctactgatagcaacatcatcttcaccgactggctcgcctccgtcgccgctgccgactggtttctccgcctacacggctggcctattatgccgccgttgttgggcgtttacgacttcaccaccggcctgccttcgtcgccgccgactggtgtcctcgtctatacggttggttggtcacaccaccgttcatgcgtgtccacgtcttcaccgaccggcctgcctccgtcgccgccgactggtgttctcgcctatacggttggttggtcacaccaccgttcatagctgtccacgtcttcaccgaccggcttgcctttgccgtcgccgactggtgtctctgcctacacggctagcctattatgccgccgttagtgggcatcttcgctttcaccgtcgaccgccttcgtcgccgccgactagtgtcttcattgttattgatggacgactttgttcccacattggccacctctgccatcaccaggggaatattacaaagctaagtcatcattaattttttttatatgatatttttttcctctgcctcactacatcaactggttcgccgttgactaatgagtcgggggctacagatgttatatcgtattttttaaacaattttcataatatttatcttgattgcttgcgacataatctgagtacaaaagtacctatcgagttatggagttctatcttcctatgctttccgtttggtttgtcgatggatagttgcctttgggccgattcctagcacccgggggctcgttggatggactgagtaacgcaaggttctaagtattattcagaataaatcaaaagcatagagataagataaatttattttctgctctttacaattgcaaaagtacccgagtagtaaattatgattcgtgaaactttattccattaatgacaaactcatgtcactcatatgcatgtttgggaagtgcctaggctgactcccgatgcttgggggctatgactagtcggacagagtgtttaaacgtacggagtcatctgctcggggaaatcaaaattgacaagaggagaaatacatatttataaatattttaaaatacttaaatttttctcgagtattatatttacatcagatactactcatcctatatgtttgttctgcaggatccagatccagatatgcataatagggattcatggctttcaaagcttatctcctacgcttcagaaatggatcagtcagaacatcaccgaccggcttgccttcgtcgccgccgactggtgtctccgcctacacggctggcctattatgccaccgttgttgggcgtctacgtcttcaccgaccggcttgccttcgccgctgccgactggtgtttctgcctgcacggctggcctattatgccgccgttgttgggcgtctacgtcttcaccgaccggctgccttcatctgctgccgactggtgtttccgcctgcacggttggcctattatgccgccgttgttgggcgtctacgtcttcaccgaccggccgcctcgtccaccgtcgactgatgtttccgcctgcacagctggcttgttatgacgccaactgatgctatcttctttacggctggctacgtcgccgtcaccgctaataggcgtcatcatcttcaacgcaagctgtctacgtctactgccgactagtttcttcacttccatggctgcatgattctgccagtgttgattggccttatcgtcttcatcgccggtcgtctcgtctgctgctgactagtgccctcgcctctacgtctggtttataccgctaccattattgttggtcgccttcatcttcattgctggctgacctgactactgccgattggtttcttcgcctctacggctgtgcaactttgtcaccggcaccgacaaactctattgccgctacttcgctagttttgctacttcaccagccacgacgtctacaagagcttcgttatatcggcatgcgtcaccaaatatgatgccatgttattttactacaacaagtggtattccaatcttcaatatttctactcggatatcttcaacatgcatcttcactcaagcaatgactactcgacgacaagaagctaaagttttcgactctatgttcagttgtttcccaactaactaaagagtcgggggcaacacaaatacacggctcaaaattcgacaggttttatgtcaagatgaagcaatcaactaatcagccaacgagttctatggaatctacttcagcaactcttattatttcaccagtaattttggtttctccacgccgctacaatctactccaaatttctcaattatcaagtttgagatttaatctacatgttcgggagttgtatcagtcttcattatgcacacgctcgcatcaaggaaactacttgagcttcaatatcttctcaatagtttgatggattattgtcactggcatcatcaccagcacctctacttcatcggccctgacgtcttcgccgttgctaaggggtgactacgtcttcaccttcggttgcttctgtcatcactagctttcatcgccgacttgttatttcgttttcacggttggcctactacgcaaccgccgaggggagacctcatcattatcattaactgctacattgctatcaatgggcaacttcatcatcacatttgatcatctctattgctgccaatcgtcattaccatcggttgcatttgtcgtcgtcgactatttcctgcattttcatgattggaggatttcgccattgtatttgatgcacgtctacgtcttcatcgttggcttgttttcatcgccaccgactgatattctcgccttcacggctggcttattatgtcgccactaatgggcattttcatcttcttcaccagctgtctcgtctgtttctgactgattattttgtcaccatggctacaaaattctgtcgctattgctgggtgccttcatcttcactgctagttgatatgactgcttccgactggtttcttcgcttccatgccgattgcatcagctattaccgatggacaattttgactatgacagaaggacaagctatatgctcaggggcttatcagctcaaacacaagcgcgaggattatatcttcaatttggacttcttccggatacatgcaacatgaattcgtgatcatgggtctattttctatgctcaaagactggactatttattattccccgtaagggttatcaatcgaatacttgcgctagtcgggattcaattattatatctatttaggagtatcccataagggataatcactcagatcagaagctattcatatgagctacacttggtctatatcactcggaagatttattactcgggagcatgttacatgcgtcatccttcaaagggtgtcgaaggcatattttttggcctaggcctaatatgtctgcagcccatattttcaggtgtggcctgtcacgttcttttagggacttaggcatctttttgcttaggcaaaagtgcacgtgattatgtgcccaataccttaaaatccttttataccgcagttactcaactttttaggagttggtacaatgcatcttaaaaggtgtcaaacagtaaagctttatatagctgctccgctgacttttttatatagtcatgacactgtttgggtttatcaagcaattgattagatacaatatcattgcttttcgccacgtaagtgtgcatttttattgaccaatattatggcttaagctgattatatatcttggtcattttccaggcggttggtaaatcctttatgagtttatttactcggatttcacaccacatatgccatatatttccaggtgtggtgaaaccatgtgtcttttagggacttaagcacatctgttaaagcagtgtgcgcatggcgtatgcccaatacattagaaatttctttattcgcaacatacaagcttctttatagctgttttgctatgtgaattttcaatgatgtagccaactttaggttacattcatcatattttacaaagcagtcggtatatcactcggatcatgttattcagggattcacaccgcatatgctacatattaatatcaagtcgcttggttgactataattatcgaaaccacttggttagttagattatttattccttgactatatgcttagtttgttcagctaaccacatagtcgggggctacacctattaggtgcatctagtcgatgcacctaactttatttttcagccctccacagtcttcatatttggaaaaagtactcgggagatcatggcgaagatgattgaagcactcggctttagagtaatctggttcgagagaagattatcttttcgactgtgaaggtctcaggggctactgtggagattatgggtaccccatacccacacggcatggttatccgactagttataggggataacttatatctatgtaatatgtaacagatcatgatttgggtgttacgtttccttgtatattacggaacggcctaaagtcctggtttgataatattgtaaagtagatttaggaaaccgataccgtattggttaaggtttctatcttgtaatcctgccccccatcctatataaggttggcagaaggccctctaagaggcatatgagacaactagatcgtcagatctatacacactcggcggattcaaatccccaaacaggagtagggtattacctctcattgagagggcctgaacctgtctaaatcctttgtctccgcatccatccacttttaggtctcgtgcgctaccccttttattattgccgaattcatgtttcaacaacgggttagccactagttttttactaatcacaattgcttagagaggtttaatgacatacttgaaaaaacaaatatatgatgtaggttgagtgtgaattcacttttcattggcaagttttaaatgtttttcctccacgatatttgcggtcagattatattgttatatactccctccattaacctttgttatgatgtttgaatattcatcctatttgctagtatgctaccaagtcctatatagaatcaaatgttatatgtatgacaaaattcctaagtagataagtaaggtgtcccatataagaaagagaagtagagtgtaaaatcaaaggtgtttttgattattattctgtgatgaacgattggcattgcagattattggttttgttatttggaatttattcacaaagtggttttggagatgattggattcacaggtgatcgcagatttatcattttatgtgaccggtcagaccgggctatgtatgccggtcagaccggcggtgatcgagcggtcggaccggccagtccgcggtcagaccggccgacgctgtgtcagtttcggttttgggttatttgtttggatatccgtgattatttcatgattatagcttctagatggatactatacgtatgtaatactgttgtttgctactaatgagtcaagttggagatagcttggtcttggaatatggtttctttgtttaattcatatgtaggtgactcgatgtctcggaagagtatttgcggtgatggaccgggagtcggcttggggataagacgacgtccgtggtaatcagagatcatgcgggatactaaggctagagttgatgcatgtggttgatggagattccatatgtcatacgatggaggtattgtgtgcgtatgggatgcggagtcgaatttggaaggagtccaaatttggtacgattggttatgtaaagtttctttcttgtattagagggtttcctaaggtgtttaggactcttagtatgagtttggtttgtggctttaggatgcctacctcgggtataaatagagggggagcgtgaggcttctcggtatcgcttttcacagcaattgagttgagttttgagttagggtttcgagtttagtcgaaatttttgtaaggattgctgttggtgcactttgtaaacacagagagaatcaataaagtcgtcatccactttaagagttcttcgatttgtgtttcaccgggtttcggcggtgtaatcggcggcacaccagcggtcagaccggcggcatcgcggcggtcagaccggtgggtgacctacggtctgaccggcggcgacatcaggcgcgacagggattccagggctgtccaaccggtcagaccggctaatctactttggtcagaccgatctcatcgaaattgagggtaacttttatttgcgctaaaagtttttggtttttgggtataccaaccattcacccccctctgattggcttagttcttgtgattcgatcctacaagtggtatcagagccttgttttcttctttggatttttatcgatctagagtttttgccatggctactcctgctaggttttcaactaagcctcatgttttcgatggaacggatttttctcattggtgtagtaggatgcaatcttacattttggctgaagattatgatatttggagaaaagtttctcatccttatgtaattcctgaagctattaatactgctgctgaaaaaactgcatttgaacaaaattgcaaagctcgcaacattcttttgagtggtatttctcgttcggattatgatcgtgttgcgcactttcgaactgcttatgaaatttggaatgctttgagtaactttcttcaaggaacaaataacattaaagaacttcgtcgtgatattttcaaaaaggagtatattaaatttgagatgaaacctggagaagctttggatgactatctctctaagtttaataaaattttgagtgatcttagatctattgattcttcttatggtgctaattatccacaatatgagatttctcgtcactttttgaacggtcttgatatgtctatttgggagatgaaagttacatctattcaggagtcagttgacatgtctactttgactttggattcgctttatacaaaattgaaaacacatgagatgaatgttctttctcgaaaagttgattctaagtcgagtgttttggtttcttcttcttcttctttggatgttgaagcttcttcatctaagtcttcttttgttgctgtttttaatgccacatccgatgatcaactcgaacagatcgaggaggaggatttggctttggttgctgacagaattgctcgagctatagtgccaggaacaggaaaagaggtggtccaaatcgttgctttgaatgtggttcaattcatcatcttcgttcgcattgtcctaaggtagggagaggcaaaagagaagacaaagatggcgagaagaccaacaacaacaagccgaagggttcatcccaagggaggaagctggagaatcttagtaaggcttttcaacaagtttgcgccgccttcgagccactaagtgatgtagatggtgaaagtggagatgatgataagggaaagaacatctccgatgtttgcttcatggcgcgtggtgaatctgacacaaagtatgaagataatgaggtaagtgcttttgaggaagctattaatattttgagtgaaaaaaaataagaagtgtgagaagatgtatagaaaacaggaatttatcattgaatctcttaaacaagaatatcattgaatctcttaaaatctcttattcctaatgatgatgattgttcaaattgtgaggttttaatgaatgagatttcaaaaattagagatgttaatgctgcacatgatttgaaaaatagatcttctcttgcttgtagttttactttgcacacacgcactttggatgagttgtttttaactaaaaagttgttgcaaaaatatcaaattggtttttatgctagtttgatgtttaacatgatttctgctaaaaaagttaaaacaacctcatgatgttttggattgctcaacatgtaatttgaataagttgaaattgaaagattctttaggttgtgttgagtacatggaagatgttgtgaaaaacaatgaagtgctttattgcaccaaatgtcgtaaaagcaaaggtgtcatggtgattgtgaaaattgtgctaatttggaaaaagaggtttcttatttgaaaaattctttgctaagattttctgatggtaaaaagaacctcaacatgattttggatcaatcaaaggttagcacacataaccgtggtttagtttttaatccttatgctcataattctagacatcctcctattgtgttaggtgttggtgctagaagtggtgagattttggttaaacctgattctaacaaaactgtgtttagatctgctggtatcatatctaccttgaatgcatctttttcaaaatccaatgttgtgcattcaaaatctcctgttgttgcttgtgttgctaaatcttctaatgctaccaatctgtctaatcatcgtgaaaaatatacttgttctttttgtggaaaagatgaacatattgttggtttttgtttcagattagctcataaacagaaaaaggagagagagattgcttttgcaaaatcaaagtggcaaaaatcgggttttccctcgaggaaaccggtcagaccgcagtgggtcccgcggtcggaccggtgaccggtcagactggctactgagcgtcggtcagactggcggtacagaggcggtcagaccggccactgtacctcggtcagaccggcctcggaggaaattttccgaaaattctataattgattttgcacgtggatatatgcctattggatcttctagtcatgtgtctcagtactggattcctaaatttttattatcatctaaccccagtactgaggcttcgacttctacttgtgtgtaggctttggtggcaaggaaggagaacgtgtggatcgtggatttcggttgttcgcggcacatgaccggtgataaaaattggttctcctcactcaaaaaggcatccaagactgaatcgattatcattggtgatgcttctacaagtgccgttctcgctataggtttggttaaggtaaatgaaaaatttgaattgaagaatgtaactttggttgaggacttaaagtacaatttgctttcagtttcacaaattgttgatgaaaattttaaggttcactttaagaaaactagaagtaaagtttttgattcttgtggtgattttgtgttgaatatttctcgctatggaagagtgtttaaagctgattttgaaaatcctgtttcacctgtgataacatgtttggttgctaagtttaataaagatgtgatgttttgtcatcgtagacttggacatgttggttttgatcatctcactaggttaagtggtttggatctagttcgtggtttgcctaaacttaagaaagatcttaatttggtttgtacaccgtgtcgtcatgctaaaatggtttctacttcacatgctcctattgtttctgtgatgacggatgcaccgggacagctattacatatggacattgttggtctagctagagtgcaatctgttggaggaaagtagtatgtgttggttattgttgacgattttcctcgatattcttgagttttctttatggcaactaaggacgaaacttttcaaccctttcgtggtttgtttcttcgattggatcttgaatttcctggttctttgaaaagaattcgaagtgataatggtggtgaatttaaaaatacttcatttgaaaaattttgcaatgaaagaggtcttgaacatgaattttcttctcctcgtgtccctcaacaaaacggtgttgttgaaaggaaaaatcgtgttttggttgagatggctagaacgatgttggatgactataaaactcctagaaaattttgggctgaagcttttaacacagcttgttatatttcaactcgggttttcttgagatctaaacttggaaaaacttcttatgaacttcgatttggtcatcaacccaaagtttcacatttgcgtgtttttggttgcaagtgctttgtcttgaaatctggaaatttggataagtttgaggcacgttctaccgatggattgtttcttggttaccccgcacatactcgtggctatcgtgtacttattttggagactaacaaaatcgttgagacttgcgaagtttcttttgatgaggctagtccaggtactagacccgatattgcaggtacactatcacaggttcagggggaggatggttgtatttttgaagacgagagcaacgacaacgacgatgacgaggtcggctcggccggtcagaccgggtgccaggccggtcagaccaccggcacaccttcggtcagaccgacggaagacgtgcggtaagaccggccagggccgtcggctgagggttctgttgacgctgttcgagatggtcctccggagattacaacttcgactagtactgatacggaacgtggatcaacttcagaagtcgctgctcctttgcacattcaacaacgacatccgccggaacaaattattggtaatacaggtgagcggactacaaggtctaaggtaacgactcatgatgtttgtgtaaattctgcatttgttgcttcttttgaacccaaagatgtttcacatgcattaactgatgaatcgtggattaacgccatgcatgaagaacatgaaaattttgagagaaacaaagtttggactttagttgaaccaccttctggacataatattattggaaccaagtgggttttcaaaaataaacaaaatgaggatggtttgattgtgagaaataaagctagacttgttgctcaagattttacccaggttgagggtttggattttgttgaaacttttgctcctgttgctagaattgaggcaattagacttttgttggcttttcctgcttcaaaaggttttaaattgtatcaaatggatgtgaaaagtgcttttctaaatggtattatacaggaggaagtttatgtcaaacaaccaccaggttttgaaaatcctgattttcccaaccatgtttttaaattgtctaaagctttgtatggtttgaaacaagctcctagggcatggtatgataggcttaagaactttttgcttgtgaaaagtttttcaatgggaaaggttgacaaaacgctttttgttcttaagcatggtgataatcaactatttattcagatttatgtggatgatatcatctttgtttgttcgactcacgctttggttgtagattttactgagactatgcgcagcgaatttgagatgagcatgatgggtgagttatcgtactttttgggattgcaaattaagcaaacacctcaaggtacttttgtgcatcaaacgaagtatacgaaggatcttttgagaaggttcaagatggagaattgcaagccaatatcaacacctattggttctacagctgtgttggatcctgatgaagatggtgaagctgttgatcaaaaagagtatagaagtatgattggatctttgttgtttctaactgcttctaggccagacatacaatttgttgtgtgtttgtgtgcacgctttcaagcttctaggccagacatacatcgtcaagtggtcaagcgaataatgaggtatttgaatcatacacttgagtttggaatttggtattctacttcatcttctatatgcttaagtagatattcagatgctgattttggaggttgtagaattgataggaaaagtactagtggaatatgtcattttcttggtacatcattgattgcatggtcttctaggaaacaatctagtgttgctcaatcaactactgaatctgaatatgttgctgctgctagttgttgttcacagattctttggcttttatctactttgaaagattatggtcttacttttgagaaagtacctctcttttgtgataatactagtgctatcaatattgctaagaatcctgttcaacactcacgtacaaagcacattgatattcgttttcactttttgagggatcatgttgagaagagagatgttgaattgcagtttttggataccaagttgcaaattgctgatattttccataaacctttggatcataatcgctttgcttttcttcgttgtgaattgggaataattcatccttttggcatggtttgagggggagtttgtatctcatggttttatcaagcaataatatgacaatgagaaaaaattgagaaaagagaactttgtttatacatatggtattttcttgcgcatgctagcaatactttgaaggtttatttgtctctagcatagcttgtatgtattctagtcttttcatgagatttagattttgcttttaagggagatgatgcatgacacttaaattctatacttgaattaagaaaatatgcaatgttgatgctagcatgtggtttgatttataaatgctctatatatatatgctttattgaattgttattcctcaaatagctttaattgctcattgtgaaaaagagaataaaaaatatgaaaaaaatgaataccgaatccttggaaacagtcttgacgacaaggacgtattcgatgtgagcaaaataatgggtgccgaatccctagaaacagtcttgacgacagggacgtacccggaataaaagagaaaaatatgagaaaaaaggctcaagaaaagaaaaagttaaaaaattctcttggttattttgtgctaaaggttatttgagaaagagtgataaatgtaataggtatatgtgtttagtgtttattcttcaacctatgtgcttgttcagatgttgcattataaatcgtatgaaatcatgaatttcgattgttgattcaagcttaattgtaaaatctttggtttatggttatactttaatacatgcttgttatcttatagataggtttatcttctttttattgcaacaaatgacttgatatattatatgtatgctaagctcttgaacattaatgaacataattcctatgttggatgaaatcattgtcaaaagggggagaagtattgtgaaaatttttggatttttgggagaagcaaggtgaattttcggagttgttgagaagagcatgtttttgttcaattgggaatttctttcttttaaaaagggggagaagttttcttttggatttttgagcacgatgtgtacgtttgtacgacgtgtgctttttaccacttttgtttttatttttccaaacaccaaaacatttttgataggtttgccaatgtgttcatcaaaggggagattgtaaaaccaaatgtgtttttgattattattctatgatgaacaattggcattggagattattggttttgttatttagaatttattcacgaagtggttttggagatgattggattcataggtgatcgcaggtttatcattttatgtgaccggtcagaccgggctgtgtatgccggtcagaccggcggtgatcgagcggtcggaccggccagcccacggtctgattggccgacgctgtgtcggtttcggtttcgagttgtttgtttggatatccgtgattgtttcatgattatggcttctagatggatactatacgtatgcaatactgttgtttgctactaatgagtcaagttggagatagcttggtctcggaatatggtttctttgtttatttcatgtgtaggtgactcgatgtctcgggagagtatttgcggtgatggaccgggagtcggcttggggataagacgacgtccgtggtggtcagagatcatgtgggatactaaggctagagttgatgcacgtggttgatggagattccatatggcataggatggaggtattgtgtgcgtatgggatgtggagtcaaatttggaaggagtccaaatttggtacgattggttatgtaaagtttctttcttgtactagagggtttcctaaggtgtttaggactcttagtatgagtttggttcgtggctttaggctgcctacctcgggtataaatagagggggagcgtgaggcttcccgatatcgctttt

SEQ ID NO: 24541 - DNA, 1335 bp, Oryza sativa
aaacacagagagaatcaataaagtcgtcatccactttaagaattcttcgatttgtgtttcactgggtttcggcggtctaaccggcggcacaccagtggtcagaccggcggcatcgcggtggtcagaccggcgggtgacctgcggtcagaccggtggcggcatcaggcgcggcagggattccagggctgtccaaccggaagatctacaccggtcagaccggcgactacgcttcggtcagatcggctaatctactccggtcagaccgatctcatcgaaattgagggtaacttttatttctgctagaagttttcagtttttgggtataccaaccattcacccctcctttggttggcttagttcttgtgattcgatcctacacagagtcctactcggacaccacaagatttacttagatagtatctgcacttgtttatgtggttctgcttagacaaggggtcatctaagagtataaatagaacacccctaggaatagagggtacaaatcttgaccaaggcgatcacaaaaccaacatgagccacaaaagccaacaagacaatacaagtcgactccaatctggccaagttcctgttcaagaaagccgacaatagctaaccgttgatcacctgctcgagctttacgccactattctgacatagactagattatggtctcctatacgtcattgcacttgtaagatattgacatataatggtaataccggcttcgatcaataagagtaggctattacctatcagcagggtgtcttagcctatataaaaaccttgtctccgttgcttttaccgtagtctcgcatataccttagtatcagtacactattcaagaaatttatacaaatatcagttattttgttatgacatgttttattattaaaaataaactttaagtatgtcttatactttagcatatttacattatttttctaataagatgaatggtcaaacattatttaaaaatcggtgacatgatctattaaaaaatagaggttgtatcttacaattaaatacataaagagattttctcccattcttgaagaggtatatgcctcttcatacttaagatatacctttacttttaccctacataaaaggaggtaccaaaattatttttacatgttggatgattggaaatgagtatacacctccggactaacaatatgagttatatatacctctctatacctcacaacaatcataataatgttgcaggtgcataatcataaacttgttttctaatcagtttaatcggtttaatttttacctctcaaattatgaataggtatatacctctttaaagatggaataaaacctcataca

SEQ ID NO: 24542 - DNA, 8829 bp, Oryza sativa
  unsure (1)..(8829): unsure at all n locations
atgattatactttaatgcatgcttgctatattaatgatgggttcatcttctttttattgcgacacatgacacgatatgctatatgtatgctaagctcttgaatattactgaacataattcctatgcatgatgaaatcattgtcaaaagggggagaagagtttgggaagagcatgttttttgttcaaggggggatttctttatttttaaaagtgagaaaagttttctttttgattttgagcacgatgtgtactttggtacgaagtgtgctttttaccacttttgtgctctctaccacatttgtttttatttttccaaacaacaaaacatttttgatgggtttgccaatgtgttcatcaaggggtagattgtaaaatcaaagtgttttttattcttattctgtgatgaacaattggcatttgagatttttggttttgaaatttggagattattggtgaagtagttttggagatgattggagttacaggtgatatacaggtgttactggtttgtcaggaccggtcagatcgggcatgtgttgccggtcaaaccagcggtgatcgagtggtcagaccggctcagcccacggtctgatcggcccagcccgtggtctgaccggccgactccggtttcgggttgatttgttcggatagttgtgattgtttcatgtttatggcttctagatggatactatgcatatgtaataccgttgtttactaacaataagtcaagttggagatagcttgatctcggaatatggtttctttgtttgattcatgtgttggtgacttgatgcctcgggagagtattgccggtgatggatcgggagtcgacttggggataaggcgatgtccgtgatggtcagatatcatgcaggatacttaggtgtcacaccccgaactagtcctgagcggaattagcccgtgacgctccaatttaacctgttaatcgataccagtcccaggaaacagtgctggtatcacaggaagtcagaatatcagagcaacagaagtctctttattatagagtaggagtacagtcatgttgggctgcggacagatcccgagctcacaactacattacaagagggaagcggaagccaagacttggaccaaacatcacaggcgcgacttgggaactaggccaaaaccctaaaactcatcgtagccgacttgctcctggaagaactcctcgtcagcgggatctacttcatcttcttcagcaactgggggggattatttatatagagcaagggtgagtacaggagtactcagcaagccatgggaaataagtgtttaatgcaggcttcaaggaaaggctgttgtttttgcaattgattttacttaaactcttttctgaaaacaactaagtgagtgcttctcaaacgacacggatgagacagtgcgtctcgtccggtcggagtatgtgcaatgtatcagtcttttgaattgatcaaggttggcacccggccaacagctttcaaacggccacccgagcctggctgatcccatcagccgcagattttccaaacatcaatcccaaacctcatcagcaaatttcacaaagcagtagtcaaacaaaactacgctagaaatcacctcacatccgcccatgaccgtgggcacagctgttcgaacagtttaataacctctgcagagggggtacactttacccacacgacattactaacccggatcatccagcccgtgtagtacggccacgtctagagaccttaaggctttcatgacaaggcatttcgaaagccgacacaggttcaccatatgctgacgagaggggtcccagaccaacaacaggttaggtcccggaccatactgtgccaggaagcccaggggtcctccccgacaccaccccggcgaatccacttgtctctcagcatcaaggctcccctgattagctaattactcagccaggggtgtcccattccacccatgtggtcgtacttgtcttatgttcggatgaaattccaaggaaacggtccttaagtgcaagagcgggtaaccgtacacccggtacgttccccggtctgcgattttggaaattcatttagttcgcaagcaccgacccaggtgtcgggttttccgagtcttttgtaaaacccaagttttactcagaatgtttctcagattttaagtttgatggcgaccgtcgatactcatacagagtgcacgattaccgaggcgcaactaaggggttgcaagggaacatgatataacaattaacaatggaaggatcagatgcaacaagttaggtaggcccaccggtctgccttgcagacggtgcaaacagattaagtgcaatcctttcaatgcataatattttgcaagcaatataattaagttcaaatataggctcaatatgttcaaaggtggcttgccttgctcgagatcttgagcttgatcctcgaaatcctcgcactgcgggtcttcgggctccgaaactacacgcgaaacgggacaactcaacaaacggcgaaaaataaagccctattattgacctctaagcgtgccattagatagatttcgagatttgaggaattttggaagttgaacggagtcaaacggacttacggttgggaagatattgaatttctaagattattggatttttggtctaaaggaaaaggatttatttaaatcctttttaaaaaaaaagaaaagaaaggaaaagaaggagggagggaaattagactttcctcgggcggctagggcgcggcccgagagaaaggggcggctcggccgagcttaatgggccggccggcccaagaaggcggcccaaagcgcgcgcgcgggcggggaggagagagtgagagagccggtgggccaggtccatcccgcgtggtcccgggtgggacccgcttgtcggcgactcggctcaccgtgagcgaggtgcacgcggggcgtgctagggtttttggagggaggcgcggcgcatgcgcgcggttcgcggaggacgcggtgcggcgggcccacgcgtagcctcacggctcaccgcggaccatgcgcacgggggggggggaacggagggagcggctggcgggtcagccgatccggtcgcggccgaggtggcgccgacgtggtgcctacgtggcagccacgcgggccggcgggaggtagacgatgatgccggccggaacggatggcggacggcggtggcgattggctgagcgaaccacggcgatacaggtgaaagcgagcacaccggggggttgcatgggacgaggggagacgagccaacggctcggattcgccggagggaactcaacggcggcggattgcggcggcggcaaccggcggcgagggaaggggaaacggcgacgaggtcacgtggggccgattcccggcggtgagagcatctacgcggctatgggaatccgttgctagcgtcggattgggcggagctacgccgagcgaggccagcgacgagcgggcgctatggagcacgggcggcgacggcggcgagcacacagctagcggcggcaacggtcggggcggcgccagctagctacaggaaggctacacatgctactaccgaaaactaaggggaagagatggatcgaggagggagaacgggggaatgcactaccgagatgaggcggggcgctgtgacgagaggccgacggcacgggagtgatctctccagcctcgggccggggaagaggaagaaggcgagcgcccagagtccccttccgtgtcctcgctcgtgccggctcctccggcacgcacgacggcgaacggcaatagcgaatagagcacgggaggcggcgacactggagtggaggcgaatgggagaggaaaggaaagggggtgaagcttgggtttatatgggcgacaatgtcggtttgggagaggggaaccgactttggacggtcaagccagtgagctggcgctccggctagcggccaaatcggcgacagggaggaggggaatgacgccggcggaggaagaaaaaggaaaaggaaggaagaaagggggcttgccccttgccactttcggaaaaggaggaggggatgggggcgacgcgacagaggggggaggagctctgcctccgtcccttggaggctagcgcgcggagtggcgggggccgggtcgatgacgacggcgatgacggcgggggcggtttggagcggagcaacgacacgggcggcaggcgcggcaggcgctgacggcggcggcgactggccggtcggccaccacggcgcgcgcgcccgggtggcgcggcgatttgggcggcatcggcgggaacggcagcgagagcggagagggaggagggcttggcgcggctcacgggcagagcggggagagagagagagagatggggagggagggagagatgggccgagaggaattcggcccatcgaacccgagggaggcaaagtagacttttgcggagggatttgatttgggaaggatttggattcgggattgaacttgacgatagatcggggattcgagatctgagatggcacggacactagacaacaagcaaagaaacagatttcgcaattaggatttttaagagatagttttcccgctaggcgccacgacagaacgggcgctacattaggctagagttcaatgcacgtggttggtgaatattccataaggcatacgatggacttattgtgtgcgtatgggatgcggagtcgaatttggaaggagtccaaatttggtatgattggagtttgtaaagtttgtttcttgtacgagaaggtttcctaggtggattaggacttctagtaggagttttgttcgtgcctttaggctgcctacctcatgtataaatagagagggagcgtgaggcttcccggtatcggttttgagagcattgagttgagagttgagttagtgtttcaagtttagtcgagattttcgtgaggggtgctgttgttgcaacttgtaaacacagagagaaacaataaagttgttatctactttaagagttcttcgatttgtgttttctcgggttcagcggtctaaccggcgagacaccagcggtcagaccggcggaatcgcggcggtcatactggggggtcagcggctgtcagaccggcggcaacttcaggcgcggcaggtgatctcggcggtccgaccagagttccaatcttggttagaccgacagcttccaggcggccagaccgacgcaactacttcggtcagaccgcgatccgtcgaatttgagggtaacttttaattccgcataaagtttgggtttttgggtatgccaaccattcaaacccccccctccttcggttggcttagttcttgcgtttcaatcctacgtttatatcataatctagaaaagaaaaaggactaaacagactcatctcgttggtcagacacatgttaactgatttgaaagtagttcaaacaaaatttatacaaatttgaagaattcaagtagacgtgaaatttttagcttgtgcagaagatctcgagagtacctgagatagacagatttcgctgagaaactgatccatcgtactacctaaacaatcttggaagtctatactatagagccatagagggctaataataaagaaggaaaaacgattcagtaagccatccatttcttgaattacagtttatgctccttctagtaaattttaaaatgtatttatctacaacctaaatatacagtttaagttcataaaaccctannnnnnnnnnnnnnnnnnnnnnctactaaaaaaggatttttcctgtacgaggagctatttagattgtagacggactgtttttgcgttcgcacggataaattggcgtcccattttcgcatgtggaccctttaaaagcccgcncacgaaaatcgattttcgcatgcgggcctgttaaccatcacgaagatataagggtattttcacatgcagacccttaaaaggcccacaggcgaaaatcgattttcacgtgcgggcctcttaactgaaccgcccgcgaaaatacctctcctccttttccctcctactcacttcaaaattttcaacttctctcctccttttcccttatattaaatccctcaattactctcacccctctctctctgtctacgcacctacttttccactttcctctcctacttttccctttcctctcctctccttccctctcctccccaccgatcgcacaaggaggagtaggaggcagcccgcaggagctagcggcaaaggtggttggtcgcggcgttgccagcagcggcgggctcaatcgggagcggcggtggcgcgatcacggcgacgacgagcggcagtggcggccagcaggcgcgggcgcggatggcagcgaggcaccgtgtggctctaccgtgggcacagacggcggcggcaactggcccctgcccgtatccagcggcggcggccgtcccccacccggatgcgtgcggatccaatggcggtggcagccggcgcgacggtggtggtctcgggcgtagacgacggtcgctgcggcgtcacgacgacagcaacagggtgcggcgacggcgcgatgatggcagccgggagcggcggcaggcgattctagggttaggattttttattttttttattttgtttttcttttacgtgtgggcggtatcccatgcagtccacttaacctgactgcactggaagatgattttcccctgcggttgagctgcccgcacgtgaaaatattgattttcccatacttctagtgcagacaggcaattcctccgcatggaaaaacctattttgatcgcatgaaaaaatgtttttttagtagtgaagaatacaagggttgactaccgggtagtatatatgtaattatttgctaatatactatttttatagcaatttaatactggaaccaactactggcataggcatatccaataaagccagctgccacaaatagtttagcgaaaattgcagagactaagtgttattctcagaagaagcattatacaattattactatatatgtcaatcatcgcaaggttctggttgttgacctcatgtaaactagatgcaagtgtgaaatatatagatgaacttacgttagacattatacacatgatggataaatatatgttgaaatatcatgaaaatagtatggaatgatgatttgacattcttacatgttgagctctagtgtgtactaactacttaactacataaaagttgtagaatgcacgatctacataaaattttgtctgtgtttgagggagaggggattaagaaaattgggaagatacgcaaaacgagataagccattagtgcatgattaattaagtattaactattttaaactttaaaaatggattaatatgattttttaaagtaaatttcatatagaaaatgtttgcaaaaaacgcaccgtttagtagtttgggaagtacgcacgcggaaaacgaaataaacaaactccctttgttctccaaacgaatgcaggtaatcatgaaaattcctcaatgaccaaccgacattttcgtataagagctactatttttctttattattattattattattattctatatatatatataatttgatttttctatgttcttgtagcatcttattgctgtcagcactgaataataaaagtgaaaaatatgattaattttctcaaccaaaggagaatcatttccggagagatgtcgattttgactgtttccgtccatttaactatatattagaaaaatcgacacatcagcatggtttattgttgggtcaaatcaaactaaaaacactaagtttaagccggaaggcagcgatgaatgagcaaagagaagaggatcacactgcaaaccggtttcatcggatgaattcagacgcactggaagggcatccactgggacttaatattgtttcctcttttttttttttatgatttgtattgttcgtgccatacaccctaacacccatacagctggccagccacggagaagcattcattggagccaaccatggtgtgagctagattctgatattcatgatttcattaaacttgaccctattcacaaccatggttgctgacctgtggactgataataaaacctgggatggtgagaaacttaatttaatctttaaaatcaagctgtgaacaaaattttgcaggtccagatcattcataatgataatgaattgctttgttggaacttggaagcattctaagaatggaatttgtaatactaagagtgcatataaggagattatgaaaagtgatcagattcataactttcaacaggtaaatcccctggtgacttctatcatcaaaatcatctggaaggacaagcttactcctcccacggttaaagtttttgcttggagactgctcggagaaagttctgcattcagcgcaaaagttaaatcacagaatttctgatatttcagctaattgctgtaggtgcaatcaacctgaaacatatttccatcttttctttcgttgttcctttagcagaataacgtggagaatttctgaagcaaatctttctactgacattttccctgataatgtttctctggctcacatcattgcttacatttcctcaaatggtcacctcctaaaaggtgtagaggccgggttaatttataatcctttatctaaaaaaaatagtactaataaaattgatatccataaatcttttcattatcttgtggtagctttggaaggccagaaatgatctgaaatttcagggcatcttaaaggagccgacccaagtgtgttttgtgttttgcggcagaagctatgataaatacatatactctacaaatcataatttgcaggtggaatctcaggaggaggaaaacaaaagaagaatggaaaccatttcggagggcaatagatgttatatagat

SEQ ID NO: 24543 - DNA, 999 bp, Oryza sativa
tcaaaagcatagagataagataaatttattttctgctctttacaattgcaaaagtacccgagtagtaaattatgattcgtgaaactttattccattaatgacaaactcatgtcactcatatgcatgtttgggaagtgcctaggctgactcccgatgcttgggggctatgactagtcggacagagtgtttaaacgtacggagtcatctgctcggggaaatcaaaattgacaagaggagaaatacatatttataaatattttaaaatacttaaatttttctcgagtattatatttacatcagatactactcatcctatatgtttgttctgcaggatccagatccagatatgcataatagggattcatggctttcaaagcttatctcctacgcttcagaaatggatcagtcagaacatcaccgaccggcttgccttcgtcgccgccgactggtgtctccgcctacacggctggcctattatgccaccgttgttgggcgtctacgtcttcaccgaccggcttgccttcgccgctgccgactggtgtttctgcctgcacggctggcctattatgccgccgttgttgggcgtctacgtcttcaccgaccggctgccttcatctgctgccgactggtgtctccgcctgcacggctggcctattatgccgccgttgttgggcatctacgtcttcaccgaccggctgccttcgtctgccaccgactggtgtctccgcctgcacggctggcctattatgctgccgttgttgagcgtctacgtcttcaacgaccggcttgccttcgtcgctgccgactggtgtctccgcctgcacggccggcctattatgccgccgttgttgggcatctacgtcttcaccgaccggccgcctcgtctgctgtcgactggtgtctccgcctgcacggctagcctattatgccgccgttgttgggcgtctacgtcttcactgtcggcctacctccgtcgcccccaactggtgtcctcgccta

SEQ ID NO: 24544 - DNA, 10009 bp, Oryza sativa
ctcgtaaaggaagtcgttttgggcagcaacacggtctccaaaacacaacttttacttttttgtttctacaaaaatatttattgaaaagtgatatatgtatacttttataaaagtatttttcaagacaaatcttttcatatattgaaaagtgacagacttcctttaggagtacaggagtacggagagagtatatctaggcaattagagacagattagcaacaaacataatttaccataatgatctagtcctgatatagtacactactagctatagtaaatacttccattatattgtattgtaaaagttctctaagtgtatgtgcatgcacttaatttttggaaagctagcaactcaagagatataattaactaataataagaattaaaatgaccataagttgtaatccacgtgttcaattttataacatccatagtgaccaaaatcaatttataagaaataaatatctatataaggaatattatctccgttctcaaatagatatatcgttttcggttttctaggtgaaaatttccagttggcacacagctaaacgcatggttctttgtagcaatccaagacgaaaagtaggtgattggagctaataataatgcttaattaggggcaaactggcaatttttgctgcatctaacacaatttcattggtctgcgcaataacatctttttccgaacggaggtagcatgcatgtcatttgagcacatacccctctcgttcgcatggcatccgaataactaaatactgtacaaactatatattggcaacgtatattatgtcgtcatacatcattctataaacatgcatagctaaattagatcatatgtaaataaaaattacaaattcaattgtgccaacgttttcatgtaaaagaatattttttttgagggaaatgtaaaagaatatttatctagggaccacactattaccttttttttgaaagaaaattggaaattttaataataagttgttgttcatctccagcttcagtcacagcataatcacgttgtgtcacctcacttaaaatagttctcagaattctcatcatgtctggatttcgtgatactgatacgaaaaccgaacaggaaaaatttcccttgagctgttggtatacttggtatgcaagagtagttttaccaagtcctccaaaaccaacaaccgagacaacctttggatgttgttgctttgactcacagccatcatcatcggacaataatttgattacttcatttttcggcccttcaatacctacaagatttgaagcatgctcaaagatagagagagccctgtggtcaatgattgtattgctggtcctgcagatggtcttctctgatctataccttgcatgcctttctccgacaatgttgatttggctcttgaaatcttctattgccttggcaattcgacgtttagtcttcatatttgcgagcgatttcttacacttactgatgaacccatctggagtggcagattcatcatcaacatggaccatgaactcgtcaataatgtcctccatgtcgtaggatagctcccttacttccgtcatccaagcctggtcttgggcatcaggattctcctcctctgacatattgagaaggaacgcatggatggccatgagttcggtagagagagacttgatctccttgtgcagccccttgaagatcgtgtacttatcaccaagcagagcggctagcttcgcaaggacgggcttcaaagccccggttgctgtgctcactagagctccctccatctcttaaaactctgtctgttttgagggcaacaacaaacccgaaaattattttccattaggaacagaaacatgaatctgttgctagctgatacagaatacatgtacgaatcatatacagggacataattaagcttgcttaagccacaagcacgcaagacagagccttaagccggagggatatagtaggcatatagcacacaaacctgaaagtgatctgtataaagaggagatgacagatcagggtcagaagtcaccacagagcagaagaaaactcaacaaaagctgcagatatatcggtatatatgctgtactatgctattagccttctagagaatggtgtcgctggaaccgatcgaatttgccagggcatatatataccgctgagcagcgagacttgacgcgccttgccggtacgacacggccgggcaggaatgagtttttgctggggacagaacttgttgattcaggtgtgtcaggtttccctaagtgatcgacaaacaagctgtggaaaaacacacgcgaacacgaggaaacacgctgagttttgtggtgcgatgaagcttcaccttttcggttttttttcttctccttttattatgcaaataacagacttaggattcgatcccacgtcccggttctttcgcgtccatccccgcgatccgagagacgcgttcacgtcccgttgtccaggccagtcgcgagttaatctcgttgacagccactacgtgcacggcatccacaacccggagctcgcgcatgcaacaacagaaaaactaacatgcatgggcatccacaacccggagctcgcgcatgcaacaacagaaaaactaacatgcatgcagcaacagaaaggaacgtaaaactagctactactagatacatcgtgtaaggtttatttccaacaaatctccccctaaaccttgcacgtccctttaacttcgacgaggccaatccttgtgcacagtttattgaaccgatcacgcccaagtgacttcgtcagaatgtccgccagttgatcgtttgtactgacgaactcgatcttcaccctgtcctcctcaatgcattctctgatgtagtgatatctggtctctatatgctagctgcgatcgtggaaaacagggtttttgctgagttgaattgccgactgattgtcgacattgagtgtgacggcgtcggcttcttctcccttgagctcggcaagaagacgcgccagccacacaccctggcaagcagctgttgtcgccgcaatgtactccgcttcacaggacgataaggcaacaaccttctgcttctgagattgccaggtaatcaagttgtcaccgaggaagaagaagacaccggtggtgcttttccgcgtgtcgacgtcgccggcgagatcgctgtcactgaatccaacaagatgaacagctcctttcttcctccggtagctgcagccgcgattgatggtgccggcgacatagcgcagcacacgtttcacggctgccagatgctcggtagtgggtttctccatgaatctactcacataacccactgagaacgccaagtccggtctcgagttcaccaaatagcgcagcgacccaacaattttcctgtaatcagttgcatccacgcaaggagatgtgctcaacttactgagtttgaggcgtggctccattggagtctggctcgggttgcatccaaccatgcctgctgcctcaagtatcttctttgcgcacgcaccctggctcagggtgatgccctcgtcggtctgactcacctccaggccaagatagtaccgaagtagcccgaggtcgctcatctggaacgtctcccgcatctccttcttgaattgatcaagctcggagtggttgccgccggtgatgacaaggtcgtcgacgtacaccccgaccaccagtcgacgtgcgttagctccgcgcatgtacacagcgtgctctgaggcactgcgatggaacccaagtgacagcagcgacgcgtcgagcttggtgtaccacgcacgcggggcttgacgaagtccatacaacgccttcaccaggcgcagcaccttctgttccttgccgtcgacgacgaaaccgggcggctgcgcgacgtagacttcctccttgagctcgccgttgaggaacgctgatttcacgtccatatgatggacggcccaaccttcgctcgccgcgtacgccagcagcaaacgaaccgactcgagccgtgcaactggggcgaacacttcgtcgtagtcgattccctgccgctgcacgtatccttttgcgacgagccgcgctttgtgcttggtgatgttgccggcggcgtctttcttcgtcttgaagacccacttgagtcctatgggccgctggcgaggtgggggatcgacgagcagccaggttccgttttcttcaattgatttcatctcatccagcatagcttgacgccaacagtcttgctgttgcgcctcggcgagagacgctggctcttcagcacttgccatcatgagttcgtcatcgaactcgcgcacagccagtcccggcggggtcgccggtcctaatatctcgtcgacgcggcggaaccgaagcggagcatcatcatgatcggcgtcgaggtcgtccgcggcgatggttggtggagtcgcgaattccgccgatgtcgcagttgtgcccgccgtggcggcaggtgtgcatggacttgtcgatgtcgcgggcggagtcggtagctccggctgctccgagtcagctcgtggcacgttcgccacagctgggtggtacacagtggtgtactcgatggtgaagtccagctcactcgccgtctcgccgtcccacctccattgcgcctcttcgtcgaatgcgacgtcacgtgagatgtgcacgcgccgagaggcagggtcgtagcagcgatacgccttcgaccccggctcataacccacaaagatcatgggcttactcctgtcgtcgagcttcttgacattcggcgtggtggtcttgacgtgtgccaaacacccgaacgtccgcaggtggtggacggccggcggcgatctgttccacagctcgtatggtgtcttcccaccaatacttttggatgacgacctgttcaggagataaacagctgtggtgactgcctccccccaaaacatacctggcagccctttggctttgagcatgctccgcgccgtcccgaccaccgattggttgcgacattccatgacgccgttttgttgcggcgagtagggcgccgtcgtctcgcgtcggactcccagctcggcgcagtaatccgcgaagtggtggaccaggaactctcccccctatccgtgcgaagagcatgtagcttcttgccgctcttgcgttcagccgcggcttggatgcgcttgatggctgccgccaccccatccttggaggggagcagcgacaaccacatgaaacggctgtaatcatcgacgagaaggagaaagtaccggttgccggtcggagttggtggcgagatcgggccgcagaggtcgccgtggagtagttggagcggctccagggagcgctgttgagcctgctgtgggaacggcgtccgacggtgcttgccggcgaggcaagcctcgcaaagctggtcaacttgcgacacagccggaagaccgcgcaccagctgctctctggccattttccgcagcgcagtgaagttaatgtggccgaaccgtgcatgccacttccatgcttcgtcgccgatgcgtgccgtaaggcagaccgggcgcgcgagctcgacgtcgaggacgtagagacgtccaggattgcggtgaatacgggcaagcaggcgccgctgctcatcccatatccgcataacgccatcctcggcctccaccttgaaaccggtctcgtctagctgcccgacactaatgatgttagcagcgaggcgtggaatgaggtaggtgttggcgagggttcgatgctccccattcttacaggagaagagcacggtgcctcgcccttcgattcggacgacggagccgtctcctagtcggacgttgccggtgatgcctgtgtcaatgtcggagaaggccgtccggcagccggtcatgtggttggaggcgccggagtccacaatccagctgcccggatcacgctccgcggcgtcgtcgagcgccgcgaacagcttcttttcctccaggtagatgggatcggatgacggagttggcgcagacggcgctggtgcatgctcctgttcacgtgcatgtgtgattactcctcctgtgaggagaagcaaggtgggctcgtcgtcttgggccacgtggacctgttcatcccgcttgggcttgctcctgcaatccttggcccagtggccgtatttgccacagttgcggcatttgtcttcacgacgggccgctccggagttcgtattctccgcgccgccgactccagcgccgccgccgttgcggcctttgccgcctcgccgcttgccacggttgcttgggctgcctgagttcttctttgcctcctgctcctttttcttgtggcgctctagccattcttcctcggtgaggtagagcttgccggcgttgtctgaggacgaagatggcaatggcatggcgtcctcacctgccttgagtctgccggtcacctcctccagggacagtgtagagatatcaaggagagtttcaatggaaaggacgagttgggtgaacctgggacgggcgacgcgcaggtacttctcgacgaccttgtctgccggctcgggatcgccgagcgtcgcgagttgattgacggtggaggtcaggcgcatggcgaagtcctccacggtctcaccgtcgcgaaggacgagcgactcgtactccatgcgcaccttctgtgcgcttgctttgcgaattcggtcgtcgccgattcgcaggatcctgatgcaatcccatgcctccttggccgaggccttggtggccaaggtcgagatcatctcggggggcaccgcgctgcaaatggcgtcaagcgccatcctatcctcatgaagctcgacaccgcctggatcgatggcgccccacaggcaccgggcttgcagtttgatcttcatcagcaaagaccaatcgttgtagttggttcttgtcaacagcgggtagttcgccgcacctcctgcttccttgaccacgcggtggatcaccagcccgcggtcgctcccgccgctgcccgaggcgcggccgccggaacctgaaacatgcacggacggtgacgccgaccgccggcgcggggagtgcgtgcgtcctcgaggcatgaagacaccctcaagagcgcgatctcgcgtccacgctctgaaccgagctctgataccacttgtcaggtttccctaagtgatcgacaaacaagctgtggaaaaacacacgcgaacacgaggaaacacgctgagttttgtggtgcgatgaagcttcaccttttcggttttttttcttctccttttattatgcaaataacagacttaggattcgatcccacgtcccggttctttcgcgtccatccccgcgatccgagagacgcgttcacgtcccgttgtccaggccagtcgcgagttaatctcgttgacagccactacgtgcacggcatccacaacccggagctcgcgcatgcaacaacagaaaaactaacatgcatgcatcaacagaaaggaacgtaaaactagctactactagatacatcgtgtaaggtttatttccaacaaggtgggcaacatgcggggagcagtgggatgatgacgaaagctgatcaatgagcttaattgtgggacaagggatagaatgcatcttcgacctctcagatatatatactccctccttactcataaaggaagtcgttttgcacagcgacacggtctccaaaacacaactttgacttcttgtttctataataatatttattgaaaagtgatatatgtatatttttatgaaagtatttttcaaggcaaatctattcatataattttaaattttcaaactcaacaacttaagagttattcatgatttaatgttctcaaggtttgacttaaatattgtcctaaacggcttactttacgagtacggagggagtatatatctaggatggctctgtacatccattttagatgtaaaggcctgggttttaatttattatctaaaaactataatagacgtagaacgacagctacaggttgcatccaacaaaccctagcgtccaccgccgaacacctccctttagggtcagaagtgatgtgtctaggaaaagcttaactttaatcctaacgcaatacttcaggcactggcaacccgttgttctcagatttcgctctactacgtacccggacagggaggacttaagtgctcttgagggctgtcaccacctctagacccacctcaaacgtactgtgggatatgcatcaaccactggagattaattacccaggcaccgcatctacgcaattaataactactttagtgccgatcaaacactaaagcaatcactataaataaatggactatagtgaacaatgatcccgtatgctaattaggaactaaccaagaagtaattctcactaagtaaatcttaattactcagaatgatatttctattaaatcagagtaataaataaagtacaagagataagagaggattaccgacaactccagaattctttatatagctaccccactgacttttttatataagtcaaggcactgtgtgggtttttaaagcaattgattggatacaatatcgttgctttttgccacgtaagtgaacatttttattggtttaggctgattatatattgtggtcatttttctaggtggttggtaaatcctttatgagtttatttactcggattttataccacatatgccatatatttccaagtgtggtgaaatcatgtgtcttttagggacttaagcacatctgttaaagcagtgtgcgcatggtgtatgcccaatactttagaaatttctttattcacaatatacaagcttctttatagctgttttgctatgtaaattttcaatgatgtagtcaactttagattgcacgcatcatattttacaaagcagtcggtatatcactcggatcatgttattcgggaattcacaccgcatatgctatatattaatatcaagtcacttgattgactacagttatcaaaaccactcggttggttggattatttactccttgactatatgtttagcttgttcaactaatcacatagtcgggggctacacctattaggtgaatctaattgatgcacctaagtttacattcagttatttttcagctctccacagtctttagatttggtaaaagtactcgggaaaccatggcgaagatgagaagatgattgaagcactcggctttggagtaatctagttcgaaagaagattatcttttcgactgtgaaggtctcaggggctactgtgaagattatgggtaccccatacccacacggcatagttatccgactagttataggggataacttatatctatgaaatatgtaacggatcatgacttgggtattacgtttccttatatattatggaatggcctaaagtcctgatttgataatattgtaaagtacatataggaaaccgatatcgtatcggttaagatttctatcttgtaatcctgcccctcatcctatataaggtgggcaggaggccctctagggggcatgatacacaactagatcgtcagatctataatacacacggcgaattcaaatccctaaacaggagtaaggtattacctctcatcgagaggtcctgacctgtctaaatctttgtctccgcatccatccacttttaggtctcatgcgctaccccctttatattgctgaattattgtttcgacaaaagctggttttgaaaatcctgtttcacctgtgataacatatttggttgctaagtttaataaggatgtgatgttttagcatcgtagacttggacatgttggttttgatcatctcacgaggttaagtggtttggatcttgttcatggtttgcctaaacttaagaaagatcttgatttggtttgtacacagtttcgtcatgctaagatggttacttcttcacatgctcctattatttttgtgatgacggatgcaccgggacaactattacacatggatactgttggtccagctagagtgcaatctgttggaggacagtggtatgtgttggttatggttgatgattttttcttaaaattcttgggtttttttcaaggccaataaagaataaggcttttcacccctttgggggttggtttcttcgatgggatct

SEQ ID NO: 24545 - DNA, 1308 bp, Oryza sativa
ctaggcggttggtaaatcctttatgagtttatttactcggattttacaccacatatgccatatatttctaggtgtggtgaaaccatgtgtcttctagggacttaagcacatctgttaaagcagtgtgcgcatggcgtatgcccaatactttggaaattcctttattcacaatatacaagcttctttatagctattttgctatatcactcatcatattttacaaagcagttggtatatcactcggatcatgttatttggaggattcacaccgcatatgctatatattgatatcaagtcacttggttgattacgattatcaaaaccactcggttggttggattatttattccttgactatatgcttggtttgttcaattaaccacattgtcgggggctacacctattaggtgcatctagtcggtgcacctgactttattttccagccctccacagtcttcagatttggtaaaagtactcgggagaccatgacaaagatgattgaagcactcggctttggagtaatatggttcgagagaagattatcttttcgactgcgaaggtctcaggggctactgtggatattatgggtaccccatacccatacggcatggttatccgactagtcataggggataacttatatctatgggatatgtaatagatcatgactcgggtattacgtttccttatatattacggaacagcctaaagtcctggtttgataatattgtaaagtagatttaggaacccgataccgtattggttaaggtttctatcttgtaatcctgccccccaccctatataaggtgggcaggaggccctctagggggcatgagacaacctgatcgtcagatcaatacacactcggcggattcaaatccccaaacaggagtagggtattacctctcattgagagggcctgaacctgtctaaatcctttgtcttcgcatccatccacttttaggtctcgtgcgctacccccttttattattgccgaattcatgtttcgacaccctgacatctctggaatcttgagaattattctcagtgaagttagcgccgaaccttatggcaacactgaatcaggggacatacaacaactcattagaaaaatcactacttcccttaagaacaaaaggtatgcaaaattctaaccttcaatcatatattcttatctccaaaatatatggtgtgtgtattataaggccagaccttcaagattttaagcctttagttcattctttgccggtccaacttgctaagtagtccgtgttttcttttacttgcattcagctctcttatgtgcat

SEQ ID NO: 24546 - DNA, 720 bp, Oryza sativa
aataatataatcttctggaaatgtacatagatataatagacatgtacgcaagttatgaggaagatcaaagtaactaagcgacagtatccttatcattccattgacatcctcgtttctttccaatgcataaccaattgacttttccacttgattccattgatcttctgtcggtgcttttgtagccaataaactggatattgcaatagttgccaagggtaaaccatcacattttgccaatatgttacaacaaacttcagtcaggtgtgatggacattcctccagaccaaaaattctcttcagaaacaacctttttgaatcaacaaaatgaagaggccttaatttatatacccgatgcacatgtgggaagcagcaagattcagctacttcatttatacgtgtggttgtgatgattcggctgccagtaatacttcttgaaaaagcacatctaataattttccaactttctatattccataagtcatcaatcacaataagatacctgccaatttttttattataagcatcagtagaaatatttgatcaaataaatgttagaaaggggatatttttcccatttcggtctcatgtcgtcctagaataattcaactaaagctgacttgttaaattaacacaaatctggtctcgcttctctaaatcatgtctcagttaggtgaaatgtgtccccattgttactgattttgcatgattgtagctatggtt

SEQ ID NO: 24547 - DNA, 562 bp, Oryza sativa
atgcataaaagggattcatggttttaagcttatctcttacgctccaggaatggatcagtcagaacatcaccaaccggccgcctcgtctgccgccgactggtgcttccgcctgcacggctgacttattatgccgccgttgttgggcgtctacgacttcaccgaccggcttgccttcgccgccgccgactggtgcttccgcctgcacggctgacttattatgccgccgttgttgggcgtctacgacttcaccgaccggcttgccttcgccgccgccgactggtgtttccgcctgcacggctggcctttaatgccgccgttgttgggcgtctacgtcttcaccgaccggcttgccttcgccgccgccgactggtgcttccgcctgcacggctggcctattatgccgccgttgttgggcgtctacgtcttcaccgaccggcttgccttcgccgccgccgactggtgtttccgcctgcacggctgacttattatgccgccgttgttgggcgtctacgtcttcaccgaccggcttgccttcgccgccgccgactggtgtttccgcctg

SEQ ID NO: 24548 - DNA, 564 bp, Oryza sativa
cactataaagtattataataacctatggtctggtttcaaagttcaagttgtaaaatggacaattgtgccattattttgtcacctgctgctattttttaagggaattgaaacagcaaatgacaattatgagagtttcagcagtatcgcaaatacaaagctgagatcagtccatctaattcctaatcttgtgtaccaatctgaattgccttttcaggccacccttgtgaaaatggtcaatgaagccactgcaaacattccagggtgggacgaagaaaggtgattaaatggttttgcctcgctgatactcaattcagctgatagtgtttacattagaagccatcgaaggatctccgtggtcaataaaacaagtgaatcaacgcatgttcttcttaggcggcagacacgattggctaattcctacaaattaacctagaattagtttttggcaagtaaaacacggtagttatttggtcaagtgaggtggtccatttttggtgttgtaaagctgaaacgtgagcttttggtaatactcctagatcatcgattgtattgtaaagcagaaat

SEQ ID NO: 24549 - DNA, 734 bp, Oryza sativa
cccacattgccacagatgctaaacattctaaagagcaggaaccctgggacctatgttgctgtgccagaatgggaatcaattcctccttcaaaatatcttgggatgcaccggcatttttttgcattcggagcatgcattcatgtgttcaagtgctcgaggccggtgctgtgtgtcgacgtatctttcctatctgggaagtaccgaggccagatattaacagccattggtgcggatgcgaacatccagataattccggtagcttttgcttttgttgaaagcgagaactacgaaagctggttgtggttcttgcaacatcttaagtggggagtggtgcaaaaacacacatcgatatgtatcatccatgactggaatgccggtctgttgaaggcaatcaaagagctccaggaggatggtgatggtgcatactactggcctgacatgcatagccgttggtgcatgcggcacatgggggccaattttttcaaacaattcaacagccggcggctgatgaacatgttcaagcggttgtgcaaggaaaatcagtctacaaagttcgatgagctttgaaaacaacttgacgaggggacaaggacacatatccggtcaaagcagaccaacaacaacccgcaggatgtacatgtcccccaggccctggaaccaatggatgatcttattccatcaaatggaaagaagcgtgcgtcatcaaaaaatatcaaatgctttacccattggat

SEQ ID NO: 24550 - DNA, 9940 bp, Oryza sativa
cccggcgatgcggaggcgtggacgtgcggcggcggcaccctaggagagagcagagatgggttaggggtggggtaagtgaccacggcggccaccattgttgaccggagacggagggggatggatatctcactggctcgcgagggagatagggttccggtgaggttacggcgacgcgaggcggtggccgagatgacccacgcgacgacgaagcaagcggcggcggcgcgtggctggatgcggcagctctagcggcggcggcgcatggctggatgtggcggcaagcggcggcgctagcggcaagcggcgcgggcgcggtagagaacacgggagggcgcggcgagagcggaaagagggagaggaggctcggaggagtgatttatagggcacgggaggggcggacgtggctgggaaagcccccgatttcgccggtgacgtgggggtggagagagagagagactggggttcaaatttgaatcccggtcggtgcggggcgcgcgcgcgtgcgggagaggtggaggagtgggcggcgaagtgggcacgagcgcgggagaggcgcgggatgggcgcggaggagccgcgtgggcgaggcggcgtgggcggctgcggcggttgctgccgaggcgcgggcggcgggaggttagggacaaccgacaggtgggccccacttgtcggtgaccctagggagaaagggaggggcgtgggccagcccaaaagaaggaggtcgagcgcggttgggcgagctggaccgggccgacggcccaagaaagtaaaaagaaggaaaaagaaaaagaggaaaaagggaaaatgaattcctgggatttaaaattgcactttgatgattttaattggtcaaaattacttataaggctctgaaaatttcactaaaaatcctgttaatgcattaagacatggggaactcaagaaaaattccaccacgccatttccaattattgattgcatttattaattagggaattagctctaggttaaattaaaccatttctttggacgatttattttatgaatttaaagcaaaggaggggaacttcagggcgtgacaacaccctcgtctccctaaccgttgagacagagggattgcgtcgaggacctatttataaaacattttttataaaataattaaaatgcaattatcttttcttaaaaatagggatgctagagagacaggtactaaggatctatttgtaaaaaatatttatatttaattcttttttaaaaaatattttataaataggttctcagcgtaagtgtttttggtgctgacccattcatatcaatgagttcactattataaggggtgaaagcgtcagcaccaataccactgtcgttgagacattgaacctcatggtctcaaactcattgccccagcaccaagaaaaagggttctatttgtaaactaggtttttaggtagggttaatgtaagatcaaagtgtgttttgatgcttatttagtgatgaacaattggcatctgtgattattggttttgatatttggtgattactgtcgaagtggttttggatgattggactcacaggtgctgttattttatgtggtccggtccgaccgggcggaggttgccggtcagaccggattgtgttgagcggtcagaccggctagccgcggtctgaccggccgacgctgtgtcggtttcggtttcgggttgtttgtttggatatcagtgattgtttcatggttatggcttctagatgaatactatacgtatgtaatactgtggtttgctaacaatgagtcaagttggtggtagcttggtctcggaatatggtttctttgtttgtctcatgtgtaggtgactcgatgcctcgggagaatatttgcggtgatggaccgggagtcggcttgttggtaagacgatgtccgtggtggtcagatatcatgcgggatactaaggctagagttgatgcacatggttgatggagattccatatggcatacgatggaggtattgtgtgcgtatgggatgcggagtcgaatttggaaggagtccaaatttggtacgattggttatgtaaagtttctttcttgtactagaaggtttcctaagctgtttagcactcttaatatgagtttggttcgtggctttaggctacctacctcatgtataaatagagagggagcatgaggctttccggtatcgcttttgtatagcttttgagagctagtttagttagggtttcgagtttagtcgagatttttgtaaggagtgctgttgttgcactttgtaaacacagagagaagcaataaagttgtcatctactttgagagttcttctatttgtgtttcaccgggtttcggcggtctaaccggcatctcaccggcggtcagactggcgacctactggcggtcaaaccgactaaggcgaggcggtcagaccggtggcggcgacagcgacttcagacgcggcagacgatcttcaggcggttgaaccgagtgatcaacaccggtcagaccggcggcacgagcgcggtcagaccgacggatcaacttcggtcagaccgctatccatcgaattcgagggtaacttttatttccgctaaaagtttttggtttttgggtataccaaccattcacccccccctctggttggcttagttcttgtgattcgatcctacagttaaaatgtacaaattgcaggtcatgcgcgttagcgtgtatatttatttgcccaagcaatggggatcgatcagttgaccaagctaggtctttatgtacttaagctgcgtagtcgagcataatatacgtgtattatagtactagttcccaagattacagcgcaaacatttccagtttctttctatattgacgatcatcctttttttttctcccatctcttgcaatcgattatccttccgccatcacctctctctttttttttggcgtttgcctgttcggcaagagatattagtaatacacacttagagcctatttgattcccctatcaaaattttacaccgtcacatcaaacgtttgaacacatacataaagtattaaatataaacgaaaaaatatctagttatatagattatgtgtaaattgcaagatgaatcttttaagcctaattgcaccatgatttatcaacgtggtactacattaaacatttgctgatgacgaattaacacggtttacaggcggattttataatttgttttgttattagactacgtttaatactttaaatgtgtctatatatccgatttgacacgccaaaactttacacccctcatctaaacacagccttatttaacgaagctcatgtggtctgtgtccaaaccgctgaccagtaaatagtatatggacaagaggattgaacgcccgatctgatctaaaaatgggcagttaaaatattttagtttgccgtatgcgaaatgttaaattatatgtcgtaaataaagagctcagttatttgaacatttgaaaggatgaaaatgtagtgcacaacaaataaaacaacattaaacatcttgagaaccggaaaaatgtgagtgtgaaacagtgttaaattcaaattgaaacattttactctcatatataaaacattaagttcctacttaaaaaaacattgacaaattaatgagatgaaaaagtagaaaaatgaaacatagtaaatccaaattgaacagtaaaataaaattatctaagattatgtttaggccccgtttaattaaaaaaaatttcccaaaaacatcacatcgaatctttagaaacatgcatgaaacattaaatatagataaataaaaaaactaatggtacagttaggaggaaaattgcaagacgaatcttttgagcctaattagtccatgattagccataagtgctatagtaacccacatgtactaatgacggattaattaggctcaaaagattcgtctcgcggtttccaggcgaattataaaattattttttcattcgtgtccgaaaaaaccttccgatatccggtcaaacatccgatgtgacacccaaaaattttcttttggcgaactaaacaggcccttagttgtgtccgatgatgcagatgggcagaggtggagctcgccacctccgagccatcggtgccgctcctagatgccaccgctcaaaccatcatctgcatttgggttaacgtataaactaaaaatacatttatagtcaaatttatcttttctgcgatatgtataagttgaattttaaattgcatgtctgtggagtgatatatcatatgttaataaatcttcttaatttttctttaaaaaaattcataactatttaaatgacatacatatcagtgcctgagcggagcctttggatcagcaatgccgagtcttcacaattgtcttatcagtacctatcggaagatcgggaccctagtcctcatcagtaatggaatgcccccgaaaagacttggatgggggactaggacaccatgcgactacacgaacatactcctatttgtggcgacaaccataatatccctagggaacgaatccatagctcgtttctgggactccgcatggctaccaagaagaaggccgaaagacttggcaccacaggtatacacaacatccacaaggaaaaaagaacgcttaagaaagcattcgaaggtgagacatgcatacaaaaccttgacctctcagtcaatggtgacatgctagttgagctcctagaccaactagtctccctatagaacatagtccaagatgtgcaactcgttgacgccgaactagatcaaatcacacggaaactcacaacccatggagagtacataacgatgtctgcatacaaagtgtggttccttagatccaaagcagaaactacacaacaatcatatggaagtcctgggcaccgagaaaatgcaagttctttgtatagcttatcatctaaaacagagtatggacgtcagatcgcctcgagacccgctgatggcagaacaacatccactctgctagcataccctagagatggctatgcacctcacggcggaatgtaggtacacgaagagaatttggggattgatatcaacttgaatctcccacgagtaaattaagccagcaaattggaacaaccatgcgacaggccatgagtggtggatgggtctagcctccaatcctggggtgccaaagaaaggcttgcgtagccttatccttctagtatcatgggagatttggaaggagcaaaattagcaatttttagacgcaaagaaccgtcagcaacatgtctggtcgcaaagaacaaataggagccaaagactcgggccatgacaggagcgaaagaattgtgtaacatagtgccttagagccccctccttttcttttaaaggatagcaaactcaggggggcgttagaagagcgaaaaatgaaaagcaaacgggacagcaaactcagggggcctacttatttcgcgaaaacaaaattttttggtgtcatataagatgtttgaccggatatcggaaggggttttgacactaatgaaaaaactaattttataactcgtctggaaaccgcgtgacgatcttttgagcctaattaatccctcattagtacatgtaggttaatgtaacacttatggcaaatcatgaactaattagactcaaaagatttgtctcgcgattttccccctaactatgtaatttgttttttaatctatatttaatactctatgcatgtgtcaaagattcgatgtgatgtttttgaaaaaaaaaattgggggaaataaaccaggccaaagttgaaggaccaaccaaacacaaacaagctgaacgttatgtgtgaattattttctttcaaaaaacacctgtaggacgtgtgcatgttcaatttctacgatagcacataccagtgaaactatatgtattatcagaattttttaatataacatatatatatatatatatatatatatatatatatatattcggtgaccctgtatgtaaacaaaatatagtagtattaccgatagaaacctcatatgtcagtgacggagtgacacgtctaactatctaagagactgagcactgggttcaggtgatcgagctagaacattatattggctgcccacacaaccacaagtgtatggccaaattaaaaggtaaaaaaaatacaatgggggtgttgcgagaatcgaactcgcgacttctcgcacccgaagcgagaatcataccactagaccaaacacccggcaacaatcgattagtggaaccaagatatatatatgcattctcctggacagattcgctaaggcggtaaccaagaacgttacgtgtgtacacaggaacagcctgaacagctcgcacgcatgcaagcgcccacgtctcgacccgtccagcccaccgccttctttaaccacttcaccgagcgatgaatcctcccaagctcgctcgctcgctcgatcgtttactaactatacttgcgggagatgtcgtcgcttctgctggtgggtccaaggatgagcgcccggttcctcgccgcggtggcgccggccagcagcgcgcggcccaggggcggagctaaagaaaagatgaggggcttcctgactttctctttataatataataccggtatgtataattctgaagtgatattgtactaaagtgatattgtactaaatagttgtgtacccaatacatataagaaacatatctctaattgatgtcaatatacaacaagaaaatgcatagaaaaatgaaaaatatacgtaccataatgaagaaaccatcttataactagccacttgctgtcatcctactcccctccgttcaatgcaagcaacaaacactaacttaatcaataatcatgggttatggatagtctagcaaaattaaaagaggggaccaacgggacttgacttatcgattggattttgatgctgcggcctgcagtggtggagttggtggcgaacagtgaactgctggccgatgttgggcatggtaggagtaggcgataccggcggccagcggcaggcacggcaagggcactagggcaggccgcactgccgcacgtgtccagggctgatccaggcgataggggcagccgatgtcgccacgtcgggcataatcagggatagatctagacggcgagagactgaaaggtgagggacgagtcgcgcgttttgtggaagacggaacaatgccgctctgatttctggtcgccgattcgctaccctggctccctgattcgtcgtcacgcgcgcatgaatcgatcaaaacacgtgcgatgcgactcctcatctcctctcagctgggccttctccaccaataaagaaatctatgggctggccgaccgggccttgtcgagtggaagttttaggctagacaatggagaaaggttccttggtttgggctagaggggtgcccatgtggtagagatataggggttacaagatatttcgaattttgggccgggttcctgggcacccccctgggcctattgggctctgcccctggcgcggccgatggggacggtggcgaagggcaccacccgcgccgccgtgcacggctcgcgctcgccggccacgaccaccctccatgtaagtactccctccgtactcgtaaaggaagtcgtttaggacagccacggtctccaaagcacaactttgacttcttttttctataaaaatatttattgaaaagtgatatatgtaacttttatgaaagtatttttcaagacaaatctattcatataatttttaaatttttaaacttaataacttgagagttattcatgatttatattctcaagatttaacttaaacattgtcttaaacgacttactttatgatgagtatggatggagtatacgtagacgtagtcgcgcgcgcgtctcagctacttaattttagctgtcgcttcagttcgtttgctgctgaggcatatatatgcagaacaaggaggaggtggaaacggcggtggagagaggtcgggagcagaagcacaaggcgagggaggaagtggaggacaaggtggacgccagcatcgccgaccaccgccagccaacgaccaaataaaatgatcatccgagacttgatctgtgttctttgtactattattagtagcttgtaaatacacggacccaggaataagtaatcttatggatttatagcttgtaaatacacggacccaggaataagtagtcgtatggatttacgaacccaggaataagtaaatcttatggatttgttacatacacaaaatacacgatgacaacaatatttgtttcaagttaccgacgtttcgacattaatctgagccgtggggagaaatctggacgagcacgccaagagcggcatctgatggtgcagtatttcagtctccagcatacgtcgccgcaggtcgccagactctatgtctatcattcatggacatgatcgtgcagatgcatatctcaattgctccatgatttatttcaagtatcgagagaaatcaagtgttattttttcctctttaaacatacaattattctcgttcctcgttcaacagatccattctatgatttcaagtctcaatagaaattaagtgttcctttctcctcataccatacaattatcctcattcctaattctacagatgcacaggtcattgttctatgatttcaagtctcaacagaaactaattgttcctttgttctcttaacataacagttattatgagaggaaggcagaggttaccgttcaagaacaacgattttttttgggtgtatcctgcaaagcatgtttcggaaatgctttcttgaagaaatcatcatttgctatgagatccccaccctcgcaccagatgacatacatgcaagctacgcaaaacagatcaagcagtacatgattgaattgtaatgtgaaacgatcataataacatcagttgaccttatgttgacatgatgaaaccaagcaaggcaactgaagccaaacattcggcagatctatcatcagtcataacgaaagcactgtgattcgagagagaataaactgtccatgagcactgaatctttaggaaagaagacgctggttcttaagtcctgcagtttttaactcaaaatgttgcataaatgtcgcaagaaattgaatgaaacctagcgaatgacttggaaattagggcaaaaatcgaacctagcatgaaggcaactaaacataaccatatccaaaatgttcgtgtaattttcataaaggggaatatggcaagataggtaacatgcaacacatgacatagcacactaatgatcagttacctttaatagggctgaacctgaacgtgtctgcatatccagatttgcagtccaatactagcgttgttgtacgctttcagctttattagactaattttcagtttcaaatgttgaaacaaaacctcactgtatgttaatataggtaactcaaaatactaggaaaggtaaacaatacctacctgatattttttcccctctaaaaggaagactgtagggtcccaacagagctgttacagcagaacagagattcaacaagcgcaacacatcgcaaaactcatttgtacaacaggttaaatggcgaaagggacataatggtctacctcatgagttttaactcggaataaaactatctatatgttcactgatctgggccatgcctgcttggagaacgagacctgctcctcactctactcctgtcctttctcatgtcatcactcctatatcggtgtctgtctctttcagaatccctaccatttctgtaggaactgcttctatattctgatcctctatctctgtgatcatgagacctttctcttccacgattgcggtcatagtaacgatcacggtcatagtcacgatccccagacttctctcttctagaaccaccgtccctgcctccaacatcatactctttttccctctgtttcctacgttcttctgctttcttctcccttgcaatcctctcttcgtctcttgccttctcttttgcagcctgaac

SEQ ID NO: 24551 - DNA, 20878 bp, Oryza sativa
atgtcaaaaattatcgtttgtgtaccctggctggtcctggacagtggtttaatgcacattcagcttagaaattctggttcatgaatttctgggcgtgacagtgttgacaccaaaatcactggcgtcaagatgttggacctcagccagggtcacttgcattgagaaaatgatataaccctgactaagtttatctagtggtttatttgtaaaatatgtttcaagaagggccaaatgtaaaaagtgcagcacacatgaaacatgacacgcacattttagtatagttagcagctatagcgtccacatgctcgccatcagtccgccattttgactttcaccaggcttgtaagtacaacaaacgccgtcgttgtccttaggagcaaatatacggccatagcgatgtaaacaatgaaaaccaccgtatataaaaaaactgacaaacagcggagagaaaaattaaaaacaggaataatgctttatatttataatttattaattttataactcgcaaacgaagttgactttgttataattgtctttttttttggggaacttttttttatgactttgttatatttatctttcccgcatatgcgattttctttagaatgtttttgagaacttctaaaaaaaactttcataatatgtttttcttgggatcggccactacaggatgccacctagatatggatatcgagttagctcggctcgattcggcttatgtcaactcgtgaagatacatacaaagctggtttggctggtgcatgattcgggctttgtttcatagcaattgtggttcgcaatcgtatgggttatcacttttttgtcggtccaatgctattgaatctcagacttcatgccgaaacccgaaagagagagttggaaaggtggagtcatggtgaaagagtgtcaaagttgtactctcatcgactcaaccacaccgatttcaagagggttctcaggacctccccgctccgtgagggttcaccggcatcttaccttccattggcattggttgtctagctgtccggcgcctagaggtgcgttatcatctagtctcaagaaaaaaaaaatctcgcatatagcaaaggtgatattatacatgtaaatttagaagaataaactcaactacatttgttaaatacaaatttgacaaacaatggagaaaataataaaaaagggaataattctttatattttcaatttgttaattttacaaacgaagttatatatgtttgttcttacaacttttgttgcctatttacatcttccttgcatacgcgattttctttagattgttttttaaatttcttaaaaaaagttcgtatcatatatatttcccatgggatcggccactacaagatggtacctactaagggatagatatcgagcattcgagccagctagcttgactcaatgaacaaacaagctaaacagctagtagctcatctcggctcttcaatagctccagtagagtgagtaggtaagaatagaatcaacagcttacttttttaaaaaaaaagctttgtctcgtccagcaaatgttatctcatacagagtagtactaccaccaggtacaaaatcaaatcgagccgttgattgtggagggagcggggtacattggcatcgttcgtcagcacgaaatcaagtttagcgagacctttgtgggagtgcctgactgagcccactccaccacatgtccacattcgatttttttttattttttgaactttttcaatttttaatttttttgggaaacttttaatttaaaaataagcactttcaaaacttattttcaaaatttgaatcttttggcgtggctggtgcaataaaataacgctgtaacgtgtagtctggctagattgacaaacgttatatatttagtcacgtcgatctggctggcgtgatggtgttatttagcccgttatatgtgatgtgtcaatattgttttgctagccagacgagctgatgtggtcaaaatgtttagattctaaaaataagttttagaaatatttatttttaaaatctctactattataaaaattaaagatgtttttgctggtactttggtatgtcatccgtgtatgagtcgaattttaagtttgttcgtttttggaaatacatatccgtatttgagtcgggttttatatttgttcgcttttgaaaatacaggagtaatcatatatataagaaatctctttaaaaaaacttatatgctaacttgagatgatcggactcctaattgcaactcatgattttctagaaaaaatatatatccaagcgaatctcacaatgaattgtagaaaaaaaaacaataacagaattaaaatagccttcaccgtagcaacacataggtattttttctagtaaataaaagttcaaaaaaaaaaaaattccaccacatcctcacctcccagcgcagattatactgaatccgcagttctctctccccacggcgatgggggagggggcggaggcggatgcatggtacgcaacggcggcggctgcatagatgcacggccatggcgacacacactcgcgcggcgcggcggcggtggagggggagactgcgtcactcgtcgaaatcggtggcgtcagcggagctaggatgcacagatacggtgcgcatgcaggtcacgtatcccgtatcggatacgtgtaggatacggatacgtatccgatacgcacggatacgtatcccgtacgtatcgccgattaacaagattttcaaataaaaaaaataattccggatacttcccgatacgtccaagccctagcatcgatcttctccagacaacctcgtgcgccgccgtcgttcaccctcacgaagtgcagcgaggcccagcagcagctagccccattcccagctccaggatacgtgagggagcgtgtatgccgagcgaacgacggagctgctgtctgacgcgatgcctccgccgtccacctgctggtgccgcagcttcgctctccggcgcgcagcgcctccgcgggccgctgggtgccgtagcccgcagccagcagcttcgctgccgggcacgccgccatggccgccagtaaccctctcaccaccctgtcacttgttcgtccactccagttcaagcctcttcaaatcttcaatgatcttttatgtgcccccattctgctagtatgactgctaacgcaactgcaacttcatagcgttggtggagatagctgtgagaattattgagatgtttcattttcctgttgattttctctggctttgcgaactccaactctcaatcacagtaagtgtgtataaccttaagacagtcctagaagatcttgcagcgtttgatctatctgatgatgcaagcaacaattaaattgatctagctctctagatattgagttgaacatgaagttctgaacaagtctattctaatttgtcattgattttttttctgcactatacgtagtcttgcacttatatgattttctgtatgtgttatatatatatatacatatatatatatatatatgtatatatatgtatatatatatatgtatgtatatatatatacacacacacatatccctgtatcaaggtaacgtagcatcggagtgctcgcgtcgcggcgttggccaagcgtgaaaagacacctcttcccatcccatccaatgtgaaaatacaatatgaggtgttcaattatatggcaccacctcaatgacacaaatggtactcactgtactaacctccaaccgttggatccgattgtaccaccggttgagatttggtaccaccctactgtgttgggcgataaaaaatctaaaaagaaaaaactaaatcaacagcatgcaaattaaggtttagttatgaaaaataaaacaaagaaaatactctcatattgaaaaacacataacttcttttagaactgatttattgaagggcgtacatatataaaactgatacaaaacagacgaaaactgaagtcgcagtaataatatcaacgcaacatttactggtactatattacaaacactataatcgtggcaaggctcgatccgtcggcttgccgttgccggccgcgccgcgccgtcgagcaagctagtcttcaaacagcagtggcaccggccggcggcgcagcagcttcagggtcacggtcgaggatgccggcgtgcgtgagcagcgcccagatgtgcgtcatgaactcgccgccgcgggcgaggctctcggcgtgggcgtcggcgttctccgacggcgccaggaagagcaccagctcggcccagacctccgcgagcagcttccaccgccggcgggtgtcgtagctggcggccatcagctggctccccagcctcgctccgtccatcagtatcccgtcgcggcctccgccgctgctctcgccgaggacacgcagcttcttgcacttgttcgccatggccgtggcgtcgacgaggtgtttccgggcctcctgcacggcggcgtccaggaccagcgtggccatgtagctgtggtccggcagcatctccgggacgaaagccagcaggtaggcgcagtaccctgacaggcgggtcgcgacgaggcggtcggcgccgttctcgtcgtcgtctgcggcggcggcggcgtccaggtggtcgcacatcgtggtggcgatgtgccacacgaggacggtgtgcgtgtgagctcgcgtcttccagtgcgtgtcgctctgcagctgcgtcgacggcggcaggaagcggtcgcacgcccaccgcaaccggctgtccagcgaccggccgacggcgagacggccgccgctctccttgaacgaacggaggactgccaccttcacctcgcgcggaagcctgacgaccttcggctccagcaggcgcccggtcagccatgacaggcagttgccagctgacgaatggtagaggagagagtactggccgagcttgttctgccagtgcctcgacgtcctcgcccggcgagtcgccaaccgcttgatcaccgcttgccggaagccgaagccgccgccgtgccgcttcttgttgttcttgtcgacgcgcctgacgtagtcgcagacgaagtggacgaccgcccagtcggagtatccggtggacagctgctgcatgacctcgacgccgaggatcatggagatgaagaggaagtcgttgaaggaggagaagatgccgacggcgcttatgtctttgaaaatcttagctgtgtagctggccgtgtaggtgaagtcgtagaagagcttgaggaaggcgaggagggagacgaagcgggcgacgtggagcacggcgctggtggggaacagcgccgggtacttggtgtagaagaagtcgtgggcgaacgacagctcgagctccacgacgcggaacgcgcgctcttagtcgtcgccggcgaggaggccggcgacgacgaagtccctcgccttctggtgccccgtctccgcgacctcgagcccgcagaaccgccgcttcagcagcttgaacagcgcgaaggagaggcacgtgtccttgagcgcccgcgcacgcgcccgccgcttgtcgccgacgacgccgtcgccggagctcaccagcagctcgccgtcgcagcgccagatcttgtcaatggtgacgacagtgccgtcttctggaacacgtgtccggtagtccgtctgctccgacggcggcgtggagcgcccttcctcgccgtggaccagatacttgtacgggcccatgtccacggagtcgaggtcacgagcggcggtcccgccgtcgccgccatggccgcagtcgcggtcccacgcgtcgacggtgtcgtgcatgtagtcggcgaccaccttggcggcgcgcacgaggccgtgcgaggagctcgccatgcgcatcgccttgatccgctgccccatcttgacgatgctgtagagccagcagacggagagcgtgatggtccactcccagttgacgccgcggggaggaggattcgagcaggatggcgttgttggcccgggtgacgagcacccagagcacgagcacggtctgcacggcgtgctgggccatcatccccttgctctgctcggcgtcgccgcgggtgaaggcggacatggtgtcggcgctgccgaggaggaggagcagcccgacggcccaccactgctgcacgctgtagcggtcgggctcggcgacggactggacgaggccgacggtgtaggagacgacgttggaggagacggtgtaggcggcccagagcaggacgaggaagagcttgttgctgctgcgccggcgccggtagcccagcagcgcctggaagccgagcagcgcgccgcccaccgtggcgaggatctggatgtgcgtcgtgcggtcgctgccgatctggttgagaaggtaccggacgctcatggagtccatggtcgtgttgggaggagggcctagctccagctcgaacgccatggttcacactagctagttgaggcctcggaggctagcagcaggttgtgtactgcgctgcgcagtttccacgggggcttttaacaggcccgcccggaacctacatggcttgactcagctcaggcggtcaatattaacaatagtttctgcatagtgctaaggcatactccctctccctgtgtcaaaaaaaaaaatcaaattatagtggtaaatctcaatgcagaagaataagactgtaggaatgagtctggaactgttgcactactggagaatgcatcttctatcccggctcataacccatgtagtctcggttgcagaccgagagaagaaattcaagactaaagatgacgatctttagttccaatttaaatacccgagagtaaagatgcttgtggatcattgtttttatctatttgcacttttttcagttgaactcatccacggttcatctcccaacatcccaagtcatccacaatcccaaattattcataacaacaaaatcatcatccataatcccaaatcattcacaacaacaaaatcatcatccacaaaacatatatagtcaaaaaaaatcatccacaaattaagagggaaaaaaggggggaaaaaaaagaaaaacattggccggccgaccctccgcgtgcgcccggccgcctgccgccacgcccctccgcgccgcccgccaccgagcgccgctgcccgccgcgcctccccgcgtccactgcacgctcacccactgccgcaatcgtgcgtgagaggataggatagagagagagacagagagaggaaagggataggataagggaagatatggttgctagaggataagtgcgagggattatatatactatgcatcgatttttagtcccggttggtgttttcaaccgggaataaaaagagtagggggcggacactttttcaaccgggttggtgttaccaaccaggactaaagatcatagaatggctgtgtggtttttaaccggggctaaagatgatttttagtcccggttctttttggaaccgggactattgtggttttcggccaacctagcaaagatcagttctccagtagtgttggtttttcttaacgacgatactagaaatataattcccagcaatagcgtcgagataatctcggaatattttactattacaaatataatccaaaagcacacagatataccgatgtagcatttcacctagaagtattccaacggtatcgtatttatttaatcccaatggaacatatgataagagagtactttgctaataatttatatcacttatatagatcgaagtctatgcagaggttaggcaatatttatgggtagagatatgtgacacaaagaagtaaccttattactctcattaaaataaagtctaagctaagtggagaaagaaaaagaaaagaatcatttttgtacttttagtatatagccattttaatatacacttgctagtatataataatgcaaccaaatttccctaactatgccttcctggtgtttcgagagactacccctgattgccgagtttcttacggcaacccatcatggccattcatcggtaatgaatacggaggagtacccataccagaaaattgtcttaatactatatacccacgtagaggaatacccgtaacgagctgtcaccatcagcagctcacctctaccaaggttgtcaggatcgggatactacatagtatcattttgtttaaagtaatatcgtatcgtagtatcaggatactatgatattttcttttttaagtttaattaatatttatattaattatatatagccattctatataaaaaagtagtaattatatatgtcatgcaaatagagacatttatcaagagaaaccacgttggttttgatatatttaactgatttttatataaatttgagcattttatttacattattttcaaaccatgttattttaaataatattttgtagtatcgtagaatcgggataccacctaaaatttcataggatcgtgtagtaatgaatattaggatcgagatactataaaaaataggatactaggtgggatcggtatcatttcggcttggtaggatcgtagtatcgtaagatactaggatacgaatcaggatactgacaaccttgacctctactgcctcgtggcatataataccaattaatgatatgtaataatttaagcaccacactgacattactaaatagtactccatatcgctgcagcagacgtagagcaatcatcgaaatgaatattaaaccacaccattgcatatctctggtaagttagccacatcattatatcgagacaagtataatataaagttggtacttagataatataaatgaagtaaaggatcgaagctatataaagaagaatatttcactaataatagtataagtcttacaaaagaaggaagagctactagagccatacctgaaatctcctgaagattcaaggaaaatattctattcctactccactagcaatagaacagataactaaacttgagagagctcttgattcttcttcttgagtgtgtgttggagtggagtgaggcctactccttaaataggttgccaatgacagttgtggcggttgaaattgtcggaaatggcccgcaaccgtcattggggagcaatcctggacatccacgtggaaggccgggatgagaggcctcggctaaggttcgaccaaacctggtccagcccctctggcctccaattttggccgaggacttccttgttaggacttattcttcgtgacatggcagttgggcttatttgcagatgttaaataagttttgtaagcccaagcatcataagtctaccagtcggcggtcattgattatttcctgctgattttcctccgtttatgtagaggtcgttgtgttcaaataaaatttcaagcacaagtggaaatagattatttctaacaaattatgcattgcaagcatagctagttctcctttattccggttatattgacagtcaaaattggtctataacgaccgtcaacaggcataggacaagtttgattctttctgggcagaaagattagttttttattcaactcaaaccttaacttactccttaattttctgttagtatgttttttaaactgttaaatgatgttaaatgatgtgtttgttgcaaaaagtttatgtatagaagttatttttaaaaataaaataatttcattttttaagtttgtaataattaatacttaattaatcatgtgctaatcatctttctcgtttcatgtttttcctccaaaatcactatgtttttcctccaaatcaaaggggcctaagtgtgtaaataaaattcgagcttgcctcgtttgagctcgttatcttaacgagccagttcggctcagattgttaacctccataggagtaaaaacttagagcgtgttctaggggatgaaaaaggagaatattaagaagaaacttaaaacgatgtgagccattaatacaagattaaataagtaccacctttgtttgttataacctccttatcttttcgtatgacgtttgaccatttgttttattaaaaattattataaatatgtaaaattatgagttaagattatagtttccgtgatggtaaacaattcacaacaaaataaatgatatttatataattttttgaaataaaatctagggtcaaacgtcacatcaaaagtcaacggcatcatacattgaaaatgagggagtattaattacttcaaacttaaaaatagattatatgacttttttaaagcaaattttctataaatatatattttttaaaaaaccatttaatagttcgggaatcgtgccagtagaaaacaagcaagttttttcactctttgtgctgcttccgaacgcagcctttgatttatgagtataatcttgggctcttgggctggttctttaagctctaatttatttatataatcttaacaatttaataatttatcaatttattatatactaacataatatttcctttgttttacactatgagacattttgagttttaaatagattcatagagggatctatgtatgtacttcatatatgtcaaaattcatatagatattagtaaatctaagacgagagatgaagaggctaaaagaagtcaccaaatataaataatcaccaaatgtgaaatagatcgagggagtaataaacataaccaaatataagtagtttggatgctactaaaagattaagcattagtgaagaagcaataagaatatgaagatatagcgatcttttgtattagcaagctagagtcgttcgtgagttaaaaggtcaacttggctcggctcattgagattactagttcgagtagatccaagtcatgagcttcaatgtcgctaattaatcgtactgctggatgttctctggttacctaaaatttaagaagttaccgagtttatctcaatagtttattggaaatagccttgccttctaatttgatgtcaggcacaaaattacctatgtaatcatccacctaatggcccacatttttgctacatttccatagctacctcttgttatatatcgtcagattacaagcgatcaatggatataatgcctctcaagcaccttagaaaatctcaatattataatttctggaccgttcaatcactttaaaattcattatcttcttattgtccctctcctcattgtccgatacccctccccccctccccctccttttccccgtcgtcatatccctcaccaccagttgtcgccttctaacctctcgctccactttgccgccattgccaacacccgtttcattgctgaccaacgatccaccacctcccacggccatcctctaccctttttttctttccttcgcccccctcccccagaccgtaaccctgatttcaaaaccttaactcgtcatgctattgttagtcgctggagctagaggagttttgagcatgatatcttcaaacaaatcaagtgattctaatctataaaaaatctccctgattttaattgaatgccatttagacctagcaggtcgtttggaaagacggagggagggagaataaggttattgttcacatacaaatctccataacaacgctagttgtcaaaaggtgaccggatatgagggttctgtcaaacatgttatgagcagtaaaaaagctgatatgctcaccctccctgatatatatcctcacccaacgatatctcagtaatcatatggaaataaaacttttcgtccttatttttgttcttaagaaacacagtacaaataaagaagcttacaacaccctatgaacacacgcgcacacctacccctatgagtatctctgaaaaactagatggatatatctttagatttaatgaagtcatcacgaatacctcgctgctaacggatactccctccgtcccataaaaaactaacatactaccggatgtgacacatcctagtctatgtccagattcatagtactagaatataccatatccggtcatagattcgttttttatgggacgaagggagtacgttgcctaccattgaaaaaataattagctataaatacgaaccacatatcaagtctagaatttaaaccggataggctgcttccattacaaagaatctaactaattgtgctatgcttacttcgtatcatccctttctatacacacatcgtccgatacatcgctcaacacactgttggtcgggtgagtaaacaaattaacgacagctaggaagatgctgaggcttgcttccttctcatgttgtatggtaaaaataaggacttggcatgtcagactcacgtcaagtgatcacagagtgtgcacacaacaagcatatcattaattctgtcactctacatacaatatatcacgttgagtggttgaggtacgactacacaccttgtctgagtactggcgtggtagtgatcccaccacctctacgagtgatcgaggtatgacaacacaactggtccgagtaccagcgtgtgttgacgagaaacacagcggcataggagatttgctttactccagtgtaggtccaaggcttgcctcgagtgtcaagagcgtgccagatggtttgatcttgcaacaacaagaaagacaaaaaaatcgtaattagatgaacgatagccgattggctgacagagccgatgacgtatcgtcagaatcccgccgatacggttaaaccaaatcggttgcggctttgagatggataaataaaacagaaccctaaatatgtcttatcgtctgtaacgctatctcttttatttttgtcaatcacttttagaaatattatagaaataaccgataatctaatatttagagccagaatagataatgtattggctattactccaatagagacttacataaacagattaatctagataaatataccaaataatgatcaatctcagatacaatgatttgatccagattgattaagacttgatatatatagagtgatctatctgtataagtggcaaatatacataaaaatagattatgagacgtgcactattatgtatattaggtaagatcgactgaaactctgatactatcattaattataattaattccaggttagtatctaagattctaaacaagactagggttgatgcaactcaaagtatgtaaagaaatctaaagtctaaacaatcaagttattaactacttttcaagatggtaaatacctaactaatctaatcttgtaaagcgattgagccgataccggcataaaccctaaagcaagaatcagccgatataactaaatcaaaatactaactagattaactaagatatatgatagtgatgaccacaataaaaagactaatacatctaaaatgacgtaatagccccgatagtgcaaactattgagacaaggtacctcttgtcgagagatcgcaaccgatacccgactcaaagcaagaactcgtcgaaaaaaataaaagaaaagggtagcgatacgccaaaagttgtattgattggattgtcgttccttattacaatgatctggggtttatatttatacccggagtacaaaattcttccattatggacacgactcaaaccttcctaaagataaaaacaaacaagtctacatgacagactcttaccatatctctaattcaaaacgacattaaaatcctaattaatagatacagttgccttaaataagctctatctctatacaacaatgatggttatctcaatcgaggcccaaaccgagcccaagttgagctatatcggctgctttccatatcggctcaatcaaactccgaatatgtttctagccgatgcacaatctgttttggcaagattcaatctccttcaaatccgcttcggtatccaactccaaatcctagtctatcttgccaaatttcactgttaacagcgtggtagcgatcccaccgctctacgagtcctctacgagtggtagaggtacgactacacacctggtccgagtaccagcgtgatagcgatctcacctcctctatgagttctttacgagtggtcaaggtacaactacacacctggattgagtactggtgtggtatcgaccccaccacctctatgagtcctctataagtggacaaggtaccactacacacctggtctgagtaccagtgtagtagcgatcccgtcgcctctattagtggtcgaggtacaactacacgtctggttcgagtaccagcgttgtagtgatcttcgagccgcctctatgagtggtcgggttgtagagggtacgactacaacctggtcctcgactagcgttgtagcgatcctcgagccgccttcacgagcggtcgagtatgactacaacctgatcctcgactagcattgtagcaatcctcgagtcgcctccatgagtggttgggtacgactacaactttgtcctcgacagcgttgtaatgattctcgacccgcctctatgagtggtcgggtacaactacgtacaccttgtccttggccagtggttgtagtgattctcccaccacatctacaagtggtcgggtatgactacactagttctcggctagtggttatagcgatcagcccaccacttctacgagtggccgagtacaactacacatatggtcctcgctcgaccagtatgtgtagcgatcctactacccccatgaattaatccatgtaagtttttatacatatcaaatgtgcaatatttgtcagagtatcatgttttctcatatcgctactggttggattcaattcttatactcgtattatgttaagtccgacaagtcatcgggttccctaaaccttggccgaggatgctcggtgctattggactagtcgggttgctaagggtcagacaaccagtgaaatgtgtagtggcttgattttttgttgtaagatagccaatgatgagtaatgttgctgattatttgtgatgcttatgaacatatttttcctgctgatttgtgttatgccattgtatctatggctacaaatagaagttattgataaggccagatacaatagtgcgttcttttaaattgatactgacagatacacacttgattaatagtgcttatttgtgatgcataagaacagatatgcctgcacttgacccttattcgatatggtcaggcaaccaaacatgtttctgtctttctgtgatttttctcagtattttatagttcaaatgatctcagcggaactgaggccacctctacacttgaactgagcagaatttatgtgagtacatgaacatatttttctacacttgtttttttgcttgctgttaggctgggtaagacagcaaatgatgatatatgctgctgtttgtgatgcatgtgaatagattttgttctacacttgttctctttttcttgctgtttcttttttcctgcgcttggtcttattttccttttcctagcttgtaccttttcttttgctacatttgatagatactggtaagaacagatacaaatgatagtagctacttcctccgtttcacagtgtaagtcattctagcatttcccacattcatattaatgttgataaatctagacatatatatctatctagattcattaacatcaatatgaatgtgggaaatgctagaatgacttatattgtgaaacggaggaagtaattcacattcttcatatatctgaggccattgttctgcatttatttacttgttggaaatgaggctcaatgatgtcaaatttctgcgcatatttgctacattttcgagttattgatgttaggaaaatactatcaagttccttgttcatcttttcatatcaacatatgtactcatttcttttagtaaccacacttgattttgacatgatcaagtttttgataagaaaccgatatactctgcacttgctctttttggtaaagatcatactactattaagtgttgatgctcttgcaccctgatctctgcaactcagatcctgtattatttcaaaggtacaggttatcctgtttacttttactatgtttcaggaaaatgtgataatggaaaaacttgtgagaccaagtgtagatatactaaggttgatgtgtttgaagcaatctgtacaaaagcttgcaagcagaacatagctgaaacagatggttttagttttgtatgcggttactaatttgcttatcaaattggttccttgttttaaaaaacttgccatgggcacgtatatttgtatgtttgttttgaattgtcaaatgtaccagtgttgtcaatgaaattatgtacatgatttttgctataataatcactctcttgcgtgttcatctagtaagccaggccattccgtaacatttgttaaaaaaaaatgatcatcagtgctgctcattggttttaaaaaatgacaatatcattaaaacgtacatacacattacatcgattctccatgagaaaaatgagctccgaagtattagtaggtgggcatacccacagagtgacacaatttaatctataacctctactacagattaactttaccacacataaatagatttagggacttagaaaaaacctcgcatcacaaactttatggggtaacctcaccacccacaagaataggtattgtcataataccacatacctaatagtagttaactaagctcggcagggcccaccatgtaacaagtcttatacgaaatcatacctcgtatatagaaggagttccggataaggaaggacaaatagagttctatattaaaactataaggactactcggattatatccatattggtctctctagttctacttgtataaggggacacctatgggtataaatagaccccctaggaggagggggaggaaacaacaacaacaacagatcgacacacaatacacacgccaagacaagccgccggttatcgacatcagagataagcctagacaaacccaatatggtgtctgtggaggccaacaagagggatctagcgctatatctgatcttgctgagtttggattcaaggaagactaccccattgtcgactacgtgatagtatttcaggcagtcaagtcgacaacggttagataggttatcccaaatattatactagtgtgattatgatgaataagagcaacaccggctttggccaataggagtattactgtcagataagggacccgaacatgtataaaaatccttgtctccatctcttttacttcaatctcgtatataccctggtaccaacgatccccatactatgcaaaataccatagttgcgatctcaaacgtcgacaggtatttgcacacaagatgtatccatccaaccaaacaacatctcctgcatgctaccgtttcatccgccccttgctgcaaccaaccaaacaacatctcatcatatccaggtttatctcatgcaagcaaccaaacacatgcatgtgtatcccctaaaccaggctaaacttagcctggatgagagagatgagccagactagagggataagagcaaccaaacacacccgtaatattgtacgtgagatagagaaagaaaagtctattgtgcgaatatgagcatgcattcttatcacaagaatgccccactctttcctttcttggcaccatgttttttctttcttggtaagtttgtacggtgaaagtttatgtccgattcagaatggaaagttttacaaaccaaaagttttgtatgtatgattctgatttggagtaaaaaaaatatgtataatgtttctctataaaaaaaattgcatgtataaattttctacgtataaatttttatgatgggataacgctcacgatagatcagaagcacgtgagctagcctgagcctttgggttcttttttatagatccgcccctataggcaaccaaacacggaattcctgtttggcgggtgatcgctgctccatccacccagcgatcaccccctgcctccttcctatactatatactcctccctcctctcctcccttcctcctctccttcttctctttctactagagtacaccacacaaaatattttaaaaaacaaaagttagaaaaatttatgtatagaaatactatataaaaaaaatttgaattcaaatttaaatttgaattgggcatgtaattttttgacttataaactttggatttataaactttaggtgtataaactttagatgtatagaaatactatatatagaaaatatttgaattcaaattttgaatataattcaaattcaaatttgaatcgggtatataaactttaggtctttaaatttaggtgtataaactttagatgtatagaaatactatatatgaaaaatatttgaattcaaattcaaatttgaatcggatatttgaattcaaattcaaattcaaatttaaatcggatataattcaaatttaaatttgaataggatatataaacttttaacttataaactttaggtctataaactttaggtgtataaactttagatgtacaaaaatactatatatataaaaaaatatttaaatttaaattcaaatttgaatcggatatataaacttttgacttataaacttttggtctctaaactttagatgtgtaaacttgagatgtataaactttagatgcataaatttactaaaatagaaaagtaatacggtaaaaaaaaggaaaccaggtggagggagggagggggaggaggggacctacccgatcgctaccaggtaggtagggcgatcgatcgcccattagaactacccaaccaaacatgtcctacgtgatttgaggccgaaggggtggcgagaatgaaattgagctttttattaaagtagatatttttgattcgttttacaattcagatgcaacagctgtatcactgacatacaatttgacttacaaagtctcttttataagatgcatcatggaaagaaaatagcgcatttgggaccgtatggagtatgatgcaatatatatgcttgtttgtccaagcattcgggaccaattgaccagatcaagtctttatgtacttcagctgcatagtccaattataacacatgttttattaagggactttctagacaaaggtcagtttttttttgaagtccctcaagctgcgcgtgcgcagcaactactcttactcaaatacttggttctctagggtccaatcttctattgattttttttcattcatttcagcgcttgtagcggtaatccttcggataatcttgaagagcctttatatatagtatatatatattcactctgtcctaaaatataaaatataagtacttttagactctaacgcggtctccgaaatactactttgaccaataatatctataaaaataaataaaataagttatatattacgatagtttatttaacgataaatctagtaacatcaatttcacataattgattattttctttttgctattaatagttaaagttgaaaatgtttgaacttgtcactatgctaaaaatgtttatatttcgtaacggagggattaaaaaaaaacaacggacggaaggttctcgttgtctaatcatgtgccgcgtagtaacacatatatagtcactcactgacatctctaaaattcagccctcgaatcatatggaaacatatggaaaccacatgactttccatcgttgtctgctcaacacaccgttggttgggagagtataatacgtacgactcctgagactttgcttccgacctgctacgcgataacaccaaaaacaattactttgggctcgtttggtttggagttaatttttgccctatcaaaatcttgttagtgtcaaaatattgacaaatattgacactaccaaattaagtagtattcaatttaaattattatgagtaaaatttgatagcaaaccaaacatgctactattgaaattagtaaaattttggtatggtaataatttagaatcaaaccaaacaggcccttcatttccatgtcgagtctcatgctcacttaacccacaagtgaagtagatcccaaaatattactaggagaaaatttaacccatcgtagaataacgaatatggatagacctctgtctagattcatggttctaggatagattaaatctcatcataaattgtaaaattttgggatgaacaaaataactacatagccgaaagttcaactgatagaaaactaatataattgcaataaaaccgagcaatcaaatgggtagggagtagggatggacagaaaggtcatgacttttgttagctcgctcagtttagctcgactcgtttcattttcttaaagagctaagctgacatttaagctcggtatagacaacgagccagctcagctcgtgagtcttaatgagctagggtagacaacacctcagcatgccacaggtgggttgtttctgcttctgggctgtcggcccaaacaaagagtaacaaaacacgctcaacccaagccactaggcaccagcgccgctcgtcgcccgctcattacgctggcaatgccgctcacgaattttttttattaaaagttttacaaaaaataattttctattttaaaaattaataaaagtggtcgcccgccgccctctggatcgcccttccagagggcggcaaatgtgacatggcagacggccatcgccctttgcaggcggcccccttaccgccctccgcaagggcgattttacactatgcggggggccgcctgcaaataggcggcgagggggcctggaattttgcaggcggccctcttgccgtcctggggaagggcgattttacactgtgcattggatatttttataattattaataggtatacaatcttttatattgaaaactcaatacaagattttagtctccaagattggtgaaatctgtagcgcccgttccgtcgtggcgcctagctggaaaattatctcttaaaaaccctaattgcgaaattgtttccttgcttgttgtttagtgtctgtgccatctcagatctcaaatccccgatctatcgtcgagttcaatcccgaatccaaatacttccaaatcaaatccctccgcaaaagtctattttgcctccccggggtcgatgggccgaatttctctcggcccatct

SEQ ID NO: 24552 - DNA, 23698 bp, Oryza sativa
gcccatctccccctccctcccggcgctcgctctatttctctctcgctctctctccctcctcttcctccgctccgctccgctccgctccgctccgcccgcgcgctgcacgcgcgagcgcccctcctccgctccctccgctctgtccgcgcgtgcgtgagccgccgcgccgagcgcctccctcccccctccgctctgcccgcgcgcgagcgcgtgagccgcccgcgccgagccgagccctcctttctgctccctcgctgccgctccccgcgcgtcgttcgcgtgcgcgcccgcgtggtcgtcgcccgcgtcgcgtctgcgccgcccggccccgctgccctgccgcgcctgcagccgctcggccccgcagccagcgcgcgtgcccgagccgcgccactccatccgccgcgcctcccgttgcaagccgcgcgcgcgtgccgagtggccgaccgcctggtcaccgccatcgtcagcgcctgcccgcgcctgtcgcccgtgtcgccgttccgctccacaccgccccgccgtcatcgccgtcgtcatcgcctcggccccgccactccgcgcgcaagccgccaagggacggaggcagagccctcctccctctgccgcgacgcccccgctcccctcctccttttcccaaagtggcaaggaggcaagccccctttctctccctccttttcccctttttcctcccgccggcgtcatcctccctccgccctgtcgccgatttggacgcgagcgccgagcgccagctcgcgccttgaccgcccaaagtcggtttccaaaaccgacattgccgccctttaaagccccgggcgccctccctctcttcttctctcgttgtcccatcacctccactccattgttgccgcccctctgtttcgccgtcgccgttcgtcgttgcgcgtgtcggaggagccggcacgagcgaggacgcggaaggggactccgggcgctcgtcttcctcctcttccccggcccgaggccggagagattactcccgcgccgtcggcctctcgtcacagcgcccctcctcatctcggtagtgcctccctccgttcttcctcctcgctccatctcctccccttagttttcggtagtagctcgagtagcctccccgtagctagccggcaccgccccgaccgttgccgccgcttgccgtgtgctcgccgccgtcgccgcccgtgttccgtagcacccgctcgtcgccggcctcgctcggggtagctccgctcaatccgacgctagcaacgaattcccgtggccgcgtagatactctcaccgccgggaattggcccctcgtgacctcgtcgccgttttccccttttgctctccgccggttaccgccgccgaaatccgccgccgacggactccctccggcgaatccaagccgttggctcgctccctctcattcttcctcgtcatcccggtgtacgccccgtcgcccctcatcgtcgcaaggcgccccggagaaaccgccgccgcccgccgtccattcgcggccggcgccttcgtcttcctccctccagcccacgtggcagccacgtaggcgccacgtcggcgccagctcggccgaaatcgggtcgggccgaccccggtcagcccctcccgtgcgcgcgttccaccgcgagccgtgaggctgcgcgtgggcccgccgcatcctttccaccgcgaaccgcgcgcgtgcaccgcgtccctcccccgcccgcgcgcgtacgccgcgtgctcactccgcacggtgaaccgagtcaccgtcaagcgggtcccactcgggaccgcgcgtggtgagcccggtccaccggctctctctctcctccctcccgcgcgcgcgcgccttgggccgccttgggccggccggcccatttagctcggccggaccgctccatttctctcgggccgcgccctagccgcctgaggaaaagtctattttccctccctcttttcttttcttttcttttttttttcaaaaaggatttaattaaatcctttttctttagaccaaaaatccaataatcttagaaattcaatatcttcccaaccgtaaatccgtttgactccgttcaacttccaaaattcctcaaatctcgagatctatctaatggcacgcttagaggtcattaatagggctttattttcgccgtttgttgagttgtcccgtttcgcgtgtagtttcggagcccgaagacccgcagtgcgaggatttcgaggatcaagctccagatctcgagcaaggcaagccacctttgaacatattgagcctatatttgaaatttaattatgttacttgaaaaatattatgcattgataggatcgcacttaatctgttgtcccgtctgcaaggcagattggcggacctacctagtttgttgcatttgatccttgttaattgttatgtcatgtccccttgtaaccatctagttgcgtctcgatattcgtgcatcctgtgcgagtatcgacggacgcctccaaacttaaaatctgaataacaacttgggtaaaacttgggttttacaaaagacttggaaaacccgacacctgggtcggtgcttgcgaactaaatgatgttccaaaaccgcggaccggggaacgtaccgggtgtacggtttcccgctcttgcacttaaggaccgtttccttggaatttcattcaaacataagacaagtacaaccacatgggtggaatgggacacccctggctgagtaactagcttatcaggggagccttgatgccgagagacatgtggattcgccggggtggtgtcggggaggacccctgggcttcctggcacagtatggtctgggacctaacctgttgttggtctgggacccctctcgtcggcatatggtaaacctgtgtcggctttggaaatgccttgtcatgaaagcttggaggtctcccgacgtggctgatccccacgggctgggtgatccgggttagtaatgtcgtgtgggtaaagtgtaccccctctgtagaggttaacaatctgttcgaacagccgtgcccacggtcatgggcggatgtgaggtgattcctagcgtagttttggttgactactgcttgtgaaattgctgttgtggaaaggagttcgatgtttgaaaaatctgcagctgatgggatcagctaggcccgggtggccgtttgaaagttgttggctcgggtggccgtttgaaaagctattggccgggtgccaaccttgtttcaattctaaagactgatacattgcacatactccgaccggacgagacgccctgtctcatccgcgtcgtttgagaagcactcacttagttgtttttagaaaagagtttaaataaaatcaattgcaaaaacaacagcctttctttgaagcctgcattaaacacttattccccatggcttgctgagtactctcgtactcacccttactctatataaataattcccccctagttgctgaagaagatgaagcggatcctgctgttgaggagttcttccaggagcaagccggctacgatgagttttagggtttcgacctagttcccaagtcgcgcctgtgttgtttggtccaagtcctggcttccgtttcccttttgtaatgcagttgtgagctcgggatctgtccgcagcccaaaatgactgtacctctactctataataaagagacctctgttgctgtgatatcctgtctccctgtgataccagcactgtttcctgggactggtatcgattaacaggttaatttggagcgtcacgagctagttccggtcgggactagttcggggcgtgacaaaatccaattttatcaattttttattcttatgcatacaaaaatacaccatcataattaaacattgtaatgataagatagttaagaagtgccatcgatacacgatacaaatttaacattgtgcctgatgaaaacaatatctgaaatcgccctcccccagggcgacaagggggccgcctgcaaaattccaggcccctcgctgcccatttgcaggcggccccccggacagtataaaatcgcccttgcggagggcggcaagggggccgcctgcaaatttgcttgacggccgtcgcccgagagcgaacggccgtctgccacgtcacatttgccgtcctatgtgaggacgatttgtgggcgactacttttgtcaatttttgaaatagaaaattgttttttaaaacttttaataaaaaaaattaaaaataaaaaaaattctgccgctcactgcctgtgatgcacgtcttcggcccaccgcacgcctctctctctcatcaaactgtcacggcgtgctcctgtctctcatctcgaactttcacgcaacgcctctctctctcatctcgaaccgctggcccaccacccccaccgtgccattcacggcccgccgctggttgtgtggccgcgccattcacacggattgctccagacaaggttggccgtagtcgacgatccgtactgctagtggggcaatagcaatgctcacttttagggaaaccatctttccttccgatttgtaaccctcatttagtcccggttattcaactagcactatgaatccgagattaaaaataatgatctttagtcccgggtaaaataactagaactaaagatcgatcttaacaccaacctaaacaaaaagatccctatctttagtcccggttggagttaccaaccgggactaaagagaggataacagcagtccagatgatcccatttcttcttttttttttattttctcctgaatcaagtggcatgcatatctccaaatcccaaatcaaagtagcatcccaaatccacatcacaaatcttaaagttatttatacacataaatcaaatacatcgcatatcctaaaaaaaaattacatacaaatcaaattacatcacaagttctataaaattcattgtaaatacatcacaaattcatatcgcacacaaatcaaatacatcacaggatcatgcaataaatcataaattctaaaaaaaaaaaccacagaggcgccgcccggctggccgctgccgccttctctccgcgccggccggccactgccgtgcagcgtcgcccgccactgcgtcaccgcccgctgccgcgctgccgcgtcggccgccgccccaccgtgcggccctgcgcgctgccgcccgctgccgcgccatccgccccccggccgacccgctctctcgctcgatccaaaaaaaagaggaaggaagaaagagataaggcaggagttagagaggaagaaagaaagaaagagatagagtttgttgtgtggacgagagagaggataagtaatagggattatatagtacgtgatgatttttattcccgttagtaacaccaacaggactaaagttaaatctttagtcccggttggtgttataaaccgggactaaagatcctaggcgcctgacacggtctgacatggaaccaactaggactaaaaataatctttagtcccggttggttttaccaatcgggactaaagatcatttttagtcctggttggtaacaccaaccgggaataaagatcatctagtcctgttgttcttataaaccgggactaaaaatcatttttagtcccgatttttaatagaaccgggactattgtagatttgggtcgaccgaccaaagatggtttctccaccagtgggtggcttcagtatcacgagttaatgcctccatgtccttggtgtgatatccgaattccataatcactttcctttatggtttatccaagtatcctagacttttagtctcttagatttgtgcagtaccactcatgtagtgatgtactcatgtgaactcaatctgaaattatttagctttgaattaatatcactttacctaggcacctagcactccaccagctaataattagtttatctgtgtatgaatttgggcatgaaatggtggtcgtgtcaaatggggggagggggaggatgaagagaacaactttgagatggacgaaagatgtcagtaagcctaccttcttagcgtaagtgagggagagaatggagataagaagtcaaaggctcatagattaggagtaaaaaggccaaagggaggtatttcactgtctccttccaagtgcaaagtaacgagaggaaagcgggctggttgttggaaataatttaaggtgatcaatgttccctacaagaaggagaatgggaaaatggaaacaaaggcaaagtgcatgttttgtcatcatgctatgcttgtcacgtcccgactttcgttcgggattaaaaatcaattaataatgtatttctagaaattaaattaaaagtttaagcaatttaatcaagtgaaagattgggagaattaaagattttcctctaaaaatcatggccaggagtattttgaaatattctttgtgccctaaaaatactctccagatttttccgtgaattttcggagctcaagaagtaattataataataaaaagttcatttaatcaatttaaataaaaagaaaacaaattaaaccggcctcctctccccgagccaccgacaggtgggccccacccgtcggggccatcccctacctccggctacccctcaaccgccgccatggtctccccacgtcgccgccgattccgccctctcctccacccgcgcgctcaccctcatcgcggggccacgtcgccccacctcctccacactccttcccccacttgcccccaaaatccggcacctaatcgccgccgccacccctcgatgtcgccccacttcctcgccggttgttgccgcccttccccggccatgcccgtgactcccgagcgctataaaaagcttccctgtgccatcctctctctttttccccattcgcccgagctcccatcgcgccctctcgagctccccgtgtcgctcctctctctccgccgttgctggtgatctccagccaccactcgccgccatcctagccatcgtcgcgtcgcgcggccaccaccaccggcttcgccgccgcgagatcaagcttggccaccacatttcctccccaaaccgccgcccgaacgccgctcccactgccgacccgagccccaccaccacccgccgtctccggccgcctattgccgccatccccgtccacctcaggctgtgccaccatgttgacgaccaaatttggaaatatcagtatcggagatgaagattagatcgaagcggaatcaaagataagggttatcgcggaaacagagtaagaatcggctggagtccggatcggctacgattgggatcggctaagtccgagtcagactgggttaggtgatgcagccgattctgacaatacgacttgtgtacaacatcgggttgagttgatatgcttcaagatgattgccacgcatggatagagtcctgagaagacaattatatctattaattaggatattttatgtaatttccttagagataagtgtcacgcccagaaattcacgaaccagaatttctaagctgaatgtgcattaaatccctgtccaggactagccagggtacacaaacgacaattgttgacatacagatccatgtcttacaaaaatataaaagtttacaaatgcagcggaaaagataaaacgaagtaaactcggaagcttgacttcagcagaggggcgactccattccacaggcaatccttgacgacagcgacgaaaccaacctctctgagacggctccaactagaaagatcttcagctctggtgtgggggaaaagagagcaagactgagtactacccactgtactcagcaagtcataccggaagaggaggtataatgcaggatataaccaaaggaagctaggggttcttttgcataaagcaggcatttcaaagcagtagttgaaagcagtacaacagttgtagtaattaatcaatattaaccaatcactgtccaacgctacaccacgttgcaacaggcccaaccaaccacctgaactacaccagttcattaagctaaactaggggtgagactaatcacggtgaatctggttgatcacctataaccgcgggcacggctattcgaatagttttactctggccagaggtgtacaactgtacccacaagacacgattccacacatgtcgccatgccccgaagtatcaccatgatattgcaaagggggaaatcgtgacaaaaccctccacataaccctcccctaaccatccacaccacgctaaggtttcacccccacccctcaaaaggcagtgggcggtcccctcttgcgccgcggtgaatccggtagctggataaccggacaccccggccgacccaactccatcacgcccaccctcgccaccggtgcctaggaaagggtcgagctatacttcagatcaagcagttacccactcccgcttgtggtaagcacggtaagtctcccagggtttcccgtgaaccggtccttaactgccatgggtgcgaccagcaaaaccatgcacccacaacccaccattcagtgtattttaattaactaacaccattgcggtggcaccaatccaaaactatgctcatagccaaagtctatgtaataatgtgatctccatttgtgtactagttgagctaagcatggctaagcatttcctaaaccaacatctaatcattttgatacccaagttatcaatggcatatggtaaacaataaatggctgagtaataggacccatcccacattacattgtaaaagaatgcaacatttaatagaaatgcgggatatttgtaaattgggtacaatatgatcaattgtaatgcatgacttgccttgctctcgcactgatgagaccacagcaacgtcttcgagaaaccgcggatcgacgaaatggccgaaaactacgcgacaaacaaagcacacaagcaaaacatgctataagactactgaaacaggaaacaaaaccatttttaatggattctttgtatttttcttgatttactgagacttgaatggacttaaacggagctcggatgaattacttatgaattttagaagataaactgtgtttttactaataaagaaaaagtctttaattaattattgcgcaataacacccagggctgacgtcatccaagggggggcggtgccgacaggtggggcccacgggtcagcggctcaaagggggtcggtccaccgtggaccgggaccacgcgggtggtccaccgccggtccactggaccgacggtccagatcggccgggaggccgatcggacggcacggcggcggctaggcacggctcggctcggcttcaaaaccggccggccggccatgacaaccggcggcgacgcgcacggtcgccggcgatggcaatcggcggcgcgggaagcgacggcggacggggtacaggactgcggcatcgaccaaaggcgacggcgagcgcgtggagagaggcggcgcaaacgagagagaggggaagaggtaggaggggggatcctcaccggcgagtatgtcggccggagcggaggatgaaggtggcggcgacgacccagcgatgtggaggggcggacgggcggcggcggcacctacggagggagttgagaaggattaggagtagagagagtgaccacggtggccaccattgttggccggagacgaaggagaatggatagctcaccgtcgtgcgaggagaaccgggctccggtggggtttagcggaaaccgagcggcgaccgaggtggctcacgcggcggcaatgctaatggcggcagcggcttggcgcggcggcggctctagcggctacggcgcgcgaccggatgtggcggcaagcggcggcgctagtggcgagcggcgcggcggcggtaggaggcacgggagagcgcggcgaaaaaaggaaaagggagagggggatgcagggaagctttataggggctcgagaggggcggacttggccgggaaaccccccgatttggccggcgacgtgggggaagagagagagagagtggggggtgggaattcaaatcgaatcccacccatttgcgggcgcgcgcgcgggcgagaatggcggggagggcggcgacgtggggacgtggagtgggggcgtggcgtggagcagagaaggcggcgacgcggacggtttcggcggcggttgccgtcgtggggcgggcggctagaggaaggggacgacctgacaggtgggccccacctgtcagcgtcccggagagaggggaaaggggaacgggccggcccaaaggaaggaggccgagcgcgggagggagtgggccgacggcccaatagagaaaaaagaaggaaaagaaaaagaaaaagaagaaaggatttttcctgggatttaaaattgcactttggtgatttttaattggttaaaattattttcaaggctctgaaaattccactaaaaatcctgttaatatattggagcatgggggaactcaagaaaaattccaccacgctatttccgattattaattgcatttattaattatggaattagctctaggttaattaaacaatttctttgcgcaatttatttaaccaattcttaaagcaagaaaaaggggaaacttctgggcgtgacaataagtgtgggcaaaagtctgccgtaaagacttatggtatcttagagtttgtttgagataatagttgtgtccgatatggacatatcttgtaattctcgggtataaatagaccccgaaccccatgtatcaattaattgacgttcaatacaatctcggcgcatcaccaccctttttactttcgttttgtttcgacgagtttttgttttcaggttgagctgcatcggtttcaatcttcaacaagaggtaaaacttgttatggcggcttgcgttctcgagattagtgcttccatcttaatgataatctaatcttgtctatgtaattcgtcgagttatcatatatcttatataatctttgataatatcgtcatctaacctataatcggctaacatctgttagtagaaggcagccgattaggttaaatagcgacgttagcttagattatgtaggatatctaccactctatgaaacttccaatggcttgattgtctagatatcgtccttcttttcatacttatagctacatcagttgagtttgatcttataagtcgtgattagaatctcaatctctagcctgcttcttggttgccgattagggtattatcggggtttcagccgatcttacctgatttaactataattattctatatgcttgattgacatgttaaatctgccctttatattaagatcttgttgcatttaagtatattaggccatcatttaatatattctatccgctttaatatcttaatatagagtggtatcggagtattagccgatacatgctagatctatctgatcggctatgctatgaatgtatataatctcattattaatatatattttgatctaagtgattcatactctctcagcaaggtgaccgatctatcccaatcacttgatttaagtatatgtcgatataaggattatatatcgttaatatctacagccgatcgtgtagatttagttctgatttgtttattaatgcttgccgatcgatgtatatatgacatcggcccaaaggtgaatgatatgtcatcggcacctagccgatcggctatcatttatggatttaaccgctgtttctttgtttttgtttcttgttgattgcaggatcaaatcaactggcacgctagcatatccgaaggcgagttttggacctgcactggagttaagcagatctcctaggcctcatgttttctgtcaacacgcttttggcacgcccggtgggaccgattagaagtcagagtcacaacagcaattttctccatggccgagaagcaaccaggatcgccatcgccgaactcggctagtcctggctcttttaaagagaagatctagaagctgggcttatctgagttgatgaagctaacattgtgaccatcactctggataaattgacacctgagcagcaaaaagatcttgatacgatgatgcagcaagcgcgaaatcagttcttgggctcattcacagagacctgcttgggaacacttgtttagaaatacaaagtgaaggtagttgctgatgttcctgggaccagttcttctaaagatggagaagggaaacaagctccaaatggctcggctcagtcgagtgataaaggtgctatagatggttctcaaggagaccaaggtgacggctctcaaggagtgcaaggtgttcaaggtgatggtgctcagggagttcaaggtgaaggccttaatcaaggcagcaatgtggcacagttgcagttcaataacttccaagatcaggttgactatgttgtgcaccatgctttgatcaatcagtctggaatattagtcaacactttgtcaaacatggtgaagtcgatggttgatggttcaatagctgaatatcaagctacgggaccagtttatctgcaaggaggtactttcccgaattatcagctcttaatcactgataatcagcaagccgttcagtcggttccccctaatgcaccatcggctcagccgacggcacaagcatcggctcccgcacctgctgcaccatcatcggcaccgggccagttagtcaatccccggttgttggttagagatcaaccacagcatagtggacagaatgtgaatcggctaacgcaagatcagattgcggctttgttcttacctcctcaatctactgttgacccaccccagcaacagtagattcagcaaacgccaccaaggcaacaggttgtacagccgattcagcaaacacctccgatccaacaggttgtgcagccaattcagtagacgccaccaggacgacaggttttgcaaccaattcagcaagcgccattaaggcaacaggtcattcagccgattcaacagcaaggcttgatgaatgcatcggctgggttcgcaacacctggtggtcagcctaggcaacatgatgcgaatcaagttgtctccgagcatttggttcatcacgtacaaccagatcaaacggtgatacctcaaattgttcccgagcatttggtgcacaatattcaataagactttcaaaattaccaagggggcaatttgaattatcagtatcaacctccgtcaccgcaagttcaatatcagcagggagggtcggctcagcctcagtttgttcctcaatacaatcaattcgagcccatgccacaacaacctcaagttgcacctcagcaacgaccatgggccgatatgattgtggatgtgatgaaggagcagtttgggcttaggccgaaggatgttggaaatttgtagcgacagccttatcatgaatggtttgagagagttcctttgcctactcggtttaaggttccagacttttcaaagttctcaaggcaagatagtacatcgacttatgaagacatcaaccgatttttggccaagtgcggtgaagcatcggctgtggacgccttaagggttaggttgttccaattatccttgtctggatcggcctttacttggttttcctctttaccatatggatcaattaatagttgggccgatttagagaagcaatttcatagctatttctacagtgggattcatgagatgaaattgtctgatctaatagcgatcaagcaaagatatgatgagcctgtgcatgagtatattcagaggtttcgagagatgaggaataagtgctacagcttgagtttgactgatgcccaattagccgatttggcttttcagggtatgattcttccgatcagggagaagttctcatctgaagactttgatagcttgtcgcatcttacacagaaggtaaccttgcatgaacagaggtttgcagaagccatgaagaactcaagaaggttaaccatgtctgtccttacatatatgggtcggataatgatgatgatgatgattctgaaatagcagcagccgagtgggtaagaagcaaaaaagttataccatgccaatgggtgaagaattctggaaaagaggagaggtatgactttgatattaccaaggctgacaagatttttgatttgctactccgagagaagcagattcaacttcccgctggtcacacaattccgtcggctgaagaattgggcaagaagaggtactgcaaatggcataattccgggtctcatactaccaacgattgcaaagtctttaggcagcagattcaagcggctattgagggaggcaagatcaaatttgatgattctaagaagccgatgaaggttgatggcaatccttttcctgtcaatatggtgcatacagctggccgaacagccgatggaggtcgtgcaagaggttttcaggtgaattcgactaaaattattaataaatatcagaggaagtataacaaatagcaggaaaaacattatggagaagatgatgatggctttgatcctcattagggttgggagttccttagattttgttggaatgaaggtatgagactgccatctatcgaggactgtcccggatgcagtgatattgcggagagctcgagccgatcgtatagtacgggcaatcggctgaggcaaacaagagttcctgttcatcaaagattgggtcccgtgaaccaagatcgtggccaggaggacaatgaaaacatgaaaactcaattgtgtccttctggtatctttacaaagaatcagaagaggagggttgaaagattgaggaacagggagcgctttcaggaggtcgaacaagaaatcaatcatcggctgaagaagacaaagccgaggcaggaatgaagcgttaagaatcaagctcctgaagccgatgaggcaaagaagttggcaaaagggaaaagtgttgtaatggcatcagttaacatggtttttaccttgtcagctgaatttgggatcaagcaagccgatgttgacgaagtggaagaagaatggctaagttggttctatcaccagaacaagcagtctttgagaagcctcaggggacagagaatcggcatcttaaaccattgtatataaatggctatgtcaatgggaagccgatgtctaagatgatggtcgatggtggggctgcggtaaatttgatgccttatgctacgttcaggaagttgggcagaaacgctgaagatctcatcaagacaaaaatggtgctcaaagactttggtggcaatccatcggaaaccaaaggggttctaaatgtggagctgacagtcggcagcaaaactatccctaccacattttttgtcgtcgatgggaagggttcttacagtttgttgcatggaagggattggattcatgccaattgtggtattccttcaaccatgcatcaatgcttgattcaatggcaaggcgacaagattgagatcgtgccagccgacaggccagtcaatgttgccagtgccgatttagctctttgggagatggatggtctcaattgcttatctggaaaagtttgggatggagattttttaaaagtgtccgattccgatatacagccaattgaagatggaaaacccaagctattattttgaggatgtcatggagggttcaaatgtctacaccaaggacaaagtagatgatctcgatgacaaacaaggacagggcttcatgtcggccgatgatttggaagaaattgatataggtccaggtgatcgaccgaggccgacatttattagtaagaatttatcttcagaattcagaaccaagttgatagaactgttgaaagaattcagagattgcttcgcttgagataactcaaaggagtgttaatgcaatcaagaagattcagcctccggtgaacaagacagaactacaagagatgatcggcaagataattttgttagaaggtttatttctaatttgtctggacggttagagccttttacaccattgttgagattgaaagccgatcaacagtttacttggggggcagagcaacagaaagccttggacaatattaagggatatcttagctctcctccggttttgattcctccgcagaaagggataccttttcagttatatttgtcggccggtgagaagtcaatcggctcggtcttgattcaggagcttgaagggaaagaaagagttgtattctgcttgagtcgtcggctcttggacgtagaaactagatattcccctgtggagaagttgtgcttgtgcttatatttttcatgtacaaggttaatgcattatctattgtccaatgaatgcactgtcatatgcaaagccgatgttgttaaatatatgttatcggctccaattttgaaaggaagggttggaaaatggatattttccttaactgagtttgatcttcggtatgagtcaccgaaggcgatcaaagggcaagctatagccgatttcattgttgatcatcatgatgattcaatcggctcagttgagattgtgccatggactttattctttgatggatcagtatgtactcatggttgcggtatcggcttagttataatttcccctcggggggcatgttttgagtttgcttatactattaaatcttatgtgaccaataattaagctgagtatgaagcagttctcaaagggttgcagttgttcaaggaagttgaagccgatgctattgaaatcatgggggattctttgctagtaatcagtcaattggcaggagaatatgagtgcaagaatgatacattgatggtttataatgaaaagtgccaagaactgatgaagggatttcggctggttactttgaagcatgtatctcgagagcagaatattgaagctaatgatttggctcaaggggcatcagggtataagccgatgatcaaacacgttaaggttgaggttgctacaataacagccgatgattggagatataatgtacattgatatttgcagaatcaatctcaatcggcttctcggaagttaagatataaagcgttgaagtatactttgttggatgatgagctctattatcggacgattgatggggtgttgcttaaatgtttgagtgccaatcaggctaaggttgcaatcggagaggtttatgagggaacttgtggcactcatcaatcggctcataagatgaagtggttgcttcggcgtgcagggtatttttggccgacgatgctagacgattgtttcaggtattacaaaggatgtcaagattgtcagaaatttgaagcgattcagcgagcaccggcgtcggctatgaatcctatcattaaaccatggccatttagaggttggggaattgatatgatcaggatgattaatccaccatcaagtaaaggacataagtttatattggtggcaaccgattatttcaccaagtgggtagaggcaattcctttgaagaaggttgattctggggatgctatacaatttgttcaagagcatataatctatcgatttggtattcctcaaaccattacaactgatcaaggttcgattttcatgtccgatgagtttgttcagtttgccgatagcatgggtatcaaattgttgaattcttcaccatattatgcgcaaactaatgggcaagccgaggcttctaataagagcttgattaagttgattaagagaaaaattcctgattatcctcggcaatggcatactcgtctagccgaagcatatcggatggcttgtcatggatcgatccaagtccctccctataagcctatttatggacatgaggctgtcttgccatgggaagttagaatcggctcgagaagaacggagttgcaagatgatttgacagccgatgagtattataatcttatggctgatgaaatagaggatttggttcaatcacggatgcgagcccttgcaaaggttactagggataaggaacgaattactcggcattataataagaaagtggtgcccaaagatttttcggaaggagaacttgtgtggaagttgattttgccgattgggactcgggatagcaaattcagcaagtggtcgccgaattgggaaggaccgttccaaatctataaagttgtatctaagggagcttacatgttgcaaggactcgatggagaagtttatggcagagcgctaaatggcaagtacttgaagaaatattacccaagtgtttgggttaatgcatgatcggctgatgttgccgatacatgatagccgatgtatttgcatcgccttgagatggccgatattgtcatatcgcccttagttgtttttctattgtaatcggttgtggtttgccgatgtacaaatggccgatattgttgtattgcccttagttgtttttataattttatcaatgcttttgacattgtaaaattaggggtgcacatatataaaattgcaaagtaccagagtatctttgctgattaaaaaaatttctaaggcctattacacagagagtcaccgagacaaatattgctggatagcagaaatagccctttgtctgatttgttctacttcttcaatggcttgggcatcttgagcatcggttccaggaattacttttaaagacttgtgagctcggcaacattcttggtagctgattttagtcttgccttctgctcttcgacgaattttgggaggtcggccagcttcttatgttctatatctagctcagcattgcattcttcaagttgtgccaagagctcaatcttgcgagtctcgagccgatcaatgttggatttgatcggaccctcagatagctgatcaagcttggacttctcgtcgtgcacaagttgtcgattggcttggattgtggcttcaatatccttgcgctcccgacgttcggctagtcttagcctagctttctccagcttgaattgatgctgctcaagataaacggctggagtaaggatatcggctagctcatctgggattagagcttggatctcgtgtaaccgagtcctgatcggcccacagtttaccaccaagttgtctagcgatgatgcttctagccgatgagagaagtcttcaagggttttctttacatcatcggacaagggaactaaagacttgctggtggtgtcttcttctgtttcttcgtccagataatctttaatgtcgaaagagaacagatcggctaaggcctgcaagaaggaatttgagaatagatgagtatcagcatgagttatatggccgatataaattcttgtgttaaaagacaagacttaccgggattgcaggagcagctggttgtgtttcttcctcaacatggtgactccctgttgacagaaaactccagtgcaggtccaaaactcaccttcggatgtatgagcatgccagttgatttgatcctacaatcaacaagaaacaaaggcaacgaaaccgtgattaaatccataaatgatagccgatcggctaggtgccgatgacatatcatttatctttaggccgatgtcatatgtgcatcgatcggcaaatattaataagcaaatcagaactaaatctactcagtcggttgtagatataaatgatatataacccttatatcaatatatacttaaatcaagtgattgggatagatcggtcaccttgccgagatagtataaatcacttagatcgaaatatatattaatggtgggattatatatattcatagcatagccgatcagatagatctagcatgtatcggctaatactccgatactactctatattaagatattaaagcaaccagaatataccaaacaggggcttaatatacttagatgcaacaagatcttaatataaatggcagatttaacatatcaattaagcatgtagaatagaattagttaaatcaggtaagatcggctgaaactccgatactaatctaatcagcaaccagaaggcaggctagatattatggttctaagcatgacttaatagatcaaactcaactaatgcagcattaagtatgaaaagaacaacaatatctagacaatcaagccgctggatgtttcatagagtgatagatatatcacatagtctaagtcaacatcgttatttaacctaatcagctgccttctattgacaaatgctagccgattataggttagatcacgatattatcaaagattatgtgagatatatgatagctcgacgaattacataaacaagattagagtgtcatgaagatggaagcactaatctcgataactcaagtcgtcataacaagttttacctcttgttgaagatcgaaaccgatgcagctcaacccgaaagcaagaactcctcgaaacaaagcaaaagtaaaagggtggcgatgcgccgaaattgtattgaatgtgtgttcatatttacatagggctcggggtctatttatacccgagaattacaagatacgtccataccggacacgactattatctctaacaaactgtaagataccgtaagtctttgcggcagacttttgcccacatttatctctaaggaatttacatgaaatatcctaattaatagatacaattgccttctcaggactctatccatgtacgacaatcatcttcaagcacatcaactcagacccggcgtcataaatgagtcatattgtcgtaatcggccgtatcacttaacctagtctgactctgacttagccgacctcatccgtggccgatctggactcagccgattcatgctctgttcttgaatcgatcttcacctctaactccgcttcgatccaaccaccctttccgatactgatattaccaaatttggtcgttaacacatgccccccaagtccgggatatttgataatgtttcggattggctgtatacatactccgaaccggtttcgcactttgctgttttctgaccgttatccaagcgctttaaatactaaccgctgcccctgagtaatctcacaccgttactcccgttttcaccgctcaagcgaagctctaccttctctctctccggcgattcctccggcgcaaaagcgatttccaagtgactccatcttcagcgagatctccgcccgcagcgatgtcgtcctctgccagcccatctgatgcgccatcagccgagtatgctgaggtaagtccccatcggctcaatcccttttcttagcagcaaatcaattttattttgccttatatcgctttcctcttctcgaccgctttggatttgtagcatctctccaacctagttgtgattcccagtctatcgcatgaaatctactactttctcggcccagtcggcaatcctgatcccactgagttcatcataggtgaaaccaataggattcccttcagattaaccaacccagatctaagccactagaagaacacctttaaatcttggccgtctctagagaaaacttcacccgagaaaatttggactacatggttcaagcgcatgtcggccagcaaaagagttcactaggacgaaatcggaatcgggcaagcactcgaccttaccatagccaactcagctaaggacgaacccctgatggcagctgcctcttatttctggtcaaacaccatcaatgccttcttgtttaaccatgggccgatgactccaactctcatagatatcagcatgattacgggtttggacgtcacttcatcggctaacgctatgggcttaaacacaaagaatcaatacgacttcaagaccaagagcataggcggctggtcaggctatgtagcagcatacatgggccaggattcgatcacccctcgagaacatgtggctttcttgttaatgtggctagagaaatttctcttttgtggatccagctgcggtcctacaaccaattggcagttcgtaaccgaagccttggaaacgaaaagacaatttcctttaggcaaaatcctcctcggctacttgtaccaaatgctaaataatgcatcggctaagctagctgtcggctcagtagtcggagcaggtggaccatggtggctactgcaatcctggctaaatctggtagtcatgaaagttgtcaatcggccatccgtgacagaagcagaattcccaagactggagccgatcacagatgatgatggagaagaacacactcatcgccgatgtatgtcatatggagaatatgcatccacaccggccgatgctggagcaaagttatcagccgaactgctcaaagactggttttgcagcttctatgagggtattcaaaaagatgctcgagtttgtggtttctttatggagactcaacagacctcgagctcccataggacttcagattcgaagacatcaatcatgaaagataccaaaaatccagggaagtcttcacagttgcaatcactccgtgcatccttcccgtcggcattcatcaagggagaaacatccaagtttcctatgagttttatcatccaatgagttctgccaggcaatttggaatgggccaactcccaatcggcttattctttgccgataagatccaatgccgaggagaaatctcatcaactttaatgatggatcggctgctcaatctccaaggacctcctctaggcagcattgacaacataaagctagcaacctttaggagcaaagtatttgacagatggtggggcgaatggaagttgcacttattccatcaatcaacttctatgtatatgacagacctctttctagatgttgtcccttaaataagtcttaactcacttaattttcatttgaataactgcttagccgattaatccttggctaactttccttttgacttgcagacaacagaatcctctccccctcaccagagcaacagcggcaaggatattgagtatgccccaggattgatccctaacggaggtgggccatctccccccgtcatcggctataatgcccccaagacttcagctcttcttcaagggctcatcagagaaccagccgatgccggcaagaagaggaaaaccagatcttcggccgtaaatatttcagccctagctccaaagaagaaaactaagacaaagaaaaccacaccagctgatgatctgcctgctctagatccatccattgaacaagctctggatgaagaagtaattgaagatgatgttgatgaggccgcagccgaagtaagtgatacagaacaaacaccatcggcttcacccaaacagacccctctaactccttctgctccagtccacttttcaagagtaagcagctctctttgatcccttttataatcattttatcttatggccgattacttacagatttagtaattgcagaaaaagaagactgctatgaagaagaaatcggctgcaacaacatctaaaccagctccaccagtaagatagtctcagtttttcattagtcaattctcagcccattttgtctaacacttgtctctttttagcctcctcctcctccttccccttctatacatcaatcatcaagtgaccagactccatcagctgtaggaagtcaccatgtggaagaagaagttcaaccaactgctcctgctatcccagtaggttttttttacaaaaaacattcaaatcggctatgcccatttaatctctaactctctttaaatcattgctgcaggtcttagccgattttttctcttttgaaatcagagattatcttgatgaaagagaagaagacaccataagcaaagccttagcccctttatccgatgatgtgaagaaagttctagaagatatttctcatcggctagaagcatcatcgctagatagcttggtagttgattgtggctcagttaagactcggcttcatgagattcaagctctaatcccagatgagctagccgatatcctcactccagccgtttaccttgagcaacaccaattcaaactggagaaagccaagttgagactggctgaacgacgggagcgcaaagacattgaagccacaatccaagctaatcggcaacttgtgcacgaagagaagtc

SEQ ID NO: 24553 - DNA, 64090 bp, Oryza sativa
  unsure (1)..(64090): unsure at all n locations
ctccattccacatagtaggttaaaggatgtaaatattggtatttggcctagggtgatcctagcgcggagtgtgtcctgacatacctcaacatccacttaccattgcaagactcaggtatcccatcaccagagaaagcgccgagaacattgttgctgcccattttgtcactgccggataaggctccactctctcgcgcgtgcatggaggaaccggcacttgccgcgtcgccgccaaagagggtgctcccctatctcacgactcttcgaatgttgtgatggcattagatggtgtgtttctggcaaccgaaggatgtggttgtgttcagtcaccaaatcatatatatagctcataatttccttcaactctgtttaatgttattcccatatgaacattgcagccagttcttgtctctactagaggatttttggttagataatctcttttatgttttcctcgataaccagcacttgagcaaacaaaccatctacttgggcccatctgctgcacttttgttattatactgcttcctaacatcaaagccaatcttaccaccatagctaacccaaaatttccaagcctcgtctacacagctaaacttcattccagtcctaggcatccaacatggtgtgctatccattctacaaataaataagaaaaccatctgtgacatatgtttgattggaagatgccccaaaaactgctattgaaaaccaatgaaataataagaatagatgcaagcaacaaaccttcacttctctgcattttggttgatcctactttcctccatctcctgttggctcatatttgtggaagcatctttggcgctaagagaaattgggagataagtagaacacatgatagatagaaatatgcctcaaaatttgttactggaagccaagaaaaccataaaaaaaaatagatgcaagcagcaatcttcacttgcctctctaaagtttggttgatcgtacttctctccatctcctgttcatttatcttcatagatccacttcagtgttgagagaaattggaagaggtatggcatgagagagagaaaatgaaaagactcataggaagcaagtccgtagaaattggaggaaaaaggagtcctgcaaaggttttggcatctaaaatcaacctgggcctactgctcttcccctaaggcccatttcatttttgccttatctaatccagaggatacagatggatggactggattggagctaatgccaccctctgcattagcttctctaatgtagaggacccaaatccccaaactagagttgaaaggccatattttgagcatcggtgcaaaaataggttgtggaggatagattgcaaacttcctacagtgaccacatgagcaacggaaactctaatgagcgatcaatcgccctggctattggctagcaatcgccccattcccccctccctccctccacctggtttcctttttttggcaccgcattacttttctattttagtaaatttatgcacctaaagtttatacacctcaagtttacacatctaaagtttagagaccaaaagtttataagtcaaaagtttatatatccgattcaaatttgaatttgaattcaaatatttttttatatatagtatttctatacatctaaaatttatacacctaaagtttatagacctaaagtttataagtcaaaagtttatatacccgtttcaaatttgaatttgaattatatctgattcaaatttgaatttgaattcaaaaattttctatatatagtatttctatacatctaaaatttatacacctaaagtttatagatccaaagtttataagtcaaaagtttacatacccgattcaaatttgaatttgaatttgaatttgaatttttatatatagtatttctatgggtgaatagccaaagtggtcctccaagtttcatcgaaagctcagtttagtccttgatgtttcaatctatccatattagtcattcaagttttcatcttagttcaaacttatccttgaaccaacaactctcttgataaatgacacttatacccccatcattcacatatataacagaaaattgcatgcttgatttttttttatagaaaatgcatagtaaattatgtaaaacgaaaataaattatgtactagcaaatgtatacgatagtaattgcttaagtttcatgtgcacatgttgaaataataggaaaaacatctgcaatgttatttattcatcttggttttctcttttctatctagtatatagctaaatacaaattaagggcaaaagggacattttctaatagaaatattgactacaaatagccatatggcatattaagtgggcccaaggatgatttcaagccaaaacaaatatttagaggagttatgtggacaaaatgaaacgtgaaggaccaaattgagccttcgatgaaacttgaaggactaaattagctattcatcctatttctatccataattttttctaacttttgtttttttaaaaaaaaattatggtgtactgtaataggaagaaaagatggggaggagaaagggggagaagaggaaggaatcggcatagggggaggggagtgcgggtgatctctcagtaggaccccatgagctactgattgttagttgtggtaaatataagtacatatattaaaacattgttccgcggttgagctttgacccaccggtcagaccaatgaaccaatgaaagcactactgatttgactgctggtccggttattttaactatgcttgcaactggtagcatcttaataatgtgtagtagtatgcatgccttttgtgaccttttaaagccatggttctctctctttctctgaccatttagggcttcagtaaatgctaagtactcaggcaggcagaggtacaagaagacaacattttttttctaataatggaaagaaaaaacaactcctaacatttaacatcttgcactagttattccttgagtccactctaaaggagatcctccactttccctaaagtatatctgttaattttatcttgtactgtatgcgtgtaacagaaaaaagaaaattgttaagttaatcatgcaccaatctagaggcgtattaagctaagtttttgggtaccaaatatgtacttgtccaaagtcaacaacaactaaagaaacgttagcaataacgtgtttgcaaaagagagacttgcaaatggtgtgcatctcaagaagagagacttgcatagtctcttctagtaatcatatagtaacacttgctaggacaactctaacattgtgcctacctgcagaatatctcagctcagcagcgatatggagggagccatggtaagcgctctgacgggggcactgaactctcttctcttcaagctcaatgacctgctcggaagcgaacacaaatctctcaaagggttaaggggggagatcaggttcctcgagagcgagcttcgcagcatgaactcgatgcttgagaggctcgcagacatggaggaaatcgatgcccagacaaaggagtagagggacagggtgcgggagatggcctacgacatcgaggattgcatcgacctcttcgtgcatcacctcggctccctcaccgggaaagccggggtcatcaagaagatggcatggagaatcaaggggctacagttgtcgcatcggatcagcgggcggatacaagagctgaaggctcgtgtcatggacgagagcgatcggtacagaaggtacgacacgatgaacatctccagcatgagctctgaagcacatctgcacagagatgcctccggttctagaactagatcagttgatcctcgattgtccgctctctacacggaggcggagagacttgttggaatcgatggaccaaaggataagatcatcaaatggctaatggatacgcaaggaggcatctcacaacggctcagaacaatggcgatcgttgggtgtggaggtttgggcaagaccacacttgcaaaccaagtttaccttgaagttaaaaatcagtttgattgcagcgcttttgtgaccgtgtcgcaaaatcctgacgtgaagcatgttctggcaaaattcctctctgatgtttccggggccattggtggtgcattggctgatgaacatcacttaatcaacaagctaagagaatacctccaggataaaaggtatgttgggtttcagttttggattctagaaccaatgttttcttacgacaaaaggagcataaattaatcaatttcttttactattaattttggtgccttttaagtattgaggtaccgaaatgtagaaacgatacaattagcatccttagaagataagttgtagaaacaatacaggctcaaatgatgttccctttctattgctttttggaacaaacttttctgtatcaatacatccttggttgataattaaaagtcatgtgaaacagatattttcttgtcattgatgatatatgggatgcacaaacttggagaataattgagtgtgcattggtcaagaacagtcaaggtagcagaatagtcaccacaacacgtataaatgaaatagctaaatcttgctgctgctcttatggtgatcaagtatatgaaatgaaagctctttgtgctactgactccaaaagattgtttttcagaagaattttcaattctgatgaaaggtgccctcctcaattgagggaagctgccaataacatattgagaaagtgcggtggcttaccattggctattatttctatatcaagtttgctggctaccaaaccaaaatcattagaccagtgggataaggtgaaaagtcgaattaattatacacaagaaaacagtccagatattgaaacaatggcatgggttttatctctcagctactttgatcttcctcatcatctaaagacatgtttaatgtatttgagtatatttccagaagattatgtgataaagaaagagcgtctaataggtagatggattgctgaaggattcattcatgcaaaacaaggggaaagcctatatgagataggagagaattatttcaatgagctcatcaataggagcttgctccagccagtagacatagaggatgatggtcaggtgcatgcttgccgagtgcacgataccatccttgatttcgtcgtgtccagatcaaatgaagaaaattttgttactatggttggtgcttcagatctcacatctactccaactggcaagattcgtcgcctatcattccataaaaacagtgaaggaagtgtcacaatgccaacatacctgctcagatcccatgtccggtcattgacgacatttttgcacgctggacaggtgcctcctcttctgggtttttatggtctgcgtgtgttggaccttgaaaattgtagtggattgaaaaaccatgatcttaaaagtataggaagactaattcagttgaggtatctgaacatcaaagggacagatataagtgatctgccatgtcagatacgggaacttcaatatctggagacattagacatcagatcaactcatgtgaaagaattgccttcagcaattgttcagcttcaacggttggcgcatctgcttgttgattgccatgttaaactacctgatggaattggaaatatgcaagcattggaagagctaacaggtttctctgttttcatgtatccttcaacatttctgcaagagataggaaagatctccagtctaagggtgttgagggtagtttggaactacgtcgactttcaaggaaatgcagaaacttacagggaaaatctggccatttctctcaccaagctaggcacatgctaccttgagtctctttctcttgatatccatggacatgacgaggaagacgatttctcactacatttgtggacccttgctccttgtagactccggaaattatacattggtcgatggcatcccatttccaggataccaaactggactgaatcccttgcaaaccttcagtacttgcatatatatgtcaaaagaattaaccaagaagatctgaggatgcttggaagcataccttctctcctcactctatacctattctccgatgaggcccctaaagagaagctcaccatcagtagccaaggattccaatctctaacattctttaagattcactgctatcatatgggattggtttttgaggcaggatctatggcaaagctcgagtaccttcatatcctgatcagtgcatttcaagtgaagtcttgggatggcagctttgattttgggattcagcatctctactgcctcaccaaggtgtatgcctatattaactgttatggcttgaccgctgaggaggctgaagctgcagtgaatgccattatgatttctgttgacacgatccctaattgtcccaagctgcagattgataggcgatatgcacccttgtgatgaagaataaatattttttttttgctaactgatgcacatactgctgctgtgatctcaattgttacatctatttttcacttccatatatagctttgctcctgtaatttctttcagcagtatcaaattaaagggcttgaggtttggcaatgatttggtccaaagacttcatttcatttaaatggatgttccaattaatctttcttgcatatatttgttcaataaccaaagggagagaacggttacaaaaatcaaaaaagaaaaaaaatcaaactaccaagcctgagttaacttgaagaccctccttgtggtctgaccacagttaaacttttaaaagttcaggaccacaatttagttcagctagactagcactagacaattagaccaccagcctaaaaacagtcatttataactccagttgactcaatatttagactatagagaaaagcaagatgaaatgttcaaaaacatttctggtgtggcggatatcatttgtactggataagggggcatctgtttgttagtaattgttttttttccttacctatcaacctcattttttaacttgtatatcaacattcaacatcttacatgtcgattttttttttgggttgaaacaactcaagttacttttctgaagaattggtactttattgtagatcatgctaataaaaaaattataacatttttggtaaaagaaaatatagcctagataagcataaaaataaatctagattaatgtagtaaatgaaaaacaaagaaatttaaaagtcacactcaatttgtactaaaatttgcagttttttttaacattgtgcgtgtgtaaggatgtttgttacacaagattaattgactaaggcgcagggatttgtggctaaagcgcagggggcagtgggaaactgcacaagaaagaaaagttgcctgagagtaaaggagctcattggtgtgggagaacggagaagaggaccacacctccgactcctccccatctagctagtgtcatattttatctcttagtcctgccgacacatggctcactggttcaaagtgcaatacattggtaccaatacctagccataagtgaaaattattggttaggggtagcccaaaatgaaactttggtaaatatgcctatccttacatacaattcactcttagaacttctgaattattactctttccttagccatccacatgcattcgtagattttctgattcttcttttgatatttaaaaaggctacaaacatttgcatcattttcctaatctttagttattcagccttgcttttgaattttttaagagtaccctttttctcagatggttatggtgtattggcataaaaagaatgtccaggacatatcatgaagattatccatattcagccgaaaactagaaaatacatgtgtggaactcagaataatagcacttctcatagcctaactgaaagaagggtagaaagatatgtcatcaatcaccgcacggtcgtttggtgtcactgaaaaaagatagttgacattattggtatgtacttaggcctaaagggaacaataattctaagattacatcatcttattaaccacatatagcacactgattttaaacaatttggattgtgaataaaaaactcctacgtgtgaagaagcagcagtaaagtggggaaacaattagcatgtacctgaaaccctaagaaagttaagacatcaaagtcatatgcaatattgcagcattatataatgaatggatggtgagcggcgctgccaatgtaccagttcgagaataagctaaccctgtgatacatccgatgacaaacaactggaatgaattatttatggagaagtgtgctatgctgaacatgagtgaactgacaattacggcatccttccatttcattgaggatgacagggctgttaggaggaatccacggtaaatggtttcttctgacaatggagcaatcacacagtataggaaaacacacaatagcctagaggttggactgtcagaaagtatttcccttaacataggatcatatgtatcctgcagtagaatcgaaacaaagaattagcaccttactaattgaaatataaaagtatggtattgtaattgagcaagcctgataataggcctgacgtggaacttcttgaattgcatctgacctcaagacctatcaatctgtcagctactacggttgtgagtgaaaccacggtcatcagaaatatcaaacctagcacagtttcttttacccagctgtgttgtggataaagcttcccttgaaagaaggcccaaagtttatgatcctttttcgtggagtactgcaatagtgctaaagccaaagtaagctctgtcaattgaagaacgaccgtggaagaaacctaaaatgaactaagcagttaaaataatgtatattaagatgaatcaatcaaaacgaagtactaaaaaatcgataccacttactgtggtgagtggatcaagtgaagggcaatgtagcagttcggccactacaccaagccctccaaagctgaaagggatatgaaagataaagaaataagctgcaaatgttctccatatatcctcgacctcccaaggaatatttggagagagcaccgaaaactcctgaaatatcatcacaatgcatcattttacaatgatttctagtttagaatcacaactgcaatttcacatcataattaattgcagatatcatagcctggagaccaaattgaagttgtcaaccttatagaggaaactgggcaaccaaccaggcatcgggacgtgtcaatcatactagaccaacagaatcacgaatttcactccaagatcatttcaaaccacaagtatatctctaccatcctatttttagatgttcatagagaaattcttctaatgcggtaaaagcacctcaaggagatgtcaagaactaccaaacatgatacgccggtaagcaagcaaaaaagtcgatcatgcaactacccgagggaggcattacatcgaacagttggcgggcaccgtcctcgtcgccaccgggggagggagagggagagcatgagcagccgagaaagcgacgacgcaggagcgggagcgtggtcggagccccgagctccgccgcccagatacgaggaggagccccgccgccgcagcctccgggcctgcagtggggaaggcgacgcgacggggcgtgagctgccgctgccccggcggccaagagcatctcgcaactgaagtggcgcgcgcgcgtgaaccgctcgtctctgaagtctaatccttcatgtcgctgctgccaaaggtgggtcttttttataataaaaaaaatcaatttaggctatattttgttagcgatgttttagtttagaccatcgaattcttttctcaagcatataaataatctcaaatatgttggcttataatcgacaatgaacttttatagctatatgtaatatcatttcttctacgtatgacaaatagggtgtagatgtataaaagagttgaggagtggtctaaggccccgtttgctagggctccaaactccaactccagtgagagctagctcctattggagttgaagactcgttaaaaagtgtttggcaagtttcagctctaaatctgaaaaaaaagaaaaaaatgaaaaaagaaaacccagccgccggccgcgcgttgccagcccgccggccgttcgccgtccccaggcgctccgccggccgccagccgccatcatccccaggcacgctgcgcgccgccggccgttcaccgcccccgcagctaggttggatcgggaggaagatgggggatgagaaagaacggtaggagaggaggagtgaagggtagttgagtggaatttttgtgtaaatagaccaaaaaattaaagggtagtgggttttttggggtggagtagagttgtagagcagcaaaaacccagctccacccacgtagttcattttctaggagtagctctgctacctccacttcaaaaaagggaggatctggaccgtttgtcatagtttcggctccaggtaagttggagttgggagctagagctgtgccaaacggggcctaaagtgccacaaaggttaaaaataagataaaaaaaacattggttaaagggtgattcgaagcaaaacatcaataataaaagatgattcaaagtgaaatttactctttttcagtggagcaaaaggtggttatttggttggctacttggctcatttggtttgaggcaatatttctcatatttgacacttaagaaatttcattggaaaatggctacactcggtacgtttggcagagtactaacgagaaaaataacagatagataattgtcaagagacacttagtcctggacaaatcggggataagcaggaaaatattttttcccacctatcctaagaatgagatgggtttgaaatgtaaagtctaatattttgatatgaataatgtggatttgctgaagacctgaagttgattctaagacatgttgtctgtgcatactccctctgtccccaaaaatagtgattcctggatgcccgaggtaattttagctaccattatcaaagaccaaaatacccttgtataagtacaacatccattccatcattcaaataaaaaaacaaacttccgtgcacaagtactactctcgtgcagagtgcgtgtgtgaatgagagagggagtagacgagagaaacgagagagagaggagagaagtttgcgtgaacaagtgggtagactgctatcctggttgctctgctgtgactgtactgctatctcatttaatgcatcacagatcgcttttttctatgacaaatgctcctcttcagaaattgattctttttaggacaaaggaactagatatttaggagcgatacgaggctgaaaagttgtcttgcacatgttgtggcattactaatatatatacttgattgaattatgaacaattctttataaggattattaaataatatatattttaaaatttagaaatagcttcaaacaagccatctatgcaatatcggtgtagaaatttacagatagtattggtactaggggcggcgtctagggatagtttgggaaccaaccataagtcataagctgaaaataacatgttatccactcatggagcatcccaccaatctagaggtggtggtaggataatatactcatcaccaccaagggggtgtttagattcaggggtgtaaagttttgacgtgtcacatcgggtattatatagagcgtcgcatgggtgttcgggcagtaataaaaaaactaattacaaaattcgtcaataaaccacaagacgaatttattaagcctaattaatccgtcattagcaaatgtttactgtagcaccacattgtcaaatcatggagcaattagccttaaaagattcgtctcacaaattagtcgcaatctgtgcaattagttattattttagcctatatttaatacttcatacagatgttcaaatgttcgatgtgatagggtgaaaatttttgcggtgggatctaaacagggcccaagttctttcatacagtaaagattgaaatataagtaagaacacatccattttctttgggatgctgaaagcctgaacttaccagccatgtttctatctcttttcagaccttttcttggtgttaacatcgtaaacagaaaggaacagcttttaaagtctacttcgttattaaccagaggttttggaatccggttacagcaacaaaaattcgggttccaccaaaatggacgaattttggaaattttggctgaaatttgaaccaaatgtgacaaatttgaccaaaaccaaaccaatttcagatgaaatgggagtgaaatggtgtctcgaacctcacagaaatgggcgaaattcgcccaaattcggacctttcagtccaaatcccagaaccgttaagaaaacaggaaagttcaccgcaataaacatactcaagacatttaccacaaagggacaatctgttctcccacaaggtaccgcatcaatccatcacacaaattaacaaacatcacaggcaaattatctcctttcaaatctactacagatgccaagtgcatcttattaagttttcccagctaatttgttttagaagtaatttctcccagctaattaagcagatatgagttgcatctccacttcatcctgtaatttcttgcagctttcctaggggacagaagatcctgcaatatttgtgatgctttgtctgaagaactcttcaacttctgcggcatcctcaggaagtggcatctcatccatcagcagcttgacagcaaatgtgatacacatgtcccattcggacggctctccgtatatcgatgctagggctgcttctgcacctgaaacacctgaaacaagaaaatttttaccaggactgttttgatccagagctgaagttgttcagtgtaaagcttaccattgtctgctttgttctccataggattggtggcaccagtggcatgctgatcaagagcactggcagctgcaccattgctgtccttgaggccagctccagcatcatcagctatcaaggcatcctcctgcttaaatgcatctgcacctgaaagtttcttgtccattggagtattgagagttggcacaccgtccttctggtttgtattttcactagtgctgttcttcacctcagctgaggtatcaatcactcggacaccagtcttctcagtaacatcgttaccggtgccggttttcgcctctcccttggaagctgtcttcttcctcttccttgaataaacagcctgttcattaccattcctgttcttcccagtttcaaatttctggagctcatcctgtgatgtccacaatgcaggctcttttaccctgtggcgcgccgaacgtttaccgcgtgtttttgggtctatgcgttcagtgatctctgtttttatttctagaagtttgtatttagtatcttcaccattgttgtcctttaatttaggtgccgtttcagatgcactgcttgacatgctgtctctttcagttgatttcatcatctttgagccaacactccgatcattcacatattttcttatattccttacagagttcagaagcccctgaagtggtgcccaaggtgtatgattccttccccttgggcggtccgaacgctttccatgaatcttgggaagcataggttcagaatctcctgatgatcctgacaaaaagtaaactacattcaattcattgacattgaaacagggttgttgagatatgcatccaaattacaaattactaatatcaaggggggaagtaaatacaacagtactgacagaattcaactgatttttaacatgaattcattgcccttctgcttggtaaactaagataaactgttactttcaaagggggaagaggtgcaggcaaatgaatgacatatgaaaagatttcccttttggcatgatcttccttttgagaaattatttccctctagtgtttcttctggttattcctaaaacataaattagatagcttttcagcacaataccaaagtaaattagagtggataactcattaaaaaataccttaaaaacaagaatgaactagtagtgaagaatatagaaatgcaagacactgatcatccaatagaatttcaaggaatggaaagatggattaacacgcatccaaaacttttctatatatgaatttcttattatgttgttttaaatctattttctaacttcataatatttaatccgttagcttgtaccctcaaataatcatcacaaatcattcagttattcagccattcagcacagaagaacaggagaatgcacagcttggtatttagcactatgaaatatattgattaataatcaatagttttagttggagataactgctatttaacaacctatgtaaggcatattctatttggcagaaatttttcacgttttcctactggaattaaactgtttcttgtaaagttcatgtattccaaaggaagcttaagtgatggctttcatgatttgtcttgattattggaagaaccattatcataagtttgtaaacagcacagggatacacattgtagaaagcctgtgcactggggtacggcggatgtcatggtcaataataatcaactggttaggagaaggaaatttacagtttgctgaataatagggttaaaaaagaaggttgggtgttcatcattggtcggnnnatacctaatgcaatgatatgatttactcataccatagtccaaaacaaatgagaaaagttttggatgcgtgttaatccatctttccattcatccaggcaaaaacctataaaatctcatttgttttgattgatttttagtggattcattatgtccagatagattaaaacaaaacaaggtacaggtttcatattgtcaggattgaagctaattaagcacccctatcgatgtagttggaccatgggtacgtaatcctcaacccccatccctaccctcatgagaaaaaccatcattcattaggtgatgtatatatatagtttttctttctcgaacacactgaagatctgcgtatcattttattaataagaagaagaagatatacacagggagggaaatccgaaaaatccccaccctaaacattaacacaagttacaaaaaactcaaaaacaggtaaacaagaccatttaacccgcaagggccatcgacctagccaagacctctcagagctttgaagttctagctaagcaccaaactgtgccttcatatgctactgattgaagcaccattgacaccctcagaattgagccactaaaaacacaatcattctgtgattccaaatttcccaataagccaccaaaattataggcgggtttagccatttcttcctttctttgttggtgtcattcactgccctagaccaccagcttgagaaacgatgtgtgtcaggggtcggggtgaggccaagatatttatagtttgaagttagcttttggggtagaggaaagtatgggatgggccagaattacctcttatggggccatgccaaaccaagtggtgatttttgcatgctaggacaactagccaagtccatcacaccaaactatgtggtgtagcaactagtcgtgttagcctacttggcaaggatggaaggcaaattcgccaatcaagtaggcagctagaatcatgaggccagttaggctgacattattttcctgcagaactccaccaatttttcttttccctatagttaaggccacaagtacggaaatacctaaccatgcccttaaaaatccaggatctagtatattttagtttagttatggggttgcaacttgtaatttactatgccacattcctttctaaattacatatggaacataggtctcatctatttcatcaacttacggaaagaaaatctaaatgagtataccaattaatccactaactatgacttaagctatcggacgaacagaattctactacaaatcagtttaccttatgtcgtaatcaccctttataataactagctacttacacagattgagaaggagagtgatatgaagaaatctctcttaccaactagatctgcgtgcatgtagatggagatgttgtcgaggatatcgtagaaacacaagcgaagattcaagaatatgtttgacgaacctagagatcttctcttgaattttatcccctcaaagaccaagaaaggaagaggaaaatactagaacttgcttgggattcctcaatagtagcaaggagaaggtttaaataaaatgtatatggggaatggactatttgctagaataagggtgaggatcccctcgcttcgtaggtgagaactatttattgcgtagagatatgtctattccctttctatttctaaaattaaatgacaaatatggttacatctacacgctccccttgagacctctaacgggcatgcgagttgctcttaaggaattgcgtcatccatctataaagtgataaaggttcaatatagtatgagttggtgttgtcgctatctgtggtatgtaccaggtgtttggtcttctgcttagtcactctgcacatgtgtatacccaagtgacttgaagtgtttatcttcagttccgtgttgggtattgttatgataaatctcgactacttttccttcatgaatcggactctttatgatggtgaaacacctctctatttctctttttttgagtggggaaaaatccccatattgtagtagcattgagttctctcgctctcttctagcttattaatacatctcccacactatagtaggattgaatttcgctcaccctctcccaacatattatttttactggttaatttcatcatgtatgtgtatagaaagtggaatggttgaaacaatgttgatctggacttgtttagatcaaaacaacacttctttttggatggttttccacaaccttttgaagataagtttagaatgtggtccccacattatggccagtgagcagcccccagcaaaacaccttatattgtgctatcaaatgatactgttaccaggatgttctgtagtaacagatttcaccggcgaacagcgtgcaatatattccaaatgttccagctatagctttctcttttcttttcttttcttttcttttcttttcttactatatatatagcttcttcttttttctttttcttttttttttttgcggcgaggagttccagctatagctttcatggcaaaacaaagaggctgtgctagctgccaattgccaaaaacagtagaaacaaattaatggcaacagcaggacgccaggaagaacgtagcaacagctgaattgatttattagccagctcaatccaaacggcattattcacaaactcgatatcaaagtagagttgactaatttggaatggtacttactaatgagagatgacatcgaagatttgttggaactcattaaaatctcatcaactaatatagcaaccaaggtatgtcttggaaatgcacatacttgacggttcttggtatttttctcatggtacatacaataagcgaatgcagcttcatgaaggtaaagggatcggttcacctctggctatttgcatgccaaattttcaagcttctaaaagccccggtcggaagctacagaaccagatagatatctgcgatcacggaggcaagacaacattctggcacaagatgagatctgatagagttttcccgtgccgatcaatccttctcgaagaattcacaccgccatcgaggatattcctcacgacaacgttcagggagctgattcctgggacatcataaatctcaatacttacattctcgagcggatcataccgaacctgatttgctcgatcagcgggaaacaaggaggaatcaagaaggggtgaaacagcattcttgacccaatctcgagtgatcactgccctcagccgaccaatgtcatcagggaaatgcggaatgatggagaaattcaaatcattccctttatcaccggccctgctgtgagctacgtggtatagaggaatctttgttccagatggagaaggaacagcagatggcagtgtgtccatgtttgtgttcaagggaagagtgcccattgcacaccttcttgggcacttgtgttgttgttgatcacacatttgacccttgtcagcattcgtagcctgattctgtggagaaggaatacttgatttcttcatatttacttgccaaaagatcttctcccgatcaacctgtacaaaatacaaatctcagtgtcatccgtagaaatctatgtgttataatctctaaatgttttctctggtagaacccaaaaatatgaacatttgtaatctctcctggaatgaagtacagtgattatccataccagtattttctgcagagttatttccttcttctgcccagtgctgtaaatcatgaaacaaacatgtcagatggttttgcaagttcagaaacaagagaaaattgcagacaccttctccattaaaagtgcaaatacagtagttttcatgagctctcacatgattagctttagtatagcggtatagctcatccatctgagcggtgcataattctgtgcatgaacttatgctattctcaactacaaggcagcatctagatctgagcattgttgataaaagcaaagaatacttgtaaataccttatgccgccaccaccagccggcccatttgtataaagtgcaatgaactcttcaacaaatttgatagcatgttcttccagctcaaatagcccatccatccggaacctgacatccatcacttgtttgacagaactgtctttgttatctccaatggctttcaaactatcatatcctattatgtatgagataatttttccttcaatgccaggatatgtttcatccatccatgacctaacctaattccagaagaaaagatgcaagtggttaaactgcctttgtgttatcacttgtagtgtaaaacatatatttcaattcttaacacatcaggggttatttgaagaaaatatgggaagtactttcatggacttacgaggtatttgctgcatgagctcgcttcaaacattcttggccaccgtatgatatctctccccagcctttccatccgctctcctatataaaatatgtggattaagtgacccacttgacaaactatctgtagctgatgttaaaaagtactatttatccaagccatttcggaaacactattgtttacttcaaatataaaaagaccataatcaaatttcagctatacgacaactaattcaaatactacgcaaacctcaaggcagtgcatttatggagtttaaatattatgtcacatgtcaatactatgtgttcagatgctaagttgaacaaaaagttaaatgaaaaaattcaaataactgacaattaaagtaaaacatacagtaggaagcaattggaggagtttctcgggccagcaaggattggatggttttgctcctttgcactggaccttgtcttttgatatttgctggaacttcacatcacggaaatctacaacctgatccaagaaaatattataactgttcagaaaagaagctacctagaactgaaaccggcatttggtctcaccagatcaggagtaatatagtttgcaggatctccaacttcgtacagaagctgttctgcacatgtgctgtagcttagaagacctccgctgccctctgcctttccaacaaacacttctcctttgtaactgacttcggcatatggaagagacaaatccagaagctgttcaaaagaaaaatctcgatatgcatctcctgctctttaccacaagtagagcataaaatgaacatgaatcataactgtagtgaaaaatcatcatcctagtgattttgaagaagaactgtaccagggtgcatgaaataccctccagtgagttggcatccacattccaaaagatggctagccaatgtcccttgtgacaactcctcaaagtcattccaattccaacctaattcatataccttatgttgaaagggagagaggaaaggattaactaaacaaatatggtattggagaaaatcagccttaattgcattactactttgcataatctaaagaaaatgagcataacaaaaagctgagtagctgacaaaatgacagggtcagcttttatatatcaaggaaaccagaagaatctccaaacttatgcatcatgtttaatttgagccagttaccataaaacatatgtcaaatctttgtgtatttatccgcaggatagacatgctaataactgagctttcgagatttcctaatcacatattttcttttacatgcatgttgcaaaacaattcagaacaccctgttcctgaagcaatatccactttaacatttacattggcacaaagagagttaaaatagtcattatattgtttgcgaacataagaacaactgaacaagctattcaaagcataccataggtgctaagaacagcgcagcatcagcaacccgagaagtaataacaacttgtggtttgccattttctaggcagtgtacaattgaggccacaccaagatatgtgcttccgcccttcacatacaacaaaactaccatcaaatagataaccaaaataggaaattttggttgaacataagcacatttgagtgaaaaatggttaaaacaacacctgtatcaaaataaggcaagagaaatatatgttaataatcaaaactagggcatagcatctcctgatgagtaaatttctatttgattaagtttatctacatctcccagtaataatcaaaagtccacctcatgtgaccaaagttttctatggctgaaccacatggcacgtacattaaaaataggtaactcgcataatgtaacttcaaaattttggatgctactgaatactgatcaattgtgggtaattgtcgtatgtttaaaaagcattaaggttgttagaaggaaatggactaacatgatgtcaaaacgtgtcagagaaatcaaaatagattacctgtcgcaccccagttgattcattagaaaatacagaatttcctgaaaaaagagccaaactaagcttgaatccagcttgaacgactgaatcatgtaacccatgctaggccttactagcacaagaagaaaccaaaagtacctgaagatgtttcataagctacagcgactgttatttccaatcccaaattagatgccagctccagaacttcttcttgagctccaagtggatccactgataaattccaaaggcacatacattatctaaacaagcaaaagaacaaattaggcaataccaaactatagtttgcaatgtcttaccagcgcccatgttagttattatgcaaactcctctatccaaggctaagggtagaagcacagacagccactccttaactgcatgtgaccatattaagaaaaggtgcactaaaaaagaaatcttatctaaaatactaaacacaacacagtaaaataaatttctagtcttctcctccagagaaaaatacacaaataagctatacagtacaaaaatcacataagcttctctatgatttggggcaaagtactctccacaatctcaaaaacagagaaaacagatactgcatacttttagaattgaaaagtgtatacctcggggatcatatccttttcctcccgacatcatgatttggtagcgatccacgagagttcgctcggccaaacactcgagcacaaggtagttaagttccttgactctctccagcaacttgagagcagccatgggccggtcacccccaaatccagcaccacagccaacataaacggtgtccctgcaccgctgaggattgctcctctatcaaccaatagcagtatcagccgaactgaaccatccatttcactaactcgcataattaacatttaacagattttttttcaaattatatagcaagcactaaccaactggaccacacagtcatgaagttcttccattgttactgatgcatcccacggcaaattattcctcagtgaaccaggagcggaactaacagattgctcttaatcagagaaaaatccggaagaagctggatgagaaatcagtccatgtaaaggatggaattctcaaatctatgccacgccgagacatgaagtggcgtggagtggggagtaggaatacgagagaggagtggatatatacctccgattcgattcgaggaccgcgatgggggggccggccgcgcgcgtcgctgctccagacctgctcgccggcggccgtgctcgcgagagaggaggcaagggggcggggccgtcgccggcggggagcgcgcggaggcgagacgacgctggaggaggggggaaaagctgcacgtgcgtgcctctcctccggcacggctatgctgatcggagttcggagatggttggaggcaagggcatttttgacatttactatttttaagtctattttttaaaatattaaaatgtacgaaaccatttaatttcacgtaacattttacacgttcaatcttattaaaaatttagtttaaatatgtaaaaatataagctaattttatattttctttttatgataaaacaagtaaaaataaataatatttatgtttatacttttaataaaataaacggttaagcgccgggttaaaaatcagtagtgttgtatattaaaaataggagggggtaatattgaaatgttataaagggaagattttagtcatatggtccgtgataatttaaatgctaagggcaaaaacaacataaatttctcaattagtaaataaggatttactcgtgaagttatgttgaaagagtatgaacgagagagattttgggagagagtacgaggaaggaaataaaaataaaagaattacctattaatctatttgacatttggcggaaacacacaatttttttttataaatttgaatcgttttaagatttatacagtaccacaatcttaatttctatctcctccctcctaactctcacagtcccacatgctgccacttctccacctccgcttcctcactaggtcattgtgtgtggcctcgctagtgttagcaaagcttatgtgtggcttcgctagtgttagcaaagcccatcatacattctctccctcgtccccgcctatcctccttaacccggtggtgtattcctgttgtcttcctcatctttgacggctcccctcgcttgttgcatcgtcactgtctctacctgctaaccactcactctattttatccctatcatcaataccgacccactataacaccactcgcagtcgactctttggcttaatcatcgccgccgtctcaccgcccactacgaggctaccgccactcaccgctatctctttaaatccgagtaactttctctgtctccgcctatacctcatccctgatagccaaccggtcggggtcgcagtcgttgaaaatcaacgagcttgccagagtggaaagaacgatgtaatgtgcacgaatctcggagtgtctagggtcgaaaatctgccgaatcgggcttaaattcaaaagaaaaagataaaaaaaagaagaagaagaagaagaagaagaagagagaaaatggcgattacccccgtcgattccccctcccctccatctccgatcagcagagccaacctgcacttctcccgcctcctcgcgctcccggccggtgacggcgagctggctctcggtgttaacacggcgaccccccaccctagcatcctcctgtgtgtgcggcctccttgcgagcaggtctggagcggcggcgcgcgcggccggccccccatctcggtcctcgaatcgaatcggaggtatccattcctctctcatgtgatggcttggcattggtggggattttgtgctctgctgatgctaattggtagtagtaatttggtactgcgcactgaactactgatgatgatgttggaaaaccatgacggcagttttatcactgaattgaactagtagtgtgtggcaacttctgccaatctacctggaatgtgaagtttctgcagataactaataacttcgcttctgccaaatttcttaccctcacattgattatatttgtttgcttaattgtagatagtacttcagtttggaaaaatgtcaggagattaaaattggtggaagccacttggcgcaagtgctactcttcactcttcagtcactgaataatgaagtatccctgtacaatgaaaaggtatttctggcattttatgatgagaggataatcaccttttttcaggaataagtaaaagatttgggcatcattgcatcaagccgaacaaaaaggtttataaaacatcaaacacatcctgtgtgttgagcacaatggtcaaacgactggaacaaaggaaaaaaaaaccgacaattcgacctaagctactgacagaaactaaggaatcagactactaaatgaggcaagctcttactgtgcgacccactaattcgcttcttctgcaattgacgcaatgatccaagaacaagcacttttgcagaagtggaggtgagacatctttgcaggggttggcctgttgacaggaagcctattgagtttacaaaatggtggcatggtgtaatgttgtaatattttgctactcacttcagtttgcagttaatgagttttggagtaatcatagcattagccaaatgttttctgacatagcaaaggtctccaaggtctcaggctctcagcttaccatggcagacctggtcttactgattgtgcactatttcctcatagatattccccttctagcagtaatagcataattcccttctttctgtggaatttcgtatgttcaaattatttcaatattgcctcagttttatactttgctggtgttaattgctactgaactactgataatattggaaaacctggccttatatggaattactgaagtaccttcccttcgatctcagtttaccatgggagacctggccttactagattgtgtactagtttctggtcatagatgttccccttttatgggcagtaccttattaataatcccttttctttccttttgacactgacagtctttaaattacttcaatactaacgaatttgctagtgctaattggtactgacaatgttggaaaaccgcagcagtaattggtgtggcatgttctgcctgagatgttcagttaataacgttgttccagtctactttgttacactcagattgcctttttgtttgttttactttaggtagtacttcagtttgcaaaagacgatgatattggatttggtggaagtcactcggcacaagtgctgctgtcaagagacaggaagctgacccctgtacaatgtaaagtcattgctgccatgcacaggaatcctgtgcatatatgatccaagatgcaacactttcgcacaagcggagatcaggattcaggagataagttcagcttactgaagacctgctgagttcagcttgaagttgacaagttttgcagaaatagctgactcttttttcacattggagcctgtgaaactgttgtaaattcttgatgacgctagatctttttgttttgtatattcttcagtaaatgtaaatataatgtaagatgcacttttaagtacgaatcctgatataaggggcacagcagctctgttttgcagctgctagtatggtggtcatgtaaatcgatgcaagaaaagcaccagggtgtcagtggcactcgtgctatagttgacatttgcagtttaataaaaagatgaaatgattgttctatattctcagtcataccatatgtcatccattgaggttaaaaaaacttttgtgatggatgattgtgagccttttgttgcatgtgatcacttcagtcaataattcagtaacaatggtgcatgcttataaccattgctcatggtgaatctgaaactgctgtttttggagcctgttgtcaattcttgctcatatgtaaacctgaaggatgacaacatgctggcttgtttgcttcacaacctgctgattatatccatactggggcaataactgattgtgtacttcagtacttcagaagatacagataaggaaacagagaaagaactccaactgaatgtgcaccactcaagaagtctgacagatcaatgaatagaattgggaatatatttattgaacagggaatatcgttacaataatgttacttacattgaatccaaccaatcaacaaataactcatctttgcatagattagtcaataaactaagggacatctatctactctgccctacatactacacaagaatatcaacaaatatcgcctctgcactacagattacagctcttcttagaaagacaatgtcaatgccagtgttcttggtggctagctatctccaggatgctagctagtctgcaagatcgaagaggtcgtccatggagaagtcgatgcagctcgtgtcatcggtgctgacgtcgatgtagctgagcacctcgtcaatgctctccgggaaatccgaatcacaccacgccggcaccgcctcgccgtccatggaggaggaatacttctgcttgtccatgaggttcaccgccgctgctgcaccacctccggtgtcagcttgctctagtggcaggacgatcggttcggcgtgatcacggaacaccgtgtcgatcaacgggccggaggagctctgatcggcgccatcagcatccatcggcagaggatcgtgctgtggcggagaccccagctgctcgaacatggcggtctctgacacgccaccgtcgttgtcagtgtgggcgccggcagtgaagtcgatgtagctgagcgcctcatcagtgctctctggaaaatcgaaatcacaccacgcctgcgctgcctcgccgtccatggaggaggagtatttcagcttgtccgtgaggctcaccattgctgtggtagtctctgctccgcctccggtgtcagcttgctctggtggcaggacggtcatgtcggggagatcacggaacgccgggtcgatcacgccagagcagctctgatgatcggcgcaatcggcattgccaggagggagatccaccattgccacgggcgcgagcggaggctcctgctgctcgaacggggcgctctctgacatgggaggccagcgctgttgccaggagggctccatgccggcggtgaagtcgacgtagctgagtacctccggaaaattgaaatcacacaacgccatggagtagttctggttcaccactgctgcggatacggtggtctctgcctctccggcgtcggcttgctcacagaacgccggatcgatgacaccgtaggagctctgatgatcggcgcaatcagcattgccaggaggcccttgctgctcgaacagggcggtctctgacatgggagtgcagggcgtggcgcgttccatgccaccgtcatctggctcaggtggcaagacgatcaggtcagcaagatcgcggaacgccggatcgatgacaccgtaggagctctgatcgtcgccatctgctgctagcggaagaacgggctgctcggacatggcgtccgtgaggttcaccaccgctgcggtagtctctgtagtgtctccggcatcagcttgctccggcatcatgtcggggagatcgtggaacacaggctcgatcgcgccggagaagctctgaccagcggattcggcgcaatccacggcgctcggctgcacgaacagggcggtctctgtcacggcgcgccggggcgcggcgcgttgtccaccgtcgacgtcgtcgtcatggacgcgggcgcccaggcgttccggctcccgcttgcgcttcttgccgtggccgctgaaacggacgcggtaaagccggatcggccacgaggcgagatcatcgggcgccgtgatggcgtactcgtgcatcacccaccccgagctgcccctctccccctcggcgaagaagctcagcatgtacttccgccactcgatctccaacccgccgccgacttcgccgccgccgtcgccgcctgggacgctcagcctctcaccgtcgacgcaaacccgctgcccctgccagaaccccccaccctcgacggtacgcttctgccgcttccccttgacgttcttggcgcgcgcctcggcgaagaagaaggcctcgtcgccgccccggccgtgatcggcgaggagcatccatggcggcgcgccgaggggatccgcctcgtggatgacgccgtggagcgggatgggctgcttccggaggcgccggagcaggtagcgggagacgagctcgtcgtcggcggggtcgaacctgacgcccggcggaagcccatccgccgccgccgccatagccgcctcgatcgctcgaattctagggttttgggggtgaattctagggtttggggggaaaaggagggaaggaggcgaggagaggcggaagcgtgtgtaacggggctggatttgaatttatcagatggggtgacgtcagcgcgacgcgaggccagcgtttttctcacgcgcgcgccttctcctctgccgcgcgagcaacttcagggctcagtttgataaaatttgagcgatttggttttggaagaaagtttctaaaattcgagcagaggtttcaactatcgctgatgctatgctccatgcgccctgcaagtacttagtcctgaacttctgaagatttggtacatgtttctcaacttctgaaggattttgtccctgttctgatcttctgaaagtgaatttggataattgaacttctaaagacagtcaaattacaggagaaaaaacagagtattcctggagattttaacagagcatctcttgaagaataagtttgattttgagcgtgtgtttttttttaactaggactcccatttctcttactagaaatgagatagcgattacaaaggtctcgtaatattttgagcgtgtgttttcattcagtttcaaatatatgtcgtgatgatgtgatagatctgacgagaatagccttgctctcaacattgtcaatgtcccgctatttttacccttctcaggactaaaaagttcagaaatgaaaaccattcagagtcataagaattcagagaagttcagagacattttgtaagggacaatttcttatttgaccctgttttgaactgtaactgccaatttaaccatactttttgaagtttgcttatttgaccctcctttttgaaaacgaagctgccgtctgaccccccctttccactactccgttagggttgaataaaagaaaagaaaagaaaatgctactaatattcctaatgcccaaaataccctcagaaaccctatccatctctctcatgtgacactctctctctctcgttcgaatcgtgagtcggcggcgatctgctcctgcggcggcggtgatctgacggggcggtggaggagctcatctgaggggacggcggcggcgctcagagtgcgcttggaggagctccgaaggggcggcggtgggcgtcggcaagggggcgctcggccggcgtcgacgagggggctgcgagggggccgcgacgggcgtcggcagcggagggacgcggaaagagcgggtccgtgccggcaccggctcgtggagagaggaagcggcggcggcgcacggaggggacgaccggccgtgccggctcgtgggggacggtagcggcggcggcggaggggctcggagggagcggatccacgccggtgcagcctcgtggggggatagagcggcgacggcggcggaggggcatggagggagtaaatccgcggcggcgccacctcatgatgggagggatcgacggcggaggggcacggagcgagcggatcctggccggcgccacctcgtggagggagggagaggcgacgtgcgggagctcggcggaggaagctgcggcggcgtgcggaggaagttccggcggcggtgatgtggcggatccggcgacggttcgatggcgatgaggcggatctggcgatggctcgacggtggcggcggcggctgcgctgttcctcgatctggacgcggaggacgagttgcggtggcgatgctccttctcgcttcgaagaggacagagacgcggtctttcttgttccgaacaaggaggaagacgacacaaacgtgtgaataagaagggcacaaacgtcatttcttgtttaagttaacaccgttacgttgatttaatggaaggggatcagatctgatcttcagttttgaaaatgagggtcaaataagcaaacttgaaaaagtagggtcaaattggtagttagttaggttctaaaacagggtcaaaagcgcaattgcccctttctgtaacggagtgaaatctgcatgcatttcaccggtttagagatttcgattctgatggcctcatgggcactttacacataccagatgaaatgaagggcagagtctattagtgctcacttttctcatgttccttatcatatttcagctataagggtttgatatgttaatgcaatataatactacctcatatgtcattcctattgcccaacagaaaacctctatttacattaaaaatacaatcagctgtttatttgcaaaaactatcttgacacactattgcaagtcagacaagatcagcaactccaacgtgtttgcaagaatattatttatgattaataaagctctctctttcttattaaaaaaaatcttcgctcaatggaacaataaatttttgaaaaaaccttaagtattcgagaccattttcatcatatgcacttagccttccttttggagaaaagattttcttttcagttttgctatttcacttgcgacggatctttaggctcctgtctttcaatttttcttttgtaggatcttgtatcaagattcgtgttcacgtatattcaacttgcagttaaacatagttacagtgcaccaaaattagattttacaactgttgtctctagatttatgatttttttacatgtttgtccttttttatttgattcaaaatgggttgtatctattggttgaaaattctacaagatttgaagttccaaatccgtcgaaagatcatagtccatttttttcccctcaaaatcgttctccattcacatagaaaatcctccaaatatcaccctttccaaaggacgcttgctggtgccggcctacgttgttgaggcgcaggtggcaggagttagaaagggggcagaggggtatgtgtcgcgagaagaaaagagttctagggctgtgttcggttggtagtgttgggaactaatctctcacgcattaaaaatggagtgactcgttagcgcataattaattgagtattagctatttttttgaaaaatgtattaatatgattttttaaagcaactttagtatagattttttttaaaaaaaaatacatcgtttagtagtttaaaaagtgtgtacgtagaaaaggggctcgggactggtcgtgcccaggcttggccgggccgggctgcccatttggctacaatctcattctagaattgtgggcaacttgatccacgcaatgaaaccaaatcaacaccctctaggaagatggaagaatctgttggccctttggatcagacgacaccttgctgatcttgtctgacctgcaatagtgtatcaatatagcttttgcaaataaacagcagattgtatttttggtgtacagaaaagtttcctgttgtaaagcacaaaaggatatagttgcgcaataggaatgacatatgaggtagtattatttatattacggacctcttcactttgatgctaaaaaaaccttactaaaatttggcaatgccaaaattttggtaactataccaaaattttggcaggatttcttatatagttataaaaatttggtagcaactaaatgtagctatttttttggcaactttaccaaaatttgttaaggttgaaaatgacatcaaagtaaacaggccctacattaacatataaaatgcttatagctgaaaatatgataaggaacataagttttttgttgttgttgttgtcgtcgtcgtcgtcaagaagccttctttgaacttctctgaattctgatgtccttgaattgaaatcgccgaaccgatacaagtctgaaggcttcattccatttctgaacttctttgaattctgatgactcggaatgatttccatctcttaactttttggtcctgacaagggtaaaaatagcagaaggacactgacaatattgagaacaaggctattcttcgagagatgctctgtaaaaatcttcagcgatactctgtttttccccttccattgaattatcccaatataattaccgaagttgaggacttggataggataaaatcttcagaagttaaggaattggtacttgcaaggtgcaccgaagcatagcatcagcggtagttcaaatctctagtcgaattcagaaatgtctctgaacttctcttcgttaaaaacttacaatccctgcagacttcacttcattacagaaagacagaaatgtctctgaacttctcggaatgctgatgactctgagtggttgagatcagaagtacttcagacaatactctgtcccccctcttcttcaattaccctaattctactttcggtatccttcagaaagttcagaacatggacaaaatctccataagttcaggacttggtaaaaacagcagaaggacactgacaaacctattcttcaagagatgttctttaaaagtcttcagcaatagtatatactttttctcctgcaatttgactgtctacataagtactagcaacactcttgtcatccctccaattgaattgccccaatgtattactactattttcagaagtgcaggctgtacggagcttatcagcagcagcgatagttcaaaccactgcttcgattttagaaactaatcaaaacaagttccaattccaaaaccaaatcgcacagatttcatcaaacttccagaagaagaacacaaaaaatccgcaacccagactcaaatcccctcaaccgtcgctcgcgcgggagggggtaacacgcgcgcgtgagaaacacgctggcctcgcgtcacgctgacgtcatccccccatccgataaattcaaatccacagcaccgttgcacacgcttccgcctctcctcgcctcctcccttcctttcccccccaaaccctagaattcccccccacaaaaccctagaattcgcgcgatcgaggcggctatggcggcggccgcggatgggcttccgccgggcgtcaggttcgaccccgccgacgacgagctcgtctcccgctacctgctccggcgcctccggaagcagcccatcccgctccacggcgtcatccacgaggcggatcccctcggcgcgccgccatggatgctcctcgccgctcacggccggggcggcgacgaggccttcttcttcgccgaggcgcgcgccaagaacgtcagggggaagcggcagaagcgtaccgtcgagggtggggggttctggcaggggcagcgggtgtgcatcgacggcgagaggctgcgcgtccccggcgacggcggcggcggcgaagtcggcggggaattggagatcgagtggcggaagtacatgctgagcttcttcgccgagggggagaggggcagctcggggtgggtgatgcacgagtacgccatcacggcgcccgctgacctcgcctcgtcgccgatccggctttaccgcgtccggttcagcggccacggcaagaagcgcaagcgggagccggaacgcctgggcgcccgcgtccacgacgacgacgtcgacggtggagaacgcgccgcgccccggcgcgccgtggcagagaccgccctgttcgtgcagcagtcgagcgccgtggattgcgccgaatccgccgatcagagcttctccggcgtgatcgagcctgtgttccacgatctccccgacatgatgccagagcaagctgatgccggagacactgcagagactacagcagcggtggtgaacctcacggacgccatgaccgagcagcccgttcttccgctagcagcagatggcgacgatcagagctcctacggtgtcatcgatccggcgttccgcgatcttgctgacctgatggtcctgccacctgtgctcgcgcagcaggagcctccgctcgcgcccgtggcaatggtggatctccctcctggcaatgctgattgcgccgatcatcagagctgctctggcgtgatcgacccggcgttccgtgatctccccgacatgaccgtgctgccaccagagcaagctgacaccggaggcggagcagagactaccacagcaatggtgagcctcacggacaagctgaaatactcctcctccatggacggcgaggcagcgccggcgtggtgtgatttcgattttccagagagcactgatgaggtgctcagctacatgaacttcaccgccggtgcccacgacaacaatgacggcagtgtgggacgcgccgcgccatggcgtcccgtgtcagagatcgccatgttcgagcagccgagcgccgtggatctccctcctggcgatgctgattgcactgaatccgccgatcagagcttctccggcgtgatcgagccggtgttccatgatctccccgacatgatccgtgagcaagctgatgccggagacaccgcagagactactgcagcggtggtgaaccagaactactccatggcgttgtgtgatttcgacagcggcattgacttcaccgccggcgcccacgacagcggcatggaacgcgccacgccctggactcccatgtcagaggccgccctgttcgagcagcaagggcctccgctcgctcccgcggcagtggtggatctccctcctggcaatgctgattgtgccgatcatcagagctcctacggtgacatgatcgtcctgccatcagagcaagctggcgccggaggcggagcagagactaccgaggccctgttcgaccagcccgttccgccgcttgcagcagattgcgccaatcagggctcctacggcgtgatcgacccggtgttccgcgatctcgccgacttgatcgttctgccaccagagcaggccgacgccatggacggcgaggcggcgccggcgtggtgtgatttcgattttccggagaacattgatgaggcgctcagctacgtcgacttcaccgccggcgcccacgctgacaacgacggtggcgtgtcagagaccgccatgttcgagcagccggggtctccgccacagcacgatcctctgctgatggatgctgatggcgccgatcagagctcctcctccggcgcgctgatcgacacggtgttcggtgatcacgccgaaccgatcgtcctgccactggagcaagctgacaccggaggtggtgcagcagcggcggtgaaactcatggacaagcagaagtactcctcctcctccatggatggcgaggaggcgccggcgtggtgtgattcggatttcccggagagcattgacgaggtgctcagctatgtcgacttcagcaccgatggcgcgagctgcgacttctccatggacgagctcttcgatcttgcagattagttagcatcctggagatagcaagccaccaagaacactggcattgacattgtctttctaagaagagctgtaatcagtagcgcaaaggcgagatttgttgatattctggtgtaatctgtagactagaggcagagtagatagatgttccttagtttattgactaatctatgcatagatgagttatttgtttattgattgaactcaatgtaagtaacattattgtaagtaatgaatatactcccttttcaatcattatattccctattcaaaatcaatatactgcattgatctgccaaacatcttgagtggtgcacattcaatgaagttctttctttcagattcagtgaagtgctgattctttatgagtggagtcataaatatcccaaatatcccaagtaaacattcagttataactccggtgttgttctgacaacacctaatgttgtcagtatggatatagccagcatgttgtgatccttcaggttttgcataacatggatataatgaaataatccttcaagaattgacaacaggctccggaaacagcagtttcagattcaccatgagcaatgtttataagcatgcaccattcttactgaattattgactgaagtgattacatgcaacaaaaggctcacaatcactcatcacaagaccatcttgaccttagtggtgatatgtgatatgattctgacttctgggaatatagaacaaatattcgaatcacatccttttatttgcactgcaaatgtcacttataacacaacgaccacactagcagctgcaaaacagagctgtagttcccctaacttatgtcaggtaccaggatcaacacttacaattacatcttacattatatttgcatctactgaaatactgaaacgaagacatctatcatcctcaacaatttacaacaatttcgcaggttccaatgcaacaagagacagctatctctgcaaaacttgttaatgtcaagctgaagatatgacaatgccggaccattcactgtgccatcattttgtgaactcagtaggcctccaggtctcatctcctgaatcccaatctccacttctgcggaagtgttggatcttggatcatagatgcacagggttcctgtggatgggtgactttacattgtacaagggtacctgccaatctccagtcagcctcctgtctcttgccagcagcacttgtgccaactgccaagtgacttccaccaaatttagtatcatcatctcttgcaaactgaagtactacctacaattaaagaaacataaatgcaatctgagggtaacaaagtagatagaacaaagttattaactgaaaaaatctcaggcagaacatgaacaccaattagagtcacggttttccaacattatcagtaccaattagcacgagcagattcgtgtgtactgaagtaatccaaagatataaaattaaaaacgaaagagaagggattataaataagatatttctggtaaaggggagcatccatgccgaatttcattatatacttattcatgattcatcctttcctgtattaccaagaaacagaaagtctcatgacagtgagtttgcctaacctctgtagccacagaacatgccatccccaatttggtaggattactgggtcagaatcagtaacggaataacaccagtacaccacaccctcaatgaagcccattaggctatgcttccaaggctgcagttagctgttcacatgaagccaccaatacgtcatacgttagaggatatattagctacaaagcaatgataactcaaactggcccccacgaaactttgagtttcgcaagtttcaaattcaatgaagtatgatattcagcagtaggatcacaacgcattctgcatccaggaactaacaaacttttttccagtcgtttttgacctctgtgctcagcacatatggtgtgcctgatgtttcataaaccgtttgtccgtctcaatgcaatgatgcccaaatctgttgcttattcctgaaaaaaaaaagatgactatcatcccatgttctaataccagcaatacctttacattgtacaggggtacttcattcttcagtcttcagtgactgaagagtgaaaagcagcacttgtgccaagtgacctccacaaattttaatctcctcaccttttccaaactgaagcactatctacaattaaccaaacataaaaaatcaattcaatttgagggtaagaaagttggcactaaagaagtaattagttatctgaattctgaagaaactgggcattccaggcagaagctgccacacaccactagttcaatacaataatgataaaatcgccgtaattgtttttccaacattatcggtagtagttcggtaccagagacaatattgtagtaactttaaaatatgccaaattcaacagagagaatgggattatgcatttatgctcatgcctgagatgttattactgacagaaggggaattttagagtgaattgcaccttgagccacctttgattaccattgttacaatttggactaggttaaagccaaacttttcactttgggccagatatctttacatgatgtttcaatttggactcccttcttcttcctccaactctcttccccctctctccccttcaatctgtaaagtcttccaaagaattcaaagggtagtttgcattttcaatcatcgactacctagtgcttgtggcttaatttcaaggacagcggagggtgcacaacaagtattcctactggtagcaactagcatacgaagaagctggccggcaatgacagacagttgctgctactttctgaactgacgataagaactaagtcaagtagcagatagccacgctcaagctcatgctcgacctccgctagtgctacatgttatgctgcacgcctgcgctaaatttccacatgtcgctcgagcttcaacaagttttgcagcgctcaagctccgccttcgtagtgccgcctgcatttgagctcgaaatcaactttggcgggtggctaccctgtgaagggttttgcttcttgccttttcatgcactacacctgatcgagaaagagaccttgagctgtacaaagaaaagagaggaagaaagggagctggaggaagaagaagagagtctaaattgaaactttgtgtaaacatacccggtccaaagtgaaaagtttactttttcactggtccaagttacaacacaggtaagaaaaaatagcccaagatgcaatttactcggaattttatctactgtacgagagaaggaaggaactagtgcatagcataatcagtaggggtgcgaggtctccgatgctaagccgagaccgaatcgaggggaaggctacatgggagagcgtcagggttggggggctgggggcattgcgcaacatcccgccggcttcccagtccgggttcgcgcccccacgggccacggcgtcggcggcgatggtagcggcggcgttgaacaatggatggaagagaaagagaccaagtaataccggattaggtggaaacggagggggagagtagtaggatgtgcaccggagttggagaccggcggcggcgcggcgatggctggagcacggcggtattggttggcttcggctcataataagccaaaaaaaataggagtataataataacgaggcaatggtaatttttatgtttcacctattggcggtttaaaagctaatattaaagaaaaaaaccattgaaaaagtgactaaaataaattaaaatgaattttgaaaatatttaattgtgtgtggtgtgtggggtggggggggagaaaaattatatgtttaagagtatttgtatactattttgcttcaaatccatccaaaattccaggcaataatcgtgatgatgaaatttaaataaatttgcctccaagatcgaacataccaaacggcagaatttcggtttttatttgattaccagtagtcatgcacgtgcaatgcgtgttttcatatatgttgtttcaaaaataaaaatactggattgttgcttcatttccatctctaatgagaattatagttacaaaagcgataaatttctcctaaacaactgaagtttacttcataaataaatgacaaataagggtctttatttgaaaacaataatttgagtatcaatcgttgtttacatatgaaagccatcacaagttcataaatctgtgaggtattagttactaaaggtatttttcacgttcatactgtcgtgtacttttaagcaacctaggaaacaaacagagcaatgacatgatccatttttcttgtgtgcttttcagggtagattctataattcagtgattcaaattccatcacaaccaactttcaggtttgaagcgtgattcagataataccatatacacgttaggaactccacaccatgttctaatattttcttctttagacaaacaaacacacgcaagttttaggtgaggtttttttctcctaaaaatgaagatgaatataaagattaagtttttgacataaaacaagatggtattaacgtatgattgattgagttttaattattacaaacgtaaaaaaatagattaatatgatattttagagcaactttcatatagaaaatttttgcacgaaaagcaccgtctagcggtttgaaaaacgtgccacgaaaatcttaatcttcattaaactcttgttggagaaaagaacgggacataattaatacctcaccaagaacacctgtagtttctgctacacaagcaggagcatgcttagcattatattatcaaacatgatgaagggctcactgctgtactgttgagctaccgtagagcactatacttagccatcttccagattttttgctactacaaatctgctatagcaaagcaagcataacttaaaaaaaaggggaaaaaaccatggtgctgtcaggatttctcaaatctcccaagagaacatccctgctttacccagatattttttttaactgataccggcaaaaaaaaaaaaaggagtaactgtagatatcctctcgccatagcaatctgcaacaaatatatttgctgtaagctcaaaaatgaacatctatctgctttcaaaagggaaaaaaaacagctaatgaaatataaaaaatctgcatatcctttcttttccctgatcagaatatttttcacaatgctctaccaatcccgactttctcattgccatttctgatggtgctatcaaatccacggttgctgtcatccatatcaagccacgcagtgctgacaaaggaaaagattaaaaaaaatagagtaaaatacaccagtggtccttaaacttgtcaggaggtttcacttgttgggatacgcgtaggctacgatagcataaatcaaaattttctatcgcgtaaaccaggaaccatgcaagtattagatcataaatcgttaccgctcgacgcgctgcgcagcggaagaagacgctgagaagtcgaaggaactctcacgaagtagcgcgcgtcgatatagaggaagtagtcaatcgcaccggctcgaccttctccttctcgtgcgttctcctcgccgtactcccacgctgatcaacaccgcaaaccagcggcgcctctaccggtatccacacgtatagggacagaacgctacgcgcagatgtgctagcacccgcgcgcggctagggttttgctcggggagggaagtgacggctagggtttctcacgtaatgcaatacctcctccggtcacacccctcacgaatatataggatcaatcactcgggcctcgaaggtccgtaggactcctatctgaattaagctcatattggatctctatacaatccccttattccggcccattaagcgtgcgaccctataggttcatatatactcgactgtaacccgaaaactccttttcggtccacgcgtcaacagcggcccctagcagaacgtattgacccaccgggcatacataaagatcatatcggctgaacctctagtgtatacttgtatgaacccctttgcctcacaatatcgattaagctcaaggctagatatgtgccattctctaatagctcaatcattcgctcgaacatgttgatagattatataacttgtgattgactcctcaatcacctttggcatggccatgcacttccataatctacatcatcgaggagcccagagatatctctccataggaggggcaaatcccatcttgattattcatatcccactacatgtttcatagcatacccgaaaactacttttataactacccaattatggagtagcgtttagcagtccctaagtaagctactacacatgttgagaaccatgataatctcaggtctaaggattcaacaccaacactcaatgagatcactgatgacacaacacatatggctcttgcaatgtctcatgttgggtctatccaacaacatgttcaccaacatgtgtccacattattaatttggtatctctataccatgatccatgagatatgattatcaattaatacatgtgctgatcatataaacatatttgttccacatatgatatttgatcagggatcctttaaaaatagtaataaacaacataaagagtctcatgaaataatcacatattcattaaccaataaggagttatctatttcaaggaacaatgtcggataaatatgtaaacatagtatgtgatacatatcatctctatgattgcctctagggcatatcactaacatcacttaggtccacaaacttgcatagtgcacatcgaagtccctaaacttggtttattgtatcatcccggtccaaagccacgtttgactgtggttgacatagaatttttttatattttttctcgcttcttccttcttttttctctttcttccttcttttttctcggtggtgagaggcagcacgaggtgaggggctgtcacagtggtgaagagagaaaaaaataaaaaaatttcatgtcatcgttcacgtcgcgtgccacgtaggcaagaccgcggtcaaacgcggctttgaaccgggatgatacaataaaccaagtttagggacctagatgcgcgctttgcaagttcatgtacctaaatgaaacctcccaacaagtttaaggaccgctggtgcattttactataaaaaaataagttgaatgaaggatactgtatctgagtgagcattccatcgagcaacttgtgtgcaacacacagagggacggagagtaccgtaagaacatgtggagaagaaatgggggaggaggcagtgttgaacattggcgggggcaggcacctcctcggagcatctccttctccgaggattcagcgagcttcagttgtgtgaaatcgtccatgaatatgcattcccaggttaatacatggccagagggagctgcgagagggagcgaaagcgaaaggagacgcaccagagaatctgatggctgtggaatgtttcttgaatctttcctgctaacaccgtgattttacgtattcgctatgcatttacgattagtcttgtgtttttttttaggagatcagatagcattgtcgtgtatgcttcgtgcatcaccaaactagtatcattgatatgtcacgtgcaattggagtaccgtcagatgtcctttaagcaggctaataaatagcgttcgtagcggccgctatagtggcagtggacctctaccgctaccgctacaatgtagcatactgcaaatagcgtattagaatttagcggccgctatagcacttcatgaccgctatagcagcccgctatagcgcttcacgactgctatagcagcccgctattgattttgttggattgctataatgattaaacggtgtgcttcacatatggatagaataacttagcattgtataccttcttttatcttatatatttatatgttactagaaaagttgcccgtgcgttgcaacgggtgaaggtatgcggtcggtagtacattaaggtgaaatttactgtgggaattcacttggatatacatatatttttagaaaatcatgagtgcagttaggagtccgatagtctaaagttaccatgtgagtttttttagtgagatgtcatatacgacgacttctatatttccaaaagcgaaataacttaaaaactaactcaaatacggatatgtattatttccaaagcgaatgaacttaaaatccgactcatacatggataacatacttaaataccgacaaaaacatcttcaatttttataatagtagagatttcataatttttatgttatgaaatgtaggagtaattaaacatgcagtctaaattttaaattttaagtgaaacttgatgttaatattgatatacaatcttaatttatggtcatttttcttaattctgttattgaaacttagcgtctgcaatagcgcctgctctccacaatccgctacctagacactaatccgctagcgactcgctatatgctatttattactttgccttcatgtgaaatcgctgaaccacaacgatgcctacacacttcgctctgttgaggaaatgtttctaaaatatctatctatttttttttaacgatcagcaccaccagacagcacaatggttcattgaatagagtagggaaaacccctgaaaagcagtagccaagaaataaaaaaaaaaccactaccacgcatcggcaatacctacacacagccaagagaagattagcactgtacccgctgccgctaagcgtgaccggttaccactagaccaacaaggaagctacatcgagacctcctaacaccaagccatacgcagccaagcaccgaactcaactctagccatacctttgagattgagggggagagagtgacagaaaagaatggatcattctttcctctaaggccagccaacatggccaacttgcaaaaggtaggattgcgccacaagaggacaagatatcttcagaaagcttgcaccagctgtctgagagaatttttggcaaaaggacctcctagatgacatctccacggagaagagcgacgatgagcaatgacaccgctgtccgtcaagatctcggggagaaccaagacagggtttacactcagtagccccaccaaaagaaaggggacgactcgataatgccccaaagaggaaaaacgcgcttgaaacgcagttgttgctagtctggcaagactgagctaggtttacacccgcctcccgcctcccgccccctagtcgatccacagctaatgctccattgctccaccttcggctatcctccgtcagtgcgtggacactgctgcaccgagacccccgaccagcctccgcatgcttccacgtggcctctcgcggacagccgccgccagttgagcatcctcgcaccgcgccggctgtccccctgtagtgccaatgctactcggcgccacgtctgctcccgccgcaattaggccccaccaccaccatgttggatcgccgccctgctttccatcggtgaggtgggggaaggggggaaaggggtggcagcagggctaggtttcgcctcctgtgccgcccgcgcgtggtgacacagggtgggagcaggtctagctgtctgcttgtatacagattgaagcttgttcccatctctgaattctgatctgaatgatttctgtttctgaactttgggtccttcaaaaaagataaggtaaatgtaagtatgaactttgggtcctttaacaagggtataagacaggaggagcagatcatcgggagacagcagaaaaaggataaaggtaaatgtgagtatggcattaataagtggcatgacagcaatttcagcagttcgtatacatggtaaattgttgacagaaaacagtaaactctaatcatccaaaaagacatgtcgcagtatatatatacctcactctccataagaacatatctcacaagctaaatgttcagggtaaccacctgaacagcgttatccttgtcaacaacaaacgatctggttacctttcctgaaggcgttgctacttctaccgtgtatgacccatggtagcctctgaacttcaactctccatggtgatccacgttgccagtaatgctggttagccactcttgcttcagtgcaatgtaccttttgccagcctcattgatcgttccatcaacatcaaccaggtgagcgtgttctcggaacatgaacagctcccagaatccccaaaggataatcccctccacggaaggatgcgcaaaggcttcgcgaaggtacacctccagatcatcggctcggatgtgttcattctcagccgtgacatccaattcggtgatccagatagggagacccagtatggagagcttgtccagggaatcgcagatgatgtcacccactggatgcgtgatatgaccttgcaagccaatcccaccaactggagcacccctttcttggagatcaacaatctgttcaattaatttttctggtgtagattttgagtcgcatcgatcttcaacattgtagtcgttcacaaagagtactgctgaagggtcaagtttatgtgcttccctaaacatgtgagctctaatatcatttcccagtctatcttggtagaaagacccatgaagcatctcgttgtttacatcatgatgtttaaactgacctttgtaccttgacaacagactttgcaaacgattctgtatagcagccatcaggtggtgaccatgtaatgatcgaatccatggctggactgaatcttctacttcccagaataagcagtgaccacgaacttgaatgttatgtttccggcaaaattcaagcaactcatcagaatctttataatttagtctcccttgttcagcctctgtccagtaccacttcagttcattttcaaatacagcccaattaaagttcttcatgaagaaatcagcaagatcctcattctcaatgttacttctccctatgcatgatccaaatggaaaactgttctcggtctgttgtatcttgatagatgaaccaaaaaggtttgcagcatctgatccctggaacttcaggatgacatcacgcttccttacctatttgggaaaaagaaggaaatgtaacttcaatgttgcccacaatcactattataagcaaagcaatggatactttatagaataaaattttggtctaaaattgccatgaagaaaataaagattcttttcaagcttctgcagacataaatttatcatcttaacatacaaaagaagtaaggaaagtttaccttgtcagttttctccttcagatattcaaaacgtgcttttctatcaacagcataaatttggaaccccataactctgagatcaacacctggaggcggtccctgaacatatgcagtaactttggatggcttcttttcaagcttgaatgctcctttgagttcataccattgatcgccatcagcttctacttgcccaccattaacccactgatgatctacagcaagacaaacatttacatggtaacgtccatgtcctccagacccagcacgtacccaagcagaaactctgtaagtggtgtgcagcctaagcttgtcagttatcaactgggaagggcccatccacacatcagtgcggtttgtggcaagaatataagaacctcttatatgttgcttagctgaggggtccttcaagatggcagaaagcatatggggtgattcagtatggatactcaatcgacatgaccccatgggactccacccagaaagcccatgactgaaagcactgttatgtattacattagctccatatgaaacattctgcagtataaagaaattatccttgattcagaattggtgttcaaaatttcactgtccatcatcatgatttgataaacttctaaacatgtatcaagatcatttaaataagaatgttagtcagaaggaattagtttaaacctcaattcttgggcggggtgcagcatggagttttcttgctggagataggacaaggccatcaacaagaatatcaatgcctgcaggtggcccctctacgaaaataacagcttttgaaaacggggcatggaggaggaactttccttttagatgtgtccattgcttatcagatgccgggttcctttgtatacaagaatatgttagtaaaccagtctatgtttacaaaaataacgctgccacttgtcacagaaagtgtaaccaatgaaataagcatatacttactttgcaaggcttacatatcgctcacggccatattcttgtacccacagagtaacgcagacttctgtatcattggcactcccaaatatgcggacagcagaacttatctcataaagaacttttctctgtaccctgccagtgatatcttgctggataccgttccaattgtggacccgtccagtggctgaagcaaaatagctgccatttagaggcttgacatttccataagcagtaagctcatgcctacagatattgcatcctcttccagaccaattgtttaacccttcgtcaaagtgaggattcttaacgatggtatcaactccacttggtacttttacttcctttggaaagaaagattaagaagtaataagcatcggctaaaaaggcaatgtttgtattatatagcaggaaaagcatgaatgaacatatgatgagataaatccactgaaggtagaagcagacatatttaaatttgtaaaaaaaatcaactatgtgttacccctttgcactaaaaaacctatttgggaatacattaggtcagaaaaatagcaatggttcaaaacataaattttggctaagaagaattttagcactctacattcaataatcagtaaattcaagctagttgctcagcctcctaattatacttccgagaaacatgtatcacgccaagattcacatgaagaaaaagttaataacgtttcttagaaaaaggttaaagcaaatgctggtggaaaagcactcacttttaactgctgatatccagagcaagttacatttacggaatcaatgataaggtccacgccagcaggaggtccttccaggtagaatactacacgttttggcatatttgtcaagcaaaaggatccttccatcttctcccacttttcttttgaagctaacaggctattaaatcaagaagggaaaaattagaggagaggtgagaaaaaatttgatcgttgaacaacttttatgaaatgtaccttccaactggactgtagtgcgttgaatcatctgtgttatgcaacctcaaggttgctttaacttcaactttcgtatggatattcccatcaactctaacataggctgatactgcataagcagtaccagcagatactttatctgtaatatcttgttcaagaccttgccagctttcagttctcttcgaaactacagcataattttctcctgagctccctctaataccatcaaggaaaccagaccattgagatgccacatatgcatgacagcagatagggttccacaaatgaaggccttccgaaaaatcataatttgaaatgatgttttctgttccactaaccagtttggatgcagcccgctctgttttctacagaaactctgaagtagttagaaaatggtagcttagagtaacaaatccaatcgaataatacaatgtcaacctttaagcaccactgatagcttgatggggaaaaaaacatgacatgtctcaactacgcatagcaaaaactgtagtagtatgtactggcatgttaagaaaaatatatcatgatcacaattagtcttagtgtatgatttttcctcttctttgctatgactactgagaaatatggtgtggacatattaagacagcattaaatcagacttttagagcatgattcatatatcacaagattgctctgacatgaacataagcaaagagatttaaaagcataccttgtaggagatggtgactgaatctatgagcaagtctacaccaggaggggggccttcaatgtagaataccaaacgtcttggtagagtttttagttcaaatgaaccttccaacttctcccaacagtcttttgatgctgagatcctggtaaaacaacttcaactgataaatccatgatggtgtataatattctataaaatcaccttccagttaaaataccttgcaactgattgatagttcgtagaagaaccatcgccctcaagttttagagtggcctgaattccaacaggctcattgagttcaccatggactctgacatgggcagcaacaatgtactcagtaccaacagtgaccttttctgttatgtcctgctcaagcccttgccaattatgtgtgcgacgagtaagtacggcataatttgaccctgagtgaggccttattccatgatgataacctgatccttcaacagccacaaatccatggcaaccattaggatgccacaaatgtagaccttccgaaaaatcattgtttgacagaatgttctccatgacaactttatcggaagcgccgtgctcctctacttcctgctcaacattgtatgataaataaatttctgcattgctagtccatgtcattgggagaggaactgaaattcatggacagctaacatcctatcacacatgtagattgttagggactcgtggaactataggtctcaaaccatattagtgtgtatcactggatctgtatgttttttagtggtatctagttcatcctttcctacaatgtcaaactctacaactatacatatcttgcattccaaccttgaaatttaactcttaggactatatatcttgcaaacaatcaaaattccaaccatgaaattaaaagataattccatttcttattggtaggatctccaccaccatttttcatcaatcacactgtaaacacgccctgactaaacattccttgcgccctttgcggttggtacgcagtcaatcagcaagggatggcaccaccaagcaaaactatcctggatccttccaggtcagagaactagcaaaactcatttacccttggaagttggaaagaaacaaaggcactagctagtagctacggatgatatatagataccttggactcgagacgcggtggatctggctgcgggagcggggccgccgccgcgcgtccaccccggcgagggcggcacagggaggagaggcacccccagcgcctcctcatctcatctcatctcaaatccggcagcggctgaggaggaggagcaagaacctgccggtgggtggactactgcctaccgggctcgctggcaaccaagaattaaaccccaaggaaatgaacagaaagaaaggcgcgtgagaaagccggtggtttaccttcacctaaccaccgaccaccgaggcccagcttgaggaggaagggaagcatacagagagagacagcagagacggcgctgtccgcagcttggtcggtcggttgcgttgtccacgggggggaaacccgacgtgcgcggagaggggaataggatcagatgccaaggagacgaacgcggcaacgcgaaaccgctggcgacgagggaatcgaagaatctctcctctgcggcataacgccgaacaccccgtgggcacccaagccagtcaaaataggagcgagagagagagagagagagagtctcgcgagtggggtttacctcgcggagaagaccggcggccggcggggagtggcggggtggggaggagaagctgaggcgtcgacgtgtagacgacgtgaaggctgtctgtccgacgccggggaacgcgaaccgatcgaatcggaagcgtcgcgactcgccgaggtgggggaggtgcgtaaattggaccgtggagtgagtggagtggagttgaccatcccttttttgttttccatggacctgacacgtagtactaccacctttccttctttctgagcaaaatgtgttcctgtgcaaagtaccggcaaaaggtacagacctgtacgtgttcatggcgatttggtcggtccggcgagctttaacttttaagcacactctccatcgttgacggatcagaaaatcgattatgtcataacgtatctatcggtatcatagtatactaaattactaattatacttagatcatagtgttataacatatggataaacagttttgctataggttttaccgaaaatcgtcgatgtcacctgacaccggtccttctactgtagattcgcccttgccctccgtcccagaagggacgtcgctttatcaggtagaaaatgtcccaaaaaatttaacgcttaaactctcctgtcatcaaaaatactaatgcaaaaatgtacttgaaataaaacgcataggagtggagttgtctagtatactttcgaatgtttctgctccacgcgaattttcctcccaagcactaccttatcctctcttgttttctcttcttccccatttctcatctatcgtgttcttgttcttttacagtttctatgttaaagatcaaaagctttctcaaggtgagatcaaaaggatgtatagccccagcatgccttccttcttcctctatattgacttgtgttttactaaggtcaggtaaaccccatccatcttcctcttcatgtgctagtttgtttaaatctaccgtcattgtgatatgtggacatggagttgctttacaggttgatgaatggaatggcaagcggctggttgactgcctccttaaggatttgtagggaatagaggggcacccattggcggcaaaagtagcatccaccatgtattttgaattcatgggtctgctggataattgtgccccatgtaatgggagtgtttttgccgctagtgaactcaaaataggtgtatgttttgctgccttattgtcgggacaaatcattcattagttaattgtagacatgaaatattccttgtatgacaggagtggcatgtgtactctttggtttgaaataattaactgtaagtaatagattgggagcaacatggtcattttcacctaaacataatttgcttcaaccatcctaggacgtcaaacatagtggaacagagggagtatattgcaccttatctatacatattatgcaacttaatttcccacagcaacgtgatagggtattcatctacttagaaaagaaaaggagcatgctgcataaatagcggcaagaaaaaagaatcttatataagaaatctagctatcttagtaaaacattttttttctatttataagttagcaagttaaaattggttagaggtgttgttttatgaacttatattaccaaaattgtctggtgtatcacgtgcaaaaaaatatggttttatgcaatttaattataacacgcagtaggagcctcctactattttcccgtaaaaaaataactataacacctgggattttatgtgatccactctgtttcaaggctaatctctaatatgaaactttcacatcttaaattcttctatgaaaacatatttacaagggaattcttgctaaaattttaaaatggaccaatatgttactactccacgcgtttcatattataagttatttgattttttttagtaaaacttctttaagtttgaccaaatttataaaaaatataataacattttcaatacaaaatatacattcataaaaatatattcaatgttaaattcaataaaactaatttggtattgtagacgttgctaattttttctataaatttaatcaaatctaaagaactttgagtaaaagaaaaagtcaaatgacttctaataagaaacttgggagtaacatttaactgtatggcatcaacatataacatattagtgccaatcccatgaactggaccggctaaggctctgtgcaagagttggttccctacccaaacatccctacccaaacagtacgcacgaaatacggaacggtctattaacatatgattaattaagtatttgctattttttttaaaaaatagatcaatatgttttttaagcaactttcatgtagaaactttacgtaaaaaacacaccgtttagcagcttgaaaagctacgtgcggaaagttgggaacaactattgcgaatagagtctaaatcctcttcaatggaacccatcggtgtgtagtggtacggattggagtaaggttgtcgccaatataacttcaacgttggctcattgccactgtttgtcaaatctgtttaatcccggtcacaataagctctctctgaagtgacaaaaaattaaattattcctcattagaatatttttttctaagaatataccactattttgtagaacaattttgataaaagtaccaattactgcatccgctttcataaattcttgacgtttctccattgtacacttctacttatattatactttttaagataaatcttatattgttttaatgattttaaactaaatattttttaaagttttggtagttcaaattataaaagtttaatctcaacagagattagaatcggagggggtacaaaatttgcagccgtagtaacagagattagaaggaaaaataataaaaacaacagtctgtcaagtacacgcctgccttgccggttgcccctcgccggcggcctcgtagccggagcccgtcctctccgccgcgcccgcgtctgccggcttgctggcgagctcgcgggccattgccggagcccgtcgcattgaccgaatcgcggggcaaaaccaccaccatccgcgccattgcttccgagcggcgggaaaggatcgaggatccccttccttctgcatattgcgttgcttgcttgcatcattctccaccgccaccgccgctgctgccccccgcctttttctcttcccttttgccgccgaggcgcggtgcgggccaccgccacgtgatggaatggaagaggagcataccgccgcctcaggtttttgcttcttcccccgcgcgccatcttggtgcggacggcgggagattctctgcgcaccctatcgccgcctgcggaagcaatctgactgggctatgcccatcatgtgttcgacggagtgccgcaacggcaagaaaccttaagacttcgtttttattatatctcccctaggacagaggcggaggaggatcaggattggttatacatcaggccgtaccacgcccttgtattcaaaactttaggtatgttcatcgattcatgcccccaacagccttcattttcctctagtccgtgttcttgttccgttcatgctgccggaatctcacagctcgacaaaccggtgtcccaactgtcctgtttgctggttcttggcacttcaaacttagcgcaaacatgatgtatcatgtatgtatcgatacatagtagctctgggtttagcggaattgtatgtacatgctcatcaaggggatgtttttggttgctagtcagtaatcaccaagtcacacctacaatttttctctctcacttgcattgttgccttaaattgtagccacgccaataagcatcaggagaaccttgcagaagtggagtcgtgtgcaaaattatgacattatttgtggtgcggcccagattaatatttaaataaaaggaagcctcacttacaaagagtaaaaaaatgaaatgtatatctaatcatttattgttgtgcttgtatctgctacctatttttacattcaggttaggggaccttgcagggcaaacagagatcactgcaatgacattggatttcttcttagtgcgcttgaatcttactttccaaacatttgctgcctataattacaagcctataataacttgtctagtcaatagctagcattgtagtaattgggtatcttcatcatttgtcctaaaaaagttacttatcgaaatcttccgtcatcatccacccttttataattaaataagtattctccacgaaaacagtgtgtctcactcttttatgagggctggctatcataatgttaggactaactttactaactttccaattgaagcttagtggtttctccggcaagttgacaagaaaaactgatcatatcaaagatgagcttcaaatctattgaccggttaattaggaggaacagtaagaccaaactttctcggaatattgttgatggtatttatgaccagaaggaagagcaatatgtgcaatccttgagggagttgcttcttgcaaacaaccagcttcccgagaagtttgatgactatcatgtcctactacggtatgcaaatttgtttcctatccagaaactttgtcgtgtacacagttactgcactagagttatccatctttgtaactaaaagaagatattttacacctccattctcttagctctgatgtattctgctttttcattgaggatgagctttatctgattgctttcttcatcatgcagctttctgaaaatgagaggatttaacatagtaaaggcaaaagaaatgtttttaaatatgctaaaatggcgtgaagaatgtgctgttgatgccattgcaaaggtacgatgtgcttagtgttttttatttttctgtacaggtaaaggttgtccaagactgatgcttaaaatattcctgtatccttctactttgttatccatgaaaattgaatcatggaatgccacgatattatgtaatattgttgaaatattaagagtaaatgatttttctatgttacaggattttaaatttgaagagtacgatgctgtaaaaagatgctatcctcatggatttcatggagttgatagatttggcaggccattgtatatcgaaaggattggcttggttgatctcaataagctcatgcaagtatctagcactgatcgatatgtaaagtatcatatatcagaacaagagaaaactttatccttgagatatccagcttgctcccttgtggctaagaagcacataggctctacaacagccatatttgatgtgaaaggattggtacgttattgctacacgaagtactttccacctactattctacattaatacaattgacagaactaccatttcttattctgtaaaactgaggaccaaatatgtcttgaaagcagaattgcaatggttgcactgtaccttggtccttccttaaggccattgctgtacgacttgtaaggttgtatttcaattacacattcatagctggaatagaaattcacattcatggaacaataatatttgcagggaacttccatacatctaatctgtttgtttgaagtgctctcattggcatatgttgaagttatgtttttactgtactaagttcattgtctttactccaaattcagggtatgaataacttttcaaaatctggaagggacctgttcatagagattcaaaagatagacagcaattactatccagaggtttgtatgccatgtctaaacttcaacgtcttatctgtctcttatgatattataagtgaaagttttagacaatatgcatgcaggagttagttcaatatatccagatgttcatggttattatttgcaaaatgtgatattgctttgtaaattactcttccctcttatataacagtataaaattatatgtaggggactccactaatgttctttggttaaaaaaaaaagtaatattgctatatctttcagttcaaacaaataaatgtaaacaaaacacactgataaggttggtcaataacatgtctgatagagcagaaataatacccactatatatgtcctctagcacccgtgtgctctgctacagtgtgaattctagaataagaaatgacaaagttattgcatatgttcaaagccattaatcactcctgtttggctatatggtgtcatgtatcaacgtagtaaggaatttcattggagacatttttgtaccttcactttcatcatatagctactgatctattttcttgcctcacagcagtcagtagtttccactctctatttatgtggtcttgcttctgatacagacattaaatcaattatacataatcaatgctggtgctggatttagagcactgtggaaagtattaaaagcatgcatggaggcaagaactttagcaaagattcaggtactgcatgtctgcatgccctttcttcatgtgctacttattgttggacaaatagattgaatatttttttctcacttatatccttcttgttaggttttagggaccaattatcttagtacaatactagaagcagttgacccaaggtaaaatgcttaaaattttaagcaaaatttgcgtatatcacagattgaatgtttgctcctttctgcagtaatttaccagacttcttagggggaacatgtacttgttctgcaactggaggatgcttgctccaagataaaggaccttggactgaccaggaaatttctcaagcttctaaggtgaggtatggtgcttctttttatagttctttgaatttttttggggcgctgaaactgcaagaagtatatcattttgattcctgaagcatatttttttttcctagggagtgtttggtaaaggtcagaaatctttcgatgagataagtactacagttgcctgcgaaaactttccaggtcaccaggtattaagggttgagatgcccagttcttgttgtcttttgcacgttggctttagcagggtgtgtcctatttgtgtttggtcggcactcactagtatggcactgctatgctttgcagtttttcctttttatggattaaacatttcaggtttattcgattattaatctctaattttatataatatatctattggccaattttgttgtaataaattggcagcctgtctgtgggatttgtgtgctaagtgtccacctaaaataggacagtttagggagaaaaataaaattcatcacttctcattttatctacccatgtcatcttcatttggttctttcttgttttcatttctaaatgccataccgaaagaaaaataaacatattatttttgttaacaggagctttctttccttagttctgtcatgactctgcactatgtctctctcttctccgccattcctgttgtaaaggaacagttatgtattcttgatatttaattgcaggagccttctgtaggaaaattgcatcccatttctggctggaaacgtactcttggcatgttgttgaaggataaccaggtctgatgttttcctttcccttcattgatttttgtttctgtactaatagaattcaatcaatactttgaacgctgcaactgataaaatatcacaagttttttctgctatgatttgactgtgtatgcatttcaacttagtagtttaacggtttaaccagatggtccaactcttccttgggcaaggagaattcgacagttgacgattttttgataaacttctatggaacaggttggcgatacgaatgaaaatattcaacagaataaagtgaatgaacaaatctcagagaagatccaagaacttgaaaattgctctgctcagacccaggaggtgagcaaaggtactctcagcttaaaatattgcaacccacatgatcttcaacagtagctgaatggcaatattgttgttatgttgtatgttcagacccttcacgcactactacagaagcagaatgagcttgcgaaccacattgaacagttgaggaagctcctccggtgagaatctgacatctacttttgttcttttctctaattacagcatatgggatattaaaatgtactaagtatctgctatttttttcaacacagggaggccgcaaatgcagacaacaaagcaaacgtcctaatcttgaagtgaaattgcgtgctttccagcaggaagtgaaacgagaaaatttgaaccagcatcgcatggtagaaatattgcagcatggtagaaaagaaatacagcaatagacacgtcgatagttctcagtaatgattccttaatcgttagtcccttggctggtaatctaacacgaagcaaattaagaaagcaaccgtacaccatgatgatttcaaaacgcaatgcaacttctttgtacacatgctgcgttctgttgtacatttgtaacgcatcttttcagaagggaaaatgttgtatgtaccacatcctttcaaaaggaaaaaatgttgtatgtgttacttatgaaactacttctccatctcctgctaagtcacttaatgagcgcgaaagacctacccattacaacagcatctaacactctgaggatatattagtaaaatcaaaacgaacaagtatagtaatgttgtacaatcaattgaacccccaaacacaacccagccaaaaaaatataggcctatacctgacattggcaagaaaactcagctccgactccccactctctttgtgatgggtcaagctttttcaagtattttttttaattttggggggtttccgtccgcaaaatgtgagctcgagcccaacctgctgcattgtcaagtgatcaagtcggatggggccgagtttgaacaggcctagctacaacaaagataaattgctgttgcaacattcccctaacaagttcgcaacagtaggaaaaataaacgaacaatatcaattatgtaaaaaatttaggaacggaaaggaagtggtggacaacaacgatggtaacaagaagcggcacggtattaacatcaaactagtaggatgagagatgcatgtgttacagttctgtgagcaagtagcatcatggtaggcggagccctaaaaaacaatattgaccattatcataaggcttaatcttttggtgtcacttgctgtaaattaggatgagctaactgtaataggcccgtggtcgttgggattgggagtagagccatgctagccttgtttctagtaggaggaagaggcgatcgattctagatgtaccttaacaatgccatgtttgacccaagcaatagggagtgcagctggagtgggagagagatatatggagcatctaagggaacgtttgattcttttgaacaacttgcttagctaggcaatagcatactagctcacctaggctatagccacaggagcaagctatctagttggttgttttgctaggcttaacgtttgttcgctattacatgggcctcaatgcctgagtcctatgcttgccgttggaggacagccaattatgttctcctccctaggcaaggactttcttgccttaagtgacttctctcacctagcaaagctagaaattttattgctctaccaacatcaaacctggttgagcaaggctagaaataatctagcctcggatccaaacgtaccctggacaaagaaaatgatgggaacgcaaaaacgctaaatgaaacttgtggacaaagaaaatgatgggaacgcaaaaacgcaaaatgaaacttgtggacaaagaaaagaatgggaacgtaaaaacgagtgacagtaatagctaagaggagcccacatgtggaggatctgacgtgcagagatgcatcagacatctgatttgtcgtatttgtggtggattttacttctagctatatatggatatcagcaatgccatgcatcacccatgcaacggacgtaaagtttaagtgatatctgtgtgcataagtaaatatatatgtaagggaaagaaattagatagtagcattaaagtgatactggtttatacggataatataaacaaaaatttggttgagaaaaaaattaatacggatatcgatgtggagcttcgaagaggagagaggcattcgatgtccaagtacatatatgggtaccatataaatcacccatcaatattaaaattccaacataaaagttttgagattgggatatacttagaaaaaaaatacagttttcacaaaaatcaccaaattacccttttaaaagaggggcagcctaaccaggttagggttctctatttacatctcccaagtcccaaccggatcgaaccaaaatcccaaaaccgaagggaaacatagcagccggctaaggtttctcccccctgccgcgccgcgccgcctccctccaacgccatggatgcgcagcgagctctcctcgacgagctcatgggcacaggtacacccacccacccagtctccccctcccgcggaaaccctaaccctagcctgaccgctcccttttctcctctgcgcagcccgcgacctgacggaggaggagaggaaggcgcacaaggaggtgaggtgggacgacccggacgtgtgcgccgccttcatggcccgcttctgcccccacgacctcttcgtcaacaccaagagcaacctcggtataatccccaaccccttttggctcggtttccgtcttctggttggatcgattttgcgtggtttcgtggttcggccggtgtgttgtgttgtgttttggttgcttgatttgttgttcggttttggtgattgcagggccgtgcatgaagatccatgatctgaagcttaaggagaggtaaggcccgattctcgcccccctcagaattatctaggttttggtgctaaacctgcgcccattagtatgggggaaaggtgattattgttatgagaaaaaaaatggtaccataatgtatgcttacacctaaatggtatagataattgatgcttttgcgctataagatgttatttatatcattgcgcgactaggttttgtttagtattgaggaatgaggatttcggccttccgcgtttccgttgagctggtatgttgtactttcagtttccctgcatgtttcctgttgtgatttcttcatgcaccttgctattgagaactaagatgctggattacttgcatcacaccatgtcttgtatgtgaatactgatgccacggcactctacgtagtgtctgaagaagcatccagttccagatgtattacacataagaagctttacatcttaaaagatgtgttctcaataaaaacaacatggcagaaaaaaaatcttgtaattttgggagaaacttgttcagctgatagaaatgcaaggttaaatgcatattgagaagagcaatgtaggaatatacctatacatcttacagcagctaattttgttaactaattcataggtggaacactaatttcttttgggcagagggagtctgtgcatgccgcttctcaacaactttgatgcataggaatggatattctactttttcctgcatataactttgactttcgtactactgtacaaaagagttctttaacaagttacgttatatggacatgttcttgttttaagtttgtgcatgggcttttattcgttaatgtgaccgcatagttcgaattaagtggaaatcaggacgtttagaagtgctatctgtgactgtggaaatcaggatcgcttaattgttgccgctagttccggaccaacctagttttatcttatacgtttttgaagatcctttattaagatatatctgcaggatacacacaataattgtccagaatgagcataatttgtttatggggaatattgttcgtgtaggtcagtgcagggaatattgtttcctatgcagtcacataagcatcacatggcgagggtgaaagggatataccttttctcaatcagacataaacaaattattttggaatgacatcattggtttgcaacatgtactagatgcacccagcctgcttgcgtcgttatgaatattgggatgagggttatcaaagttattttggtcaataacattaaatgtatgctgtattacgcccaatttatgacttcttttaatagaatatgttgaaccaagaacatctttttgactgctggtctgtccctttatatatagggaggactgacttgacatccaaggaactaatctgtaacattataggaaaccagtccacatctctacctctaatttactatcggaacttatctgtttattcctaatctgccttgcctaacctgccaaatgggtcttgcgcattcccataacctattttgaataatcagtccagctcagttgttctgtcgtgtacctatctgatatagggagagcaatttatgcatttaatttttttttctctgggcaagtgcagctttgagagttctcccaggcgtgaaactcacatgcgaaggtttgaggcggaacttgctcaacaatgtgagaaactggtaagttgtagttgcagacttgctttgcaaattccgataactagagtatttaatatcttttttctattgcaggttatagatttggatagaaaaataaggcgtggtcgagaaaggttggctcaagatgttgctgtgccacctcccgtcatagggaaaacatctgagcagctttcaattatagaagaaaaggtcaagaagctgttggagcaaattgaggagcttggtgaagctggtaaagtagatgaagctgaggcacttatgaggaaggtactgtcattaaagatccattttgattgtgtacttctgtcaaatgcttcttcactaactggtgtacctgtctctttatttttggattgcaggttgaacttctaaatgctgagaagacagctttaacgaatcaagcagataataaagtggctatgcttccacaagagaagaagatggaactttgtgaaatatgtggatcattcttagttgcagatgatgttcttgagaggacacaatcccatgtgactgggaaacaacatattggctatggtttggtcagagattttctagctgaacacaaggtgaagtatcatttcaatagaagtactaatgtttatatttgtatgtttactaattggaggctcctctagaagtctccatattagaatatgtgatttttgccgctttttttgtcagaatatgctcctagaaataataaaactattattctttgatattttctgatttgagaaaattctatctgtagcacaaatatttggccactaccaataagtactgcaaaactattccaccttcactgtataccataatgtggcccaattccttccaaaaatgcagcataactggatggaagtggactgggatgatgttgctacttctcgggacggaaattgcggctgatgcatggggttgccagggcaatttcgtcttttgagaagaagcgccgtctgtctctgttgactttgatccaattttgtggtacatttggaaggtgcagttatcttgcggtatttattggtacaagccaaattgttgtg

SEQ ID NO: 24554 - DNA, 10131 bp, Oryza sativa
ttctatatgtgaattcgcatgttagatcttacttgttgatgaccaagtatgggattctggagatcgataagtcttcaacgagcaggaaaattcacggagtttactttcttgaaggagagtaacgttgacgtttacccacaactacagaaaagatgatcgatgctggttgggaaatgggaactgaccatacgtatcgaatttctcaactggcacctagtagatagcgggttttagaaggactcaatgataccagtttaggaaccagcacatttaaagttcaaggaatgaaaaaaaaaaggcatcatccgtaagatcatcatcatccaatcacagattaatcattaaaaacaaaatcaatatgagtacagagagcttccatcgctattgttgccgtcatcgagatagccacccccgtggttgcggcggcggattcggtcacccccgagcatgcaacggcgcatttagccaccagcaagcacacggcgccagatccactcactgtcggtcttgccaatggcaattgaggcggcgtcgatcgatcagatggagaagaggaggaaggaggggcggtggagaaagaatatatgaggaagacgcggggcggatgtggcgagttcacaagtagataaggacactggctcggtcgatcaacttaaccgattttttttaattatatgtgttagcttttaaagaaccaacccctataataatataggtatcctttttttaaaaaaaaacaaaatactaacctagaacagacacttatatgttctttaaagtaccgggtttttaatccctttcaccctgtggagtgggaaacggttaatagcactccattcgattatattacaaataattaaggttttataatgcatgcaatcgatgcatttatacttaaccattaactttgaattttacctcgcattaactttcaaagatagttatagttttcttaaaaatagtttaatgatatataatcaatgaccaatcatcaaactaatgtcttcgtgaccgcatcactacccaaaacatcttctcttttaaaataatgaatatcaaacttgatctttatttcactcgaagctacaacacacaaaatccaggtaaaaaaacaaaaataactagagtcgttgggaagcatgctaatgttaatgttaatttagaaggtcgttgataaaagagtgaggtgcacatgcggtccttaaacttgtacggatgtgtcatctatatctctgaactctcaagatgtatttctgggttcccgaacttgtcatgagtatcatataggtccaaacgaacttcaacccgctccgtaaaataacgtagcatgccacggtgacgcttacgtgtgaatgggatttacatgtcagtcacatagaaaaatataaaatttaaaaagagaagagagaggagaaaatgatgtttttaattttgaaaaaataaatgaaaaggagtggagaaaaaatatgttcttaatttttttctatatgtgaatgacatatgggttctaatgacacgtagtcgccactgtgacatgccacatcagcacaagaagcgggttagagcccgtttggatctatatgtgatccgagaaaagttgagggacctagaaatgcattttgagagttcagaaacctaggtgacatatccacacaagtttaaggaccgtccgtgcactttactcttgataaaatgagcgtctaacatggaatcctccggatattgaacctaagcacttttgcttcaatcgaagctacatccacttattacatattttttgacacaaataagtctaaatacaaaaaaaacaaaagaaaggttaggtcgttaagtcgtcggcaaacatgctttttcgtcgataaaatatagccacacattaccacaagtacacgacgacacaatcaacatatccacctcacctatgattagcttaattagctccaacgacaactaacgaaggcatatccatatgcatcgctcttcttctatctagactacaggtcaacaaaccccttgccctatttctactttttttgtcgatcacgccattgatcacctccaagcttagcttcgagctccagattgttagatgcgtgcatggcgatggaggcggaggaggaacgtgacacgcttctgcgccgggtgctgatcagggcggcgcgagcggcgagagccgcggttcgcatcgctgctactactaccgcatcgtctccttcttccccggcactggcggcggcgctgtcacggacgccgagcctgctcgactgcatggacggcgacgacgacagcatcttctacacgccggcctcctcaccggtggtcgtccactacccgaggcgcgtgcaggtgcagcagcagcagcagccgtcgttgagcccgtcgccggtggccgcggcggcggcggcggcggacgacatcgataggcgcgcggcggagttcatcgagaggttccggcggaacgagtcgctggagctgcggtactgcgcggtgtactcgccgctgacgcccgccaagccgcccatttcgccggacacgtacttcaagctctccggggctcatcaccatggcgcggtggcggccggtggctcgccggcgccggcgccgagctcgctgaggcccagaaggcccagtggcatgtccatcaagtggcccacggccggaaggcccactgtccgagtctagcgcacgtacggcatatctttgggacgctcctatgatagtttcgtgattaaattggtattaaacttgtagttttgtgataatttttgtttttaaatctgtagttttataatacttcttcctaaatcggtagttttacgataaatttgttgctaaatctgtagttttatgatacattagtttaaatatgtagttttgcgatagtttggtcgatgtatttgtagttttatgaaatttactctaaaaattagtttgcacttcaaataaattgtatattaataaaaaattagaatgccaccaatttttttaaccgattcattcatagcatttgctgattgatcctaagtactgataagtggtaaatcatactcccttggttcatacctccgttctaaaaaaactatgttttttatccaaaaatttgtctcagcaaactataattttatactgagatctaatatacctctttaatactatattattgttttcttttcattttatacctctttaatactattttattgttttcttttcattttatacctctttatactattttattgttttcttttcattttagctactgaaccagtactatactccctcctcttcctcctacctaatctaaatttgactagctaaaactataggctttaaaatattggcggttgttaaaccccattttgaccaccaaccttaaattgggtaaaaagacgttcaaatgtaatagtttggtttagtttaatctattcgtatagttttgtcgtgtgttagctattttaccgaagtcatccaaataaagctgaaaatgcatgcatttggaaaaaatggtgccgaacaggctaagaggcccgacaaactggatcgaccatgctgatcaggcgatccatgctgatcagccaccctaacacgacaagtgtagaaaaagtacatgtgaggtccctcgtcttgtcatcggattatgaaatcatcctcaaaccataaaaccagatatatgtcatcccttaacttataaaaccagatcattttgggtcctcaagcggttttgatcccggttttatccggcgtggcaactgagtcaagcgtgggacccacgtgggccccacatgtcagtgtccacgtcatcctttactctctttcccaccttctctcccttcttcctctcttctctcccttactcctctctctcactcttccggtcttccctgggcaagctggccagctgggcgtggcaaggtgggacgggaggagggcggtagcggccggtgacggccgacgtggtggcggtggcagccgacgacgagcggcgtgggagaaggagaggcagcggctcggtggtggccggtgacgggcagcgtgggagaaggagaggcggtggctcttcctaccaccacaacggcgctatccactactccctcatcgccgcgggctccagctccgattccctcccctccctcctccgctgcatccttccatcctccccatccgccgaatccctcctcaccgcatcctctccgacggtttgcttcccgaagtggataaggaagagccacacgaggctagcggcgcaaggcgggagaggagacgacgcgacaactggcgagaccgacactggcgccgcccgagctcctctagtgccgcccaacgacagcaacgctttcccggtcgccgccttcccagacgccgccgccgtcgcgttcctaggcgtctccggcgaccacgcactcaccgtgtcggcgaacgccgattccggcgggatgcaaagcttgggaccccatcggcggttggcgagacggaggtggtggtcgatgaaggtgtcgaaggagagcgcggcggcccaggcggaggagaggctgtgacactggagcactgacctgggtgggatgcgcgtgcctcgctcgcctccgacgaggccgatgccgtggcagactgtttagaggagtctgtggcgcgccggccccgcgcggagaaagaacatctcctcccctgtgtgtgtttgttggttccccccgcccccttttgtcccccaagtgtcctcctcttttcccgcgtggttcggggggactcctccccatccgtcggccggcttgcctgagaacaggagaagagaagagtgagagagaggagaaagggatagacagatgatgtggcagcctgacatggggggcccacgtaggtcccacgctgacttaggcgccacgtaggatacaaccaggatcaaaaccaccgaaggacctattgtgactggttttgattagttaagggacgccggatatcttgttctgcggttggcagacgattttgtaactcgatgacaagttgagggaccttcggtgtactttttccaccagtgtatacttttccctaccccctctatctctctcctcttttcctatttctcccgacgaggaatcaacggtagtggtggtcagcgagcgtgaacttgccaacccatccgcgggaaggcggcagctatgttacctcgatacggcgatacggatacggatacgcgatacgtcgatacagggatacggtatttttcaaaaaacaaggatatggggatacgcttatatatttttatatatattagaaatacaaaatattaaggatttttttaagaaaatagcaatataatactagtattagtgcagttgcagtccattccatgaccatcctctccaactctgctatagttgacgaagcgatttaaggctccccccccaaaaaaaaattgtgtgtaataaagcgcaagactacaaatagcatacaaagcgcaaattaatagttcaatcaacacagttgctcttgatggatgtgcatcaacattagcagccgcactacccttagaattgctagatgcactagcacagactgcacagtagcatttggaagttggatctaacaaaaacgatagtccttgactacttatcctaaaataaaataatagaggcattgcagatcaagcatggaacactagaggagtggatttatctcaagtagtgagggaaacaaataaaaagctgcatgggtgcttcgatgcagctggtgctgtcttgccttgggcggtgacggccctggtcggctgccacccggcctctaaactcgtggcggaggtgctgtgcggctgtgcatgtgttgcagagcaggtgctgtgctgccgggtgcggcgacgacgcagttgctacccaacgtgtggtggcgacatcgaatcactgcatcgggatgggagacgacgagacggcggctctgcatcgaatcactaatacgtacgggatacgtatcggatacgtccggatacgtatcccgtatccgtcacgtatctgatacggatacgcggcctagaagccgtatccaggtaacgtagggcggtagtagtggtcgagggccggcaaggaggggccgcggtagtccatggtggcataggagaggagaggagaggatggaggggagggagctggcgggtaagccatcccatccatggtaaggttacaacggaggtgggccaccatgaccaacgtgtcgccgtattcctcccgtgatgcgcctccctttcttggccaccatcgtcatgggccacgtcgcgtcggtagcaggctaatcgcctggtaatgaactcgacctgcaagatgaattagcagccagccaagaacatgtggtcaataactcaatatcaatgctaaaatgttgatcctattcttggcaattctttgaattaatcctcaaaagaagacaacaactcagaactgtatgcatgcattccgacagatcgatcaaaatatacaaagctatgcttatgagaagagaaatgttgggtttactcccacatcggtaattgatgatgggggagcacgacttaaaaggtggaagcggtcctaacccatcaaactagcctttgggggtgtgttgaacccaaaccttaaatttggggttttcgttgggcctggggggaagcaggtccaatgtgacctgggtggcccacgattggtgggccgggctgcgcactgtaacaagtaggctttggtggtttgacggattctgcggacggcgatggcgctagagaggacaggcaaggatccgttatggactaaaccaccaccaaaaccgttttgtgacacaaaatgaaccgatattagtaattgagagatgttgtatattccttttttgcgattgagggacaataatcgaactagacccatacttgagaggtgcaagtgatttagatttggttgcaacttttgtggcccaaaacgggttcgatatatccatggatttgcactggatggtagaacgggtttgcttagcccaaaatggtttccactcccattgttcatcaatccccaaacccttatgtcttcgtcgacagtcaatttcacgagtgtggcgcctcacatctcgctcgacgcgccgccgccatcaagtggctcgccacctccctcctccccacatcggtactgccttgctcaccatcttcctctccgtgcaagctgctgtcgccggcggccacaatgtcgccatggagtagtccatcttcgaggtgatcgagtctggccttggcgttctcgtcttctcgatgatgatgtgtgctgatcgccaccgacggccaacggacaaggacgaggactaagcgatctatgccggtggcacctagccacctggggcctgagcaaccaccggtggagaaaacatctttagccggttgaccagatttcacaatagtcccgattatattaaaaaccaggacaaaaacatatttaatcccggtttaaaagcttagaggtacttttttaaaaaccgggactaaagatctatttttagtcccggttggtaacaccaacagggaaaaaagatcgacatacacagagtggctgcgcgtggatcggatacatatctcctctccttttaactcctcctcacacagtcacacccttatctcttcctccccacctgatctacagcagaggggcgtggagggctggccggccggcacgcggcggctggcggcctcgcggcgcacggagggctagccggcgcggcggcggctggcggcctcgctgcggcgcggtgcgtggagagccgggcggccgccgcggaagcgggcgtagcagccggtgcggcagcgggcgtagcgccggcagccgttcatttttttctgagaatccgtgattcggatctgagatttgtgtgtgatgtgaatatatgatgtatttgatttgtgtgtgatgtgaatatgtgatgtatttgtgatgaattttgtagaagttgtgatgtaatttttttaagatgttgtgatgtatttggagatatcaattggagtatttgaaggcgattcggggaggattgatttgggattttgagatgggatagagtgaatcaatatattaaaaacaatgaagaaaagagtaaagtagcaactggatcaagcctctttagtaccaaccgggatttaaaaaggctctatttttagtcccggttgatgttaccaactggatttttactcccggtattaaagatagcgatctttagtcgtagtcccggttggaaaaccagaactataaggggattacgaaccgggagtaaaaaccccttctccaccagtgaacggggggttacgaactggaagtaaaaaccccttctctaccagtgaacggagatcgtgccggccggtggatgctggatctttcgcagtgcccgcatcgcaccaatgcaccatcgtcctcgtagaagtcgacctccgctcaactacgaacaatgtaggtttaaaatccgagaaaaatgaacgaaataaccaggaatgattttagagcggacttatactcctacttttatcggtttacaagccaatgcctgaaagcaggaagcgatgaataaagaaaaacatctggactaattcgaaattttgtttgaaaacttaaatttgggttgtagtttataagatgacaagctgcgcctaccgggttttcggtgcattgctgcagtgtggcgtacatgtatttctagcattctctgaaatgtgcaacagcggggtttcattcaacaggagtgaacggtacatttattcgtctcttcaatcccaactaattattaatggtaccattattttttctttgcagaaaaatatgaagtggttctttaatccatcctcactgccaagctgttgctggtaagtttgcagtcgattgatcttcaattgcagtttgttctgtcgtccaagcattgtttggtgggagcacgcagtttcctatttctgtaaattattgaacaagcactaataagataaccatttacttcttttactacttgaaacagaagtgtgcaatttttcctaaggaattaatatgtacattagtagcagtagggcatatatatcatgcacagtaaaatgagagaaaactcacttggttgctggttgacaatagaagcagcacccgcaaagtcacacgatccgctagcccgaccggtggtctggtaaaaattgttgaatgcataggtcgcgtgtgccaccttagtgtcaggatcaaagcactgtgcacctggttgaatggcgctgcagtccgcacagctaccacatgcatagtctagtgcattttgcagccgtgcgtccccgaccctccgatttcgcaacacaccaacttgggttcggatcacatatgcctatatttcgggaaacaattcacaaaacaaataaacaatgagatggaatcaagatatgaatgcacatttgcgaaaacctcattgatcttaaagattgagagcaaaacattacttggtgatggcttgaatacgatggaagcggcgccagagaagtcgcaagtgccgctagcctggcccttgcgttggtagtagtcattgaatgcgtacgatgcatgtgcgaccaaggtgtttggctcaaaacacacactgccctgttggatagcgctgcagtccgcgccgttaccgcacgcaaagtccaacgctgactgcaatgctgcactcccaacatctgctctcgccacacaccaactcgtctttgtaggacaagctccgccaccgccaccgccccgaaagtcaacctcatacaccttctgaccatttgggtagaacaagccaaagtttctctctatggttggtccaggcttctcgttttcattgaaaagagagaaaatgtaggcggagacgtcacgcataccggaggctccggatacaacacgtctgataagcccattgttgtacgcttgggcgttggctatcgtggccaccgagtccgtatcggctgcagctagcatggaagataggggaaatctacctccagaggggtgccctgattccgaagcttgcacactaaggattccatctcgtcgagccattgagaccgttaagctaccaccagaaaccctgtttatcgcggcgtaaacagcgtcgagctgagcatcaaagaggctgaagtacctgatgtcggtattgccatcgagcaca

SEQ ID NO: 24555 - DNA, 9463 bp, Oryza sativa
caccttgatgccggtgttcgccatcgcggccagcaccgtcgggtccgcgtcgaagatcctcaccgcggagatgccgttcgccttcagaaggctcaccgccgccggtggtcgatcaggtcctttgcgtccctcccgtagcacaccccgatctcgcccgcatctgcattgacgagcaaaaggaattttagcatcgtttggcgttgccgatcgatcagctactactagtccaaaatcgaaagcgtttctacgtttgccatggttacctgtacgggagatggagagcagcagcaatgcggtggcaaggaggagggagcagaggaggtgagtgagtaccatatgtgctctgatagtttgatcaagacgaatttgatggttgggacaggactgaggtgcaggaatttatagcaagctagaaattaaagcaacaaaagtcatgccacgacagagtagagaatgaagaacttgatacctaactgagttatgaaggaaagcacatatatgccattagcggggtagggggcataattatgtactgcttcagcttatcattgcgcttgtttatcatcattaggtgaaagccacatatacaagcataacgcatcataagcacgtccgtgcgggagtgtgtcactaacacatgctcgaagaaacccaaggtagcaacaaatgaaatccatccatttagcatagatcatttttttggaagaatctatatttcaccattgacagatcatcagttctacaacctacctttaatgacgaagtgaacgtagctgaactgatcattagcttccttgtggtggaacttgcttacctgggttcaagtcgtagatttgacacgggtgctcgcatttcactggtggagaaaccctttgtagtcccggtttgtaacccccctttagtcccggtttccaaaccgggactaccaatccgggactaaagatcgctatctttagtcccgagtgaaataaccgggactaaagatcgatctttagtcccggttggtaacaccaaccgggactaaagatggctcagccacgtggccggctgagccttaccaaccgggactgaagatcgagctgacccatttttttttacatggccctgttgctgaaccatgcatatatatgtttcaatacatatatatgcatacatatatatatatatatatatatatatatatatatatatatatatatattatattatattatatgtatatatggttcagtacatatgtacatgcataatatatatgtatttatacaaatatatgttatgcaaaggcatatgtgtgtgtgtgtatatatatatatatgaccaagatatatttacattatagaaaatgtgtacacatgcatatagaaacatatgtagtcatgtattaattacaatccattatatgtcctagctaggtacgatttcgacgtagtagtagtcgctagctcagaagctaaggaccggtgaattgtgtttccgtcatagtagaattcacccttgggatcaaggatttctttgttgatggatcccatgagttgtgcttgaaccgccgcgataaattccttgtgtgtggtcaggttatccctcatgcgaataaactatatgaatgtatgaaattgattagtaattaaacaagaaatcgttacgtaatgaaattttgaatttatttgtacgtacatcgagctctcttgtggtgatgatttggtctgcaaggcagtggcaatactcgcacacgtagtagccgcacaagttagttccctgcttttgctttgcgcactacaaataaatgacaaattaacggcgtgagatctaattgaatcggagaaatataaatgtagagcatgtgtactcacaggaaatttgaacctccgcctaagtctttctctccagttgccgcggaccaaatgacggaaccgataccaagccctacatggagtttaaagatatgattcgtagtagaaataattaacataacaagaatttcttaattaacagaggaacttatgacagtatatgtctataagttcgaaaaccttgtcaaacgtagactcttttttatccatttagtcatatacattgacggtgcaggccgacaggtcgaagagtaaaagcacccagtggatctgcaatgtgcgtgggatgcattacatatgaaacacttgcaagtttgtacgggaatgaaatttggtatgtaggaagacagtaaaattaaactaactctatgttgtacggcaacagtatgaacgtcttgtaatgctgcgtcttcaagagatggacgagtttgtcctctgtttcttgcggatattggtcgagcattgcgacgtttactctccgagggtcgatgaatccagtatcgaaaaccctccgccgtcgggccctttgaatctccattctacaacgataaaagggagtattttattttatatagtctacttatatacaaggacctaattaattaaaggagacgtagtaattaagaaatataactgaacgaaatacttacaaatccagcaactcataatagacacgtcgagggcgtccagctggtatagttcgtagattcccttgaaattgatccagagaatgtcatctccttgcaagaagtccgggtccctgatcctcgctccgatcatctctctaccggtggcgctcatctccatgtacagctgatggaacttgtacatttgtgtgggtagggactgcaccagctcgggcttaacaagcggtttaccgagttcgtacatgtatttcagttccgccttttctattggttcaactcctagcaattgatcgtagttagaccggtgtcagtaataaattcttctatcgtcatgtcttccccggtcaccaacggctcgatctcctggtttggttgctctccaagctgagggactggtttggactttgcagaagatgctttcttcagcgttcactcatagtccgatagcttgatggcctccttgacaggtgcagacatacccctgaagaagttcctgacactcgggtctataggaatcttcttttctagacttcgaggcttgaattgtctcttgacttctgatgccacgtaagcgtcaagctcctcttgtgtagacccccatttttataacaggaatcaatcgtataaaccgtaccatttccctggatcaagtagtctggtacacacgaactcatagctgaaatatcaagtgcacatacacgagagtctagtacgaattattacatcataagcccgcaggcacagtcttaaatcatcggaccgagcgatccagaatacattccaaaaacagaagtaggtaaggcagcggagttaaggcagcggcacgccattgccacaggcaacgaccgtaactaagacctactgagcgccatcatcctcatcactctcctggtaataggcatagggatcctccgaagcttcatctccggcctctgattaagtttgaatattgcaagggtgagtaccaaccgtactcagcaagccaccacagcaataatgcacatgacagaggaattcaaaggatggctatggttcttttgcgcaaagcaagttttgtaattcttttcacaagcctaagacctagcatagactgatcaagttttaataccagtgttcacattaaacaacgatggttctgtccaccatccattgtgatcccaaggatagcttcccgccattgagtcgtcatggttttctgaggacgtccacattcccgcctctcaggaagtggctccgtcagcataaaaaaagtcatcatgtaatatcccatcccacacaagttaaagaatttagagtctagccaagtgtaatacatgtcccggtgctcaataaccgcgagcacggctattcgaatagatttggtttactcacactgcagtggatgcacactttacccgcactccgcgactgcccaacacatgagcctcgtcccaacatatgagacgcgtcatggcaaagcttttcgataacctcgcattggcagtacccgctccatgaacttaaatcctcatgcactctaggcgttcatgtttctagcagtgagaggagttctggcgctcctgggaaagagaagtctcacacacatattaaattatggttcaagttaagttctctctctcacacactcatggcagtcctaccaatggcgacaccgatgtagggctcgcctctcggccctacctcaacggctgtcctaccgtagcgcacctgcctcactcaggggtgaaccatctatgcagggatactgcctccgctcggctatctagtccgctaggtctatacccatacgagaagtgcggttgtacgaggggtcgtttcatgcttagcttcatggctcggtccttaattgaccggggacggtactagccttttccagataccacccaaatcctccgtccgccccagtcgaaaataattgtttaattttatttctcctttcacaaatcatgtcattaacatcatggcaatgtggcgctcatgtctccacatgccgcatctcaattaccatcccaaaggtaattgcccaagcatatagcatttgataaatatgagtatgcatgattctagaatagcatttctaagcaattgtcataattgactagggactcatacgtaaacatggttacgaaggaataaggggcaaacaataatcaaggcatggcataatcacaagtaggatgttcatcattgcatgcaattttatttgtaaacaaaacaatttcgcaattgggatcaacatgttcaatggaatagtgatgacttgccttgctcaatgttcttgcaggtcttgaccttcgcttggatccgcaactccctcggtctctatagttacgtgcgaaaattgatttgaattcggttagaattcaaataaaaatccaaataaattccaaatgaaagtcgaatgcgaaagtcgatttctttatattaactttattattcgcgaactaaggcaaacccaatttcgattcaaactattttgcgagtataaatattttgttgtcataagtttttaatttaatctacccgagcattatatccatataataggttagaaatttctatcgcgagctaaatatcggacggaatcctagaaatattatatgatttaatttagcctatgactaaccgattaaatataatatacgtctaaaattcctagtgattaaatcctaacttctaccgtgaatcgattacttatagagattatccaaaactaatctataatagtctacaaaaattcatctaattgtttagtcgttaattcttttagaaattaccaagaataatctataatttatattaaattttgcaattctatgcccataattaatctataattaaattctaagtattctagattgtcttaaactattaacctccttaatttcgtcttaatcctcgaagtaagtctcccctccgtattccccagtcgctctgctcggattcgttcgttatcgttcgtttctctctttctctttttctttcttttctctctttctctctttttctctctgccggcctctcttttcctctccctctctctctcggctctctcccacccgagcggcggcggcggtggacgcgagggggaaggagagcggcgatgacggtggcggcgacggtggcgcacggtggcgcgggagcggcggcacggcggcagggaacggcagcgcggcggcacgggaacggcggcgcggtgcacgagagcggcggcgcagtggagagggaagaggggaggaagggtgagatggggtgggggaaaatggagagagggggggtatttgtagagaggggagaaggagagggggaggggcggcggcgtaatggcgacgcgacggcggcgctcggggcgggacaacggcgacgcgcgggcggcgacgcgatggcggcgcggggctcggagcggcgatgcgacgggcggcggtgcggggctcgagacgggcgacgcgacgggtggcgtggggctcgacgcggcaatggtgacggcgcgcggcgatgggacggcgacgcggcgggtggcgagcgagcggcgtgacaggcggggcgacaagacgcgcgcggcggcacggggctcggtgcgatggaacgggcgtcgcggcagcggcgcagggcgacggcgaggggacggccgcgcggcggggcgcaggcgcgaggggacgggcgcgcggcggctctaggcccgagtcctacggcgacacgacggtgacagcgcggcagcggcggcggcgcgcgcaacgggcgggcgactcggcgcacgcggcaggggagggggcggggctagggggaccacgatcgaacacctatgccgcaatgaacagtaactttccctatttatcccgattttagcccattttctatttaaatatagccctataaattctaatttttgcataaatgaagtttactccatatttgtgttatcctaactaaaaattcaccctaatttaatatcactcatattttgtttatataatttatttgaatttttaattagggttaattctcattccatcgtactaaaatttaattattgctaatatggtcgcgataatattttatttatttccaatcccacctaatctttattttaatttatattttaattatttatttagccaacttgatttttagggtttattcctagttagttattcattattcgcgattaataaattccgagatcaaaatccaatgaaataggcgaataaaatcggcatgatgcaatttattacttaaaaagtttttgaaaatccatatttttggtgttttgatttcgttggtcgaattttcagggtgttacatcttgcgtgcaatcgtaccccgggtccttgttcttggcggcgtcaactttcgccttcttcgttgcccttgcgtgggcaggcggtggagctgggggggcccttgactttgaaggtgtcggaagaggagcttgcggaggagtaggtgtaggagcccgaggaggagtcggtgcaggatcctgaggaggagtcggtgctggagcctgaggtggagacggtgctggcggagcatgaggaggagacggtgcaggatcctgaggaggagatggcggagccggaggagatggtgcatgagacgccgcttgtcacccagggaggatgatgtaccgcctgcgccatagaataatggcatggcttgtgtctcgtagatgcgtctcaccatctcctccagggtaatccagctcgaggtcctcgtacgcgccttcgaccaactcaacttcgaccttcgagtatcctgctggactcggcctgcagtggtaagtacctgaagggttcgttgggatggccatgcccgacgccaccttcaagttgtgagagattatttattagtaatcacatatataagcagcaactaccggaatggctaaatctaaaatataaactacgagcttacctttattgataagttcttgaaaggaatatgcagctcacatggtgtccgctgagtgatgtcatcaacgggacaggtcgattcgtcctgtgtttgcatggcgtccatgctctgtgatcctacctgtcccgttgaggcgcagctgctacggtttcctgacgggctcaccattgcaggaggaatggtcggctggggatcatgggactgatgtgcggccatgcattcatcaaccttccctgccacctcctcttgcatgctgagctcgtagctcgatacccggaactctagatctgcaatcttcgcctcggtatctctcttgctcctcatctgactcctgtacgtgtggatgtcctccttaaaaccaatcttccaaggaatcacccatttccctcgtgttcgtcctggatgctctggagtctgcagggcgagtgtcagctcgtccctatctctgtccggtcggaacgtgccctgagaggaggcttccactgcatctgttagtcgtcgcgcagcctctcgtatctgatcgccgaagactagtgagccatcagctaggttgagcgttccaccgtaagcatagtaccagaacttcgatcgttccggccaattggcggttgccggttcgatacccctctcaagcaagctagcctccatctcctcccacttcggcatcgcgacgctatagcctcctgaccccaagtggtgatgatacttcttcttgggggcattttctttgtttctttccatcatcgcctgcccttgttcacctgtcttatatgcaacgaactcgtcccagtgatcccttagctttgggaatgtgtcgaagttcggtgtctgccccttcaggatatacttctggtacagatctcccttgaagctctgaaactgttctgccattttcttcagagtccaccttttcactttgtcctctgtacccgcaggaagggtgaatgtctcgagcattgtggtccacagcatctctttctccgaatctgggacaaagctctcatgatctccgcgtgcccttgttcttcgccagtacaccgtactgacaggcacgttatcccgcacaacccaaccgctgtgacgtacatagttcttggcggcttcggccggggcactaggacgtccatcttcttccacttccgttatgatgtgccgaccctcaagcttcttcgctgcacctcgttgcccgcgtgccctcttctgtccaacggagggttgacttccactagcctcctcctcctggttcccctccacatccctttccacgtgcccctggtggttcccctccgcatccctctccacgttcccttcctcgttcaagtactggtttggatcctcgttcccctcttcttcattccagtactggctgcttccctccgcgattgtatcgtacaatatctgttcctcatcgcggtcagccatctgttgatacaagaaacatctgctaagtcatgagacatttatgttttaacaatctaagtcatgtatgctaagtgtaactatcgtacattagaaccctacacaaccttacgtgctaagtctaattacaaatcgtgatataagctaagtctaggtgacgtatattatacaaccctagctagtcaataattatatactaagtctaattacaaataaaataatcttataataaaactcaaataatattacatgctaagacttaaatagtcatgtatgctaagtgtttcgtgcgtatatgctaagtctaattaagactacaatagtcaattgctaggagtcgcaccaattctgtagtcaataattacatactaagtctaattacaaataaagtaatcttatattaaaactcaaataatattacatgctaagactgaaagagctagtcatgtatgctaagtgtaactgtcgtatatgctaagtctaattaagactaaaattgtcaattgctaggagtcgcaccaattccgtagtcaataattatatactaagtctaattacaaataaaataatcttatattaaaactcaaataatattgcatgctaagaatgaaagagctagtcatgtatgctaag

SEQ ID NO: 24556 - DNA, 1296 bp, Oryza sativa
aatcatatatacttagcatatgaatgatattattaaattggtaaaagctctaattaagatacgtatgtacatactgtatgatttaaaattaataaaaattgtaatcatcatatatacttagcataggaattgtattaaattaaatgttaaaaactctaattaacatatgtaaatgccacaggcatgatttaaaccttttaaaaattcgaatagtcatatataagtagcatatgaaagatagtaaattaaattgtgaaaaactctaattaacatctgtaaatgccacatgaatgatttaatacttttaaaaattctctagtcaattataattagcatatgaatgatagtaaattaaatgttaaaaactctaattaacatatgaaattgccacttgcgtgatttaaaacttttaaaaattctctagtcaattataattagcatatgaatgatagtaaattaaatgttaaaacctctaattaacatatatatgaaattgccacctgcgtgatttaaaacttttaaaaattgtaagtatcacatataactagcatatacatgatttaaacttgttgaaacctctaataatcatgcgtaattaacatatgccatacatcaattgatttatatggataatcaatacatccaaaatagtttacatcgtgtacacaataattacggcattacatcagcggtgacggttgaccgcacgtactttctcctcactattgttccctccttgtgatcgctgcgtgagtaaggggtgtcttcatttgataggaggatgctagggtcaatcgtcaccatgaaagggggttgctcatccaactgatcgtaatgctcgtcagtcttgtcgtcaactccgacgatttttcttttgcctgggagaaccacttgacgcttaggctcgtcaggccctctgcccttctttcctttgctagacatgtccttcatgaaaaagacttacgttacatcattggcaaggacaaaaggttcgtccgagtatccaaccttgttaaggtcaacagttgtcatcccactgtcatcaatcattacgcctccactagtcaacctaacccattggcaccggaacagaggaaccttgagaggaccatagtcaagttcccatatgtcctcgatggcaccgtaatacgtggcagttgttccatcgtgtcccatggcatcgacacgaacagcgctgttttggttcgtgctcttcatgtcttgggctctcgtgtagaatgtgtacccatcgatctcatatccctggaatgtcgcgatcgacccagacggtcccct

SEQ ID NO: 24557 - DNA, 686 bp, Oryza sativa
tcctggatcgtctcgtctaatcttgtatcgtagtgctttgcaaacagggcatgcttctaggttctcatactcctcaccgcgatataggatacaatcgttcggacatgcgtgaatcttatgaacttccagtcctagcgggcagactatcttcttagcctcgtacgttgtctcgggcaatttgtttccccccggaagaatgttcttgacgagtttcaataaatcgccaaatgccttgtcactaaccccattttttgccttccattgcaagaactccagagtggtatccaactttttgtgcccctgctcgcaacctgggtacaacgaagttctgtggtcctccaacatcttgtccaatttatgggcctccttttcactttcgcagtcctccctagcgtcctgcaacatctgatcaagatcatccgcaacgtcgttaccatcagcagctattttctcctcgcccgtttgatttccttcaaatccaacatactgagcaaagtccggaatattgtcgtcttccacttcatcttcttccatttcaacaccttgctctccgtgggatgtccaacatttatagcttggcatgaaccccgactcaaacaagtggaaatgaatagtcctggatgcagaatactccttctgatttttacacttattgcatggacaacaaataaaacccctttgcctgt

SEQ ID NO: 24558 - DNA, 2805 bp, Oryza sativa
ttcctgcaccccctcaaaatattttctaaaagtgattctcattccttatttttcacttctggtgtttttcggacctgttcgaaagtgattttcggaatttccgaaaatggttgtgagccgaaattcggtactggtcattttcggacttgtctaaaagtgtttttttgggaatttccgaaaatgattgcgctcaaagttttggtactggtcattttcaaacttgtcataaagtgattttaaaatcattgttgatatttcatcgatattactagaaatataattcctagcaattgcaccgaaatattcttggtatatttatggttacatatgtgatccgcaagcgcacggatataccgttgtagcattttacccgggagtaatccaaggtatcatattaatttaatcccaaggaaagatatgataagaaagtactatgctaataattcatatattacttctatagagcaaagtctatgcaggggttaattaatgcaaagggtaggacaaggttgatacacaaaagaaagaaccaagatacttttcactaaaatataatctaggcaaagtggagaaagaataagaaaagaatcattcatataattcttgtatatagtttatttagtttacgcttactagtatacaatcatgcaaccaatacccctagctatgcccttctagtgtttctagagaccacccccgattgccgagttccttacaacaacccgtcatggccatccgaccggtaatgaatatgaccataccgggaaagtgtcttaggattatatattaacatggaggaatgctcgtactatgctgtcaccatcagcagcccacctctactgacctgcaacatataaccccaattaatggtatcgaataatctaagcaccacacttacattattagattatactcgacatctctgtagatgacatagatcaatcatttgcatgaacattaaactcgcaccaatgcatatatctagtaagctagctacacaattatatcgagacaagtacaaactaaagtcggtacttgagaaatgtgaataaagtaaaagaccgaaattatataaagtagaatatttcattatactataagtctcacaaaagaaggaagagctactagagccatacccgaaatctcctaaagactcgaggactaagaaaactattatgtattctattcctactccactcgcactagaacaataaactaaacttgagagagcttcttgatcttcttcttgatcttcttcttgaatgagcacccctttatattgcctctcaatgacggttatggcagttggaaatgctggaaacaccctccaacaatgacagtgcatctggagcgtgcacgtggaagaccaggatgaacctgggctggcccatccggcctccacttttggcaggtgcgtcttttgttgggctttattctccgtgatgtggtggttgggcctatttgatgttattttattggatatgtaagcccatccacccatgagtctacctctcgacgggcggtgattgattgttcagctatttttaaacaaaatatgtagagttctcagcaaacaaataaaattccaagtacaagtggagatagattattcttaaacaaaatatgcatgcaagcatagctagttctccttaattccggttatattgtcggccgaaattggtctataacaaccgtcaacaatcactgtgcatcgaaattttggatttgattattttcggacttgtcctaaagtgatttccggacttaatttttagaatttcagaaaataactctgcatcaaaaaaattgaaatgactctgcatcaaagtttttgatctggtcattttcagacttgtcctagagtgatttttttggatttctccgaaagtgatttttggatttttctgaaaaaatgtgtctttgctctagaaagcagttctaaaactactacagccatctcaaaatataggatcttttagtcacacactggtgttaagaaagtaagtataattaagtgggaaaagattagtagttgagaagaggagttaggtgaagaattcgaatagtggaaaattgtgattgattacgaagagaatgtaggtgaaaaaactattatattctaggataaagttttaatgttaaaatttgctatatttcccaaaaagcattgcaccttatttctttcagaatgcttttgatatttccatttgtataacatctctaaacatattagttatactagaaaaacgtcccgcgcgttgccgcgggatcgcatgagattagtgaggacactaaagcaatgggatatttatatatttatttcatggataaattattttttaggaaaaatgtgttcaatctaaatgaccatttgagggcttttaaagtaatcgacaaaatgttttttttctctttatatgatcttttttaataactaacgcctatctttttggcactaaatattcctttctctatattttttaggagttttaaagaacccaacattgacatattatttccttttatttgcatagaattgacattatacatgtgaatcatccaaataatcagcctcacacattcttgtgttcgtaatttacatgtttaatgtttttcgcccgagatgtgtttctacatcttatcacccagtttcaaacaaatagtatgtgttaaattcagacctctactctacaaaataagtttttcaagttctgtctcgatacctcgatcaccttttccttgtcaatactaatgcgatttctttacttaatttcctttcataagttcactacctaaatatataag

SEQ ID NO: 24559 - DNA, 15705 bp, Oryza sativa
taactccaatggataggggaatgcgaaccaaataagcatggcaaggaaatgagcgacatgcttatgtgatgatcacgtttcattgaacttgttgaattgtggtcagcagtagttgttggaaaagacacaagatcaacatctagcgggtatgatttgatgtaccctgaacgcatggaataatgtgttttcatatactaggtcataactccttcattaaccatccattggattgcttcaaggctgaggccggttgccatggtttggtggctattttgactagcagaagtttgatatccatttccctagccagtgccatttgccaatttggtgcgaagactagctagctcatcttctttttgctgtaatgcagctgtgccctgagccaaccattccgggtgacagagtttaaggtcaacacgcctaataggaagcaaaccctgacgaatagataatcaaaacaatatgactaagccaagcttgagatggtgtgctcgattgatttgcaagggaccatctcaaaccaatggataatcaaaccatccttgcaaatctttgcataaaaccaatggatgttggcatctttgcataaaaatttaaaggtttcttcaagaccaaaacgcttgggggttctaaacattatgttcatcatcatgggtttccgagaaccatgactgtaaaatggaccaaggggcttttcgctttaccaccaaagataccaatcaaataaactccctccaacttataacatgatgaataggctaacaccacttcatataagaagggccaatagggtttgtgctagtataatgaacatataacaggttgtgctaaagcatatcgacaccccatagctatctaagatgccatcaccaatgccctaggccaaatacgtggccctcccttgatgacgacaaaactataaagccatagtgctagaaaagtcattttgtagataagtgaagattcaatatcattaggaagaggtggacctcccagacggttatgaaagtagtcacaccactcttggagcaacacctcaccccctacttgtaactcctcccataacttcagaagccatgataaacacttcggttttgggtacaacagtaaaaggggatccagttcatgatgtgtaggaataaattcctcataaatttttttgtctaatggcaaacccgcaatccgatgcatatctaagagtgttgcagtacgctcaccactctcgaacaagaaagtgttcgcgcctgggttccatctcttcaaaaaggatttcagcaaagaaatggagtagcgtcctaaagagttgaaaatagctccatagatacaatcagtaccttccccatccccttttagatttaaagagtgtttggctagaattgcagcacccactttgcataccccgaaggaattaggacatattcgatatcatagttttcccagccaaggccttctgatatcatccgattgcctagaggaaattctctcttagattgggatgtgggtgctagagggtagaaacggcggtctgaaattgttgacacctattttcatccacaagcgatattatccttctcaccttttcttaactcatattctatgactatgggattggcctcaatataagagagaataatgaccatttttacccatagggtaaaattgagagtttacacaatgtcatgttgcatcaaataaagtcggatgataaaaatgaaagctatttctattttccatcaatgagaaaaaaaatagtggatcataccaatggaatcagttgatgatccggtgggataaaatggatattttgggcatgctcacttggatgcctaaatcaatcttaccaaattttggcacattttgacattaccaaattttgatagtgtttgctttgtttgtttttatgcctttaccaaattatgatacagttttaagggaggaagcttctagaaatactaaaatttggtaaggtagcaatggttgaagtgtgtttagtttgctacttacagaaatttggtaatgctaaaattttgtaaggttgaaagtgacaactaattgaacaggccctttctttctctaacggttgactagtggcaatggcatataagggcataaaatgagttattctatggcatattatagaactgagttttgttagtggcatattatagatttcttgctttgtcgatgatatataacagattatctagtttatttcccactccataggatgctcactttgaacctttttgtgtctaatctccctttctttttgcattcttctctcgtgtttcgccccataggaagaaaggagaaatgataatttttacccaagggccttttcaagttttcacgcggaacgcttttgacattttaggtttccatttgtataacatctctagaaatattagataggttaatgagcacaatttatttatttatttatttttgcaatttttgattgcatgaaatcgaatggtgaacctaataagttggatgtataaaatacttaccagaaaaataaacaaaaggcatcccacattgtttcacggtaggcatgaaacttataaaagtttttatttcttaccaccctcaactcttgcccttcgtcgaattgcatccatcaaccacaaaatcgggtatattgcctcccccaagtgttaaaaccagtgcaaaacgactcacttggtggtttttgacaatggttttgttgacgtggcagcttagttattgaaaaaataaaaaaaatatgtgacggcccacatgtaagttgcatttctattattcttcctccaccaccgaggaatcttcctcaagccaccgccaatgtctcctcccatgacgagctcaagcaccctgacactaccgctgagtagcagccatcactgtcggcagagccgaccatagaggaggcatcacggttgatgagcccctccccccgcgctcgccgtggcaggcgaaccactaggttgccacgtgagcaaaaccactgtcaaaaactaccaagggagttattttgcactggttttaacacctgagggagacaatatacccggttttgcgattgagggatgcgatttgacgaatgacaagaattgagggaggtaaaatagacttacttcaattgaaataaaattgaaaaccttctttactctcatcatgggctcggcccatctgcttaatttggcccacaactctagcgactgaaaccagcttgctcaaatcctcctccttatctggctgccatcagggacccattagtcagtgcttgtcttcctcgacaccagtgaactctcctctgtccttttcgacgattaaggaattactatcatataatataaaacttttttcccagatttgaactttataaaacagcaaaactgaactttatataccatgtattctttgagtgccatttatctaaatttctttggagagctatacaattctcttttggactttatcctccatatagtatatctcatatgtttggaaattggcttgtggttgttagtaaaaaaataaaaaaaacttattctttttggagcttccattgtatgttgggctctttagtttagtagaaataatatggtttttgataaaacaacatcaaaatcctatttgcagatgcttttcagggcaacgtattggcttcggggatgggctcaattacaaaggcatgatgaaaatatcaagctaataaatgatgaatgttgtaaacttgagacgacaattgtgcatttatttgccaactttgggtggaggttctataatagaattcactaattaggggatctttttcttctgttggtatctattagtttgtgtttgcttagctttctttctgctatcgtgaaatttgtgtgaatttttttcatgtgagttctataataatttttttttgaaaaggaaggcaagaaatttgccttatatattgatagagaagtagagtccatagatacaagaaaatgggagttagggtcatcccagaccaagggagtaaaagggattactcacataacgagtagagctctgttaggcactttgcccccgctattacccacatgtgtgcttcctctcttatttttgccatgatggaggccggagtgtttgcaaggttcctgaagatccttgagttcctctccttccataattcccatgcaacaagtataattatcgacttgagagctttctttggcatgttttgtgctgaggtgatttgaatccaccaatcttgtactgtttcaacattggcccattctgatggttggatatgaaggagtgaccaatcacgtacagcgtcccatattcttttggagaggcggcagtgggctaagaggtggactgctgtttccggctcggcgcgacaaagcgggcatatgacttggttttgccagtttcttgcttgcaatctatctgctgtccaaactctgttttggaagattagccacgagaaaaatttgcattttagcagtgctcatgcgtcccagacgattttcttaaggagtgttgggatagaaccttcaaactgtagccaataggctgatttggtcgtgtagtggccatgttctgtgagccgccatcggatcgtatcttcggtgtccggttggagttgcagtatatgcagggctgcccaaaggttgataaattctcgaaagtgctgcgtagttgtgaagagctgtggttgcaggtctgcgatccacttgttcccggtgagagcatcttttattgtcctattttttctcctggaaatctgaaaaatcagcggcgcttggcttcggggtgattgattattgagccagttagagctccagaacttagccttagcgcgccatttccaatagttatttccgtcgccacattgaagagctttctatcagtctcatcgcagggcaccggcagtcctagccagggtctctcaggctcttgccactcaaaccaaagccatctgacacgaagggcgtgttggtatttcttaacgatattactagaaatataatttttcagcaatggcgcagaaatacttctggtatatgatggttacagagttcatccgcaagcgcacggatataccattgtagcattttacccgagagtattccaagggtatcgtatttattttatcccgtgcgaagatcttgtagagagaactcaactaatattttatatattacttgtgataatcatattctaagcagagattaagataatccaagggtagagtgacacacaagcattaactattcatccccataataaataatctaagctaggtggaaagaaaagagaaagagaatctattcctatacttctaatatacatagtatacatatattctagttaactggtatgctagctaatatcctttatccgatgtcctcctggtacttcaagaagccacccctgactgcagagttccttacgatagcccgtcatgaccatccaaccggggctaaatacggaggaataccctccccaggaaattaacttaggattatatataggcgcgaaggaatatccgtactgagctgtcaccatcagcgacccacctctcatccgcaatatataaccccaaataatgatatctcgtaatctagacaccacgtctaaactaccagatactactctaatatcatcgtcatgacatagagtaattgcataagcaaacactatacctgcaccaaagcatctcatagataagctagccgtatattcagtataaccagaacataatataaagtaggtactcatgtactcggaaagtatttcaataccataaatgtatttagaagtgtattcgaacaaaattacaaagcttacaaaagaggaaaggaaagctactaaagccatacccgaactcttccgaagacttccggactcctgattcctattctaattctattccactagctagatactactaaactaaacttgtgaggaatgagagagctcttgcttgaggtgtgtgagtgaagtgagaaggtgaggggtttatatagcctcccaatgactgttgtgacggttggaatggttggaaataccctccaaccgtcattgggagctaatccacaccgtccagaagaaaccctgcttccagcggcgatgaggggggtccggccgaaccaccaggtttggctgaacctggggctggcccaaccagcccatggtttggctggtggcctcctctgtcgttcttctctgcagacttgtgaattgtggcccagtttgtcgtgtcaattctgagttcttggcccattcatacacaagtctggttctcgacatcgtccgattgatttatcgtgggtgttgatgtcgattctccttcactttgtgatcattctctgcaaaaggttagtagacctaatactagtggaatattattactctaacatatttatgcattgcaagcatcactagttctctcctgttttactgatattgacggtcgaaactgatcgatatcgaccgtcaacaaaaccccccaagcttgaacctttgctcgtcccgagtgaaggacgaaaggaaacaaatacttggttgttgatcaggagttgctactatgctgcatatctcaaagatacaggtgcaaggtatatgtactctctctcagattaaataatctttggcacggtggcttacccttacccctgattcccacgagacactgcttctcattgccttgggctgttgaaagacagaacaacagttagagcactagtcacccaatctttattcaactcttattccggaagttttcaaatgattttgcaaagaaaaccaagttcctcaaatgattcactcagtctctccaagtgtatcattttgaattcctcaccaaatgatgccttttgatatgtggagcttggtagggatcaatcatggcatacttgcattcacatttattactaagtcaaaaacttagactaaagcagataactaaacatactcaagattaagatcgtgcataatgtgtgtgtggtatatagtggaaatggtatatgaggaaaaatgaaagaaaaatgcttctcctttgtgcttactttcttctcccaaaatccttcttttattgattaggagaggacatgattacatttttttttcaatcatgctcatgcttgatgaagcataactttttttttcataaccatgcctttccgtcctttcttcttttttttttcaaaatgattttttttctttttaggagaagaaagcacatgaaagcatggagagtttattttggtggaaatatggatatggaatggaatattgcttagctcccagtgtaggagtttagaatgtgcatatatgtgggtgtatgatcttgatcatagagtatgagaagtatctacacaagtcacaagagtttgacaaagttcaatggaatggcaagtaaccaaaatgtatatggtttaatcatgatagcacatttttggctctggtaggaatttatatcaaatgaggaactttcaatttatcattttgaaaaacaaaacatccggaattcaagtcaaactagtaccaagatcatagctactcatatttactatctcatatctcgcaacaacctagacttagatcagcaagtgcagcccatttacctcaggttcccggataattgttggctacttttattcaatcttcgagagagtatttaccaagaacccatatatcagagatataaaacagagcaactattcatcatttcaacagagagaactagcttgtcttaccaagcatgactcaaacctatcctatcttttttggtattttctattttgcaaatttttatgttgttttcaagttttataggatgcaattggaaggcaattatgcaattggaaagggaaatatgcaatgtgatacaagttacctcagtggggggagcgaagtctccccccaagtttggctttcgctcatggtccttggtaaggattaaacccctgaaagcgaaagtacgcctgaaggtcatcatgctgttgctgcatcatgttgttgatgttggcgaactgagcatcagcagattgttgtcattcttgcgtttgagctatgtgttccgcgaggtcatactggatctcccccgtctgcgcatcaagggtgtccattctcctagtgatttcacccaagtcccaacgggaggaacttgagcgccattcacttggagatggaggcacaccacttgatctggaaggttgattgtcccccagtggatgtcatgaggcgcatgccaccggtcctcactggcgcttgcccaggttgagactccgatactatggcgtggagcttgggtccatccaggtgcatccccagatagtgcccaacctgcctcatatatctgcacgggtgtcgaggatgatgaacttccttgtttgttccttgtcatgttgtgcgtctccctgtatgttccacctgcacaagattcttctatggtctgcaggggaatggttagttcatggcagttgtacaaatgataccctgcatttggcaacgggatttcatttgtacaactggggaaaaagtatatcaaagatccatctgcttcatgtttcaaatatgcccttgtactagataagcctcatcaatacgcggacgagcggctgagataaaagcaatctggtcgctaatgacccctagccctttcgctatccgagtaatcagagaagtgcactcaataggagcagagaactttatactttctaaccattgccttatcatacatttcacaggagaaattttgatctttctaaccatggcaaacatgataattaattcatctcccctaatgagtctcagatcacttctaggaaacaaagtcatagcaatctatttgtgcatgagcctaagtgtaggattatggatatcattcgttctaggtttcttgcaaattggagcaccagaaatatcttcccaaaacctatttttcttgaacccagaaattcctttctggagatcaattttacaggaatcgtgaaaaccaagaagtgtactcaagcctttccatgtgagcgtgaactccttatggaaaaaacgaaaagaaataccatcttctatttctttcaaagtgcacagaaattgcaaagtaagcaaacgagaaccaggctcatctaccacagcaaatctctgccaaccaacagctttccaaatagaacaaaattcaacatccatacctatcattttcagcaactccggtgagtattctcgcgtgtgagcatactcctagtcgctcagcatgtagtaggcttgtctctcccgatcactgacaaggtcgaggtcagcgtcgctcaggagttgtcacggagtgtcggcgtcttccatcgagacatcggttgatgaacgaatactagactcgtcatgacaacttgatggagagctcgaccccttgaacagacgagacagtcgccttctcatactgcacaatggaccaagaacaggctaactaggcgggggttagaaatgacaagagtttcacccgccgattagtttcaccaaaacaacttatatgtatgcaactaaagatttgaatttgaggaaaactatcaaagcttaaatgaacttgagagcaaactttagagacggaatgaaaaatgtgttgaaatggggtggaattccctttctcggctggctggcttttataggatacccacaacggtcaagaatgacatgtggggcccactagccgttgcctcaaaagaggaggcagccgaccgttggcctggccggttcggtcgaaccaaggtgttcggccgaactcctggtgagcccaactggccccactttcggctgttggattccaacggtcagtgtggtcgtggcacagtaaatttttgttgaaaattttattttggcttgctctgaaaaattcatttgaagaatttcctcaaaattcaaaaaattcctaaatgcaaatttgaaattcaaatatgtgttgatgcaaaaattcaaattgttgaaagcaaatatgcggataaataccaatttacatgttggcgaaggtcacgtcatttaaagtccgacgtgcaagaccgtacctccttccgtttcagttcgcggattttccacccgtctccggaggtgatggagcgggcatctttggcttttccttccacaccttctttgatttcgatgcggtagacagcttcctctaagccggctgctctaacttcttggccagtacaggtgattttaccggcgtcttccaataacggttcttgggcattgttgtttccttctccagaaagttctgcatgaactttaccaggctatccgttttgggtggctccatttcgaccacttgaatattctgcgggttcggcccgtacttgattctgaccatggagcattgttccgtcctcggttggaactcaaacttttcctccttcccattgatatggaaacggatgctccccattcccacgtcaatgttggctcctgcggtgctaaggaacggacgctctaggatgagcggcgtatctttccccgtgtccatatctagcaccacaatatcaaccgggatgaagaaatcccgtatcttgactggcacctcctccgctatccccgtcgggtaacggactgacgagtcagccagttggaggcgcattggtgttggtgccaacaccgtgaagttgagcttgtcgaagacgtcttttggcatgacgctgacgctggctccaaggtcgcacaaggcctggtgaattgttgtgccccgattgaccaggtgatcgtgggacaccccggatctttcttcttctccgggagcttgtggagtatcaggttgctgcaatgttccgtcagcttgaccacctccattgttgggagcggtttcttgtttttgagtatgtccttaagataacaggagtatgttggtacttgcatagcgtccaacaacggcacgttcatgtgaattttctggatcacttcaacaaagcgagcgaactgctcgtccactgacggtttcctactccgctgagggaatggcaacaaccgtgtgtcgcagtaccccccgtggcacggtcttctctggctaagtctccttgtcagccgaatcagtagatggcgtttccttgggcatcccattagttcctgtagggttaggatacggcggatcacgagtggaattacctcccctcgtcgtgatcgccttaaaattttcaatggaggagtcgggttgccccggaatcctcccagattcatttgcagggactaaagatgccaacggagctaactgggtttctatcattttattaaagctcagctggttttgaaatgcggaagcgaagccatctagcttgacatgacatttatgttctctaagatcttatcattggcagcaagcttttttgcttagcgcatcagtggttttagcttgcgcaaaaacaagatccttcaaggagggttggttagagaaattaccgttattattacctcattgataatatgggcgtggttggttccacccctgacctccttgtggacgatacccgttgttgttgttgcccatgtacattgcctcctcacgggtttccgggcggtcgttcccagaatgacccgtgccgccgcagacttcacacgtgatgtgtgagtccaaggccttgacggtgccttgtggccgtttctcatggtcgtccaagcgtttcatgaggaggtccagcttggcagcaagtaactccgtctccttgacggtgtgcatgcctcgctgacgggtctggagtcattcctcgcttcaacccatattggagaccatcttctctatgagttcaatggctccttgaactgttatagagaagaaggctcctccagctgccgcgtctaggtgatcgcgggacatcggggtgagcccgttgtaaaagttctgcaggatcagccagtcgtccatcccatgatgaggacaggaggccacgtactcctacagtcgttcccatgcttccggaatggactcgtcccttgtctgctggaaactggaaattcgtccacgaagggcattggttttgcccatcaggaagaacttcgagaggaatgccgtagagcatttaacccaggtgttgatagcagcacggttggcatagaaccactgcttcgctctcccgaggagagagaacgttaacagcagcagcctgacggcgtcgggactgatgcccttgatggtgtacgtactgcatatcttcaggaattgctgcagatgagcgttggcatcctcattaggcttgccacagaacgggctagcctgcgccatcatgatgaggctagacttcaaatcgaaatccacatctcctatgttaacttgcggcccgacggccacattatcaacagagggagcagcgaactcgcgaaaagtcttgctgactataatcttgaaggttggtggcgctggtacggctggtttctctgtcggtaaagttttctgcggagcagcgacccgcggcctgacgctccggaagaaagcttctagattttctttgaagttttccggcaggttgaaaccagtcatgcactaccttgttttcacaataaaaactgaaaataaccaaggttagcctgcaaaggaaaatgattatacagaggtaaatataatgcgttagtttaagtaatctctatcataaatcttcccaggcaacggcgccagaaatgcttgttggtatttcttaacgacattagtagaaatataattcccagcaatggcgcagaaatacttctggtatattatggttacagagttcatccgcaagcgcacggatataccattgtagcatttcactcgagagtattccaagggtatcgtatttattttatcccgtgggaagatcttgtagagagaactcaactaataatttatatattacttgtgataatcatattctaagcaggagttaagataatccaaggatagagtgacacacaagcattaactattcatcctcataataaataatctaagctaggtggaaagaaaaaagaaagagaatctattcctatacttctaatatacatagtatacatacattctagttaactggtatactagctaataccctctatccgataccctcctggtacatcgagaagccacccttaactgccgagttccttacgataacccatcatgaccatccaaccggggctaaatacggaggaataccctccccaggaaattaacttaggattatatataggcgccgagaaatacccgtaccgagctgtcaccatcaacggcccacctctcatccgcaatatataaccccaaataatgatatcccataatctagacaccacgtctaaactaccagatactactctaatatcatcgtcatgacatagactaattgcataagcaaacactatacccgcaccaaagcatctcccaaataagctagccgtatattcagtataaccagaacataatgtaaagtaggtactcatatactcggaaagtatttcaataccataaatgtatttagaagcgtattcgaataaaattacaaagcttacaaaagaggaaaggaaagctactaaagccatacccgaactcttccgaagacttccggactcctgattcctattctaattctattccaccagctagatactactaaactaaacttgagaggaatgagagagctcttacttgaggtgtgtgagtgaagtgagaaggtgaggggtttatatagcctcccaatgactgttgtgacggttagaatggtcggaaataccctccaaccgtcattgggagctaatccacaccgtccagaagaaaccctgcttccagcagcgatgaggggggttcggccgaacctggtggttcggctgaacctggggctggcccaaccagcccatggtttggctggtggcctcctctgtcgttcttctctgcagacttgtgaattttggcccagtttgtcgtgtcaattctgagttcttggcccattcatacacaagtctggttctcgacatcgtccgattgatttatcgtgggtgttgatgtcgattctccttcactttatgattattctctgcaaaaggttagtagacctaatactagtggaatattattactctaacatatttatgcattgcaagcatcattagttctctcctgttttagtgatattgatggtcgaaactgatcgatatcgaccgtcaacagggcgcgcgcgaagcgatgcaggtcgagcacgcctagtcctcccagttctttcgggcagcagacccgatcccaattcactttacatttacctccggacaagttgtcgccaccggcccgaaggaatttcctcctgattttgtcgagcgcttccaaagttcctttaggaagtctaattgaggtgaggtggtagatgggttgtgaggttaggactgtcttaacaagggtggatctgccagcttggtttaggagcttcccttgccagtgaggaagccttgcccccgccttgtccacaaagggctggaagtggactttacgtagcttggagagcgccaatggaaggcctaaatatgtcattgggaaggcagctttctttgccagaagatgtagaaggatgtcgtcaaggtcaatgtcgttgcaacgtatgggggcaacttgacttttgtggaagtttatttttaggcccgtggcctcaccaaaggactcaagaatgtgtgccagcgctgagacgtcttgttgtgtcggggagaggaagatggcagcgtcgtccgcgtacaacgaggttctcattctcggcggtcgtccattgaggcgtaacgaggttctcattcttggcggtcgtccattgaggcgtgtgaggtgcccatcctcagtcgctctctccaggatgtgtagcgggtcgattgctaatatgaacaagaacggcgttctgtaataattggctatttgagtaaagaccgggctgtttcattacactattaaaaaaaaagaaacagtagatcgaaagtggaagttcctagctagtaagtcttcttagtttttttttaaaaaaactgaaacctatcgaaacggagttcttttccaaaatttcatcatcaaactgaaagatgttctacaatttcacatgcagatatcaaacggaaattttttccataatttcgatgttctatataatttcacacgcaaataccaaaacagagactttatagctcgagtgctgactgctgagccttcatgatgaaaagttaatttccagaacttagattgctgagccatatcgaaccagaaacttaatttccagaacttcatgatgaaaagtttaaaactgttcttttccaagctataatcaagattttcgtaaatataggttatcttttctaagttcacatgtcacacgcgtttgacagtgtcgtgttattcttcaccaaaatctaccatacaaaatctctgtacatgtaaaagtaaaacatagtatgatgtgcagagcataaataatatcacatcactctttttcaacttttttttaaaaaaaatccagatcaattaattcatctaagatagaagtcaaacacatacggagtataatctaggaccatattgcatatacttaactaacaatttgtacatgttacatctactaatctccattccatgtttgacttccaatcgaacagctaagcttattatgccatattatttcatttagccccttggaattcctccattttacaaatacatccctcaccaatctcatttctatacatatcatcatcgtttcctccaaactcagaagccca

SEQ ID NO: 24560 - DNA, 6618 bp, Oryza sativa
ccggagcctgagcacgagcgtggcgcagcaggtcgacggcgagaacccaaacatcgggctccacgccggcgacgtgatcctgtgcgcgctgcccatgttccacatctactcgctcaacaccatcatgatgtgcggcctccgcgtcggcgccgccatcgtcgtcatgcgccgcttcgacctcgccgccatgatggacctcgtcgagcgccaccgcgtcaccatcgcgccgctcgtgccgcccatcgtcgtggccgtggccaagagcgaggcggcggcggcgcgagacctctcgtcggtgcggatggtgctctccggcgcggcgcccatgggcaaggacatcgaggacgcgttcatggccaagctccccggcgccgtgctcggacaggtacaatacaagaaaaatattttcctttttttggttgaattggttgtcattttttgtgcgccgttggatcatccgatgggcggctcggattccatgttgactttggcgtctgacggtcaacgtgtaatctgagccctccatttggctggtgtacagatccaatggcgggaaatcttaacgtgtgaaggactcaagaagcccttcttttcacgtttttatttaggttttgatacaatatatacgcaataggtgttgttttttaaaaaaaataaacaaaatggacattacattattggctgtgtttagatccaaaatttagatccaaacttcaatccttttccatcacatcaacctgtcatacacacacaacttttcagtcacatcatctccaatttcaaccaaaatccaaactttggatccaactaaacacaaccattgttattattattattataaacttataaaaaggacatgaaaacaattaatgaaactaaggacagatttcatttcactgacatgcttagaaagtatagttgccaatatatgttatctttttaatgcgtgtgtgtgtgtgtgtaaagtggagctccactcccacacacaaacatgatggcatgactatttaataagctaagttggctcaagtcaacatctgaggccaataatatctttctagctagtttttcttttaaaaaaaatcctagctaactgatatgatataaaattagcttgccatttactcaaaagaaaagaagtattcttattccccaatgcaataacatggtagtattattttaaatcccacatacatagcactaaattcacctttggtttgttctatatgacatagatatcaaattagtcctacaaaaatgttatattctaagcatgtccagctaattaagcaaatgtggtgatgatctttgctgcccactatgtggcattcaggggtatggaatgactgaggcagggccagtgctgtcaatgtgcctagcattcgccaaggagcccttcaaggtgaagtccggtgcgtgcgggacggtggtgcgcaacgccgagctgaagatcatcgaccccgacaccgggaagtcgcttggccggaacctgcccggcgagatctgcatcagggggcaacagatcatgaaaggtacagaagatccctgaacatcttggcatgttcaactgttgacttctcagttatgttttgcccctgcaatagagaatgtactacactaccactggcccagatctctagatcaaatctgacttggaaaacatatgataatcaccagtggataaccagctacacaaaaaattatactacaagccattgatctggatttctttttgactattattaaacctgaattatgacaagtagttgtctggagatgatgtgcaataaaacaaggtcaaaaatatggatggccctctctttctaatggaagtaaaagaaagtgttgctttggagaaatgataatacatgttgtagtgttgcttttttatagggtcattgtgcaagaagtccacagtaggtaggatattgtaatcctaattgagtagatgctccagctagcgaattatgttgatgcaactttgatgtcaagatctcaactagcgtgcactggcatgtcacatatccgatgccgttggttcaaatcattcctagcaattccatcgcgctattaatgttcgcctcccatctttcgccctataactttataagccatagctgaaattaaaattttgaaaattaattttggagttaattttgttttttatgtagtttctttcctagtattggtttttcaattgctaatggcataaatataaaagtttcactcataaattaaaacgggttatcagctctaggccaaacggtagcgctgttgccaaacgatatcaatggaattatgcgagttcttaaggccgtattcacaattataggtcttttttttttaggacacaattataggtctaacagagtaaggatgttgctgttcgtcattgtattagagcggaaggtctgaaaggctgaaacaatcaaacaattgttgtttaatttccacactactaatatatggcgtccaagacctgggtaaagtttagaaaatgagagatgtcaaatttgtcactttcagttgcatcactgcaaatgtactattaaatatatatcagtagctaatagtaatttttcaagttgcagtttaaatgcaaatattcccagcccaagtgactcgcattcaaaaaagaaacagtgacagtgacaacgaaaggtccttggaataatatcagaactgaaattttatagcctcatcgtctcgcttatactcataagggacatggctcatagtgatttaaaactagtttgtgggtatatgtgttcttagtgactaaaaacaaatgctaaaaaataaattacgatgaaaaaaccataaaattaaattttaaattttaaatttttcgcttatgcttatgagtgatcacctgtatctaaccacctattcgttgtactaatttccatgaaaattaacatgctaaaaaaaccgttatttttcaggttacctgaacaacccagaggccacgaagaacaccattgatgcagaagggtggctgcacaccggcgacatcggctacgtcgacgacgacgacgagatcttcatcgtggataggctcaaggagatcatcaaatacaggggcttccaggtagcccctgcagagctggaggcccttctcatcacccatccaagcattgctgatgctgctgttgttgggtatgtctttaactagctcctgttctgaaaatgtagtaaggtttaatttgcttgatagataatgttgcagagttttgacatggatttgaatgaatcagttcttgaaatggcgttttcatgatatgattggccacttgcaggaaacaaattgagcctgaaatcggagaaataccagtcgccttcgtggcgaaaaccgaagggagtgagctgagtgaagatgatgtcaaacaattcgtagcaaaggaggtaaattcctttaccatggttattcataggacaaaaagagaacactttaccatggctgagtattgtttttttttttacttttccttcattaaattattcatttatatgtggttttaggtgatctactacaagaagatccgggaggtcttcttcgttgacaaaatccccaaggcgccgtcagggaagatcctgagaaaggaactgaggaagcagctgcaacatcttcaacaagaagcttaatttacaaccggcctcagacatgaaaagaatttagcatgaacaagcaagttccatgattctaatgttgcaaattacacattctgttctgaatagtttgtgtcttccatttatatgtgatgggggaaaaaaacccaggtacaaatggattctgtgcaatacaaagggtggtgttaccgtgttaggtcggctaggtttgctcatttgcagagagacaggacactggggaagccatgtacaaaaatgttcagacctgtttattgttcttgctggtgtctttgtaatattttgtttaaacatttatatcattcattattattgttactactactgttagagaaggggcgagaattctatctatatagaaagtcttttttttatctggtcctaatttatatcacaaagttcataccttctccagggaatgacacactctgtattttatttctattagttatttttgttccatttcgactacatcctgaagaaataaaaactttatgatgttaatagatttacataatataaaaactccaataatacaacaaggcgcccatggcctaatggataaggcgtctgacttctaatcaggcgattgtgggttcgagtcccactgggcgtgtcttactttttaggctgtgttcggctccatccattcccagcgcgcacagtgtacacggaaaacggagcgattaattaagtattagctaaattttttttcaaaaatggattaatttgatttttttaagcaacttttgtatagaaactttttgtaaaaaattgcaccatgtagtagtttgaaaagcgtgcacggaggaaaagtactttagtttacctttttagtaactcaaattcttaccagtttttttagtacctcgaaatctttattacctttttagtaactcaaattcttacctcgaattctcctttgtagtaactcaaattcttacctcgaaatctttgaatgacaggtttgtttgtttttaacattctttttttagtaacgcaaattctttttaccgaatgacacaggtttatttttagtgttgtaagtatctctgcatcttaaatcatatttcatccataacatacacaatacgtgtaaaaaaaactaacgtaccgtggccgcaactgcaaacaaagcaacactgaatgattggatcaaacacagcgtccttgtttgattgtttccccgctaaaaccattattgtccttgcagaagagcagttctcattttgtttttgttttggacaaaccaaattgctttaatgctaaaacactaaattacatcaaaatcatcggtgctggatccttctgccaaattaagccttaggaaccaccaggctcaatcaaaacgatgacagcatattggcgtgtatcgaaaacttcacaaaaatacccagttttacagatggccacaaactcgtgtgaacataaccagatagcatgtctcacaccccaccttttatatggttccaattatgtcaatagtaatgacatatttcaaaaccgtgaaagttataatatcatggatacaattaacccttttattttacgggtactgtctgacacctcattattctgctcattaaatattattggcaaactcaattcaacgcgaaaattataatggcatggacacaaacccttttattttatgggactgtctgatacctcattattctgctcactattgttagtggcgaactcaattcaacttttgaagtctacgatgcactttggcgagctggcgagtgcagctatcttgagttgtgcatggaccacacataaggtatatcacattacccaggggccgagcgtagatgttatcctcctcacgaagttgtcggattaaggaactcgcataaagtgatgcgtacctgcaggaataacagaaccaaacatgttaagtggaatacaacaatagtaccaagaactggagcgagaaagggtaaaggtattacataacagcgtagattatattgaaaagataatatgtgcagggcaaaggagagatttgtgtacccacgctgagggttaaccagctaaattaagaatctaaacagttatgagaggggcaaaggtatttgaatattttatttgctaagcaaatctgcaaatatagaggtacttccttcttataaaaaaaacttccagttttgcattggatgctagatattttcactgcttccaaatacgtcaattacctttttttttgtttaaatgaacagtcatatgccccatataaaggtcgcatcaactcctaactatttggcaactagatcttaaaactatgatattactagttttttggacaagcatagaatatcaacaggaaactaaattatctagaagctaagcacaacacagaatgctaaactgcccattgggtgctcttaaccgagcagttatataaaaaaaatatagaataatatcagcgaaggacaccagctataaatgactcaagattgtcatacccagcatctgatccctcagcctttagctcgattgcacacagagttcctaaggacaccactcttttcacatttggcagggacgataaatggttcactagtgcactatcccatagctgcaaataccagagtgaacttttaagtgtcaatatacttaaataaattgactgtatatagcattagcaaaaaagaggtgttcctggaaattgtattactccctctgtcaaacctggcagagtcttcaaaaataatctttgaatttaaatttctcatatctacaatgtttgtaacaacatcataaccatgtgaaagtaaatttaaatgtcaactaatgatattatttttatcaactaaactttaatttatattagactaatcgttggtcaaatatttgaagagttgaatttcaaaaaggcatgtgccttattcagtgggacagagggagtactgtatatttctatatgaaagatagattgaaatacaaacatcataagctgcagga

SEQ ID NO: 24561 - DNA, 17653 bp, Oryza sativa
tagcttttactgctgcgggacagcccatgggatgcgcggtataggaatggccatgcaagagtgctgttagctgggtcagataaaagataagtcaatgttaacctaaaagagtagactccttgtgatactctctgatataacatcataaaaatcgttaatgaactgtttgtgcatgccaaaaatacattcatgataattagatgaataccttagagtcacttctgaaggcttcaaaaataggctctgtagctaaagttgcagccaatggtacaatgccaccagtcatcaatttagcataacaagagatatcaggaaaacagccaagcaactctgaagcagactggaagagaggaaagtagtcaagagtttgaatacactagttacccccaccatccatttctataagatgtcgtttgacttggcacaagtccattgaagtgtagtttcaccacaaatttatcttgcagttactactaagaaaaccaaaacatggaagtgcattgaaatgataatgtgatggtgacacttttatgtcactaaacatctaaacctgtacaaagctggcctaattcgtcaaagcttactaagtttgaatcacagaatacttgtgagccatataaacttggatggatggagtaacttttaaggtataatcatccaaaagaacatattttatacattacctccacaccgagacgccaaaatcctgtaaatacctcatcaaatatgacaggaatttttcgatttttacactctttgacaagtaatctctggaaaaggggatctatcaaatgcattccccctgcaccttgtattactgcatgaataagagttaatgatgttaaaatcctatattagagtttacacaaattaaaagaggcaaccaaattagactattgaagtacatcccaccctaacacacaaatacttagtccgatttaaaatagtgaatgtgaatgcaattgcacaagcaaagttatctgtgggcacacatttgccagaaaatatcagcatcagattttgtatagtccaaacataacaagtactaaagtaccagaatagacaatatagagagattaaattcagcatgagtgacatcatatattggaaaagaggtactcaaaacagggaatatttatagtaacctggctctataattaatgctgcaatatgctctgaattatttgacatagcatactgtgatagttgttgtgatatgtatgaaacatatacattagcagcagacgatgtgtccctggtcttgcaaaaaacttcagttaatgaggaaaaacctgcagtcccaacaaaagaataatcagataagaacctatataaaatataacttcatgtaaaatttgtgttactgacatgtatcacaagaactcagttgatcatgcattatcgatgggggaagagaaaggttggcgcttttgtttttaatgtacactgtaggaggatctagaaaaagtcctcgccccgagtacctacagaacaaaactcaagtgaatgatctcagctttattgatttcagaagtgaaaattcaatgataatgcttccagtacaggaaaaaaatatgcaccatgctttaacgacaagataagaaatctctactaggccatataaacagataaacaaagttgctatagcaaatcacttaagaaggctacagatacatcaatgcacatgaaattcatggttaccatggctgctgaagaaaagatgtgtaagctgatggagcttgtgcttccatagcacccaaagtatccccgtggtaggaaccatttaaagcaaggacctagagaggattcaattaaaaatgcatatatcaaaagaagaaacatggagcaagaattccacattgcattatttcttcatcatattagtattaactacaaaatggtgagatgaactgtaaatacaggttttcctttaaaaatgcaaggtcagcatatgtagttcactgagaacacgtgaatagcatggcggtaagccacctagttatggggctgctaaccagggttcgattcctgggtcccaccaaaaaagatcctcgctgagatagctgctttcagagtcatacacgaaaagcaccttggtagtcagtgttcggggctttctcgatctgagctcaaagccttgtggggcacctctccccaagagtcagtttaatataggcagttcactgtgatcaaatgagcatggtggtggataagaaaagaaaagaccagaatagtgcacagaaatcagcttacttgttgagctggaggtgtaactacttcatgatactttgagttttactccatatttcagtcttttggagttctggttctactaacttgattttcctgatacaaaatatctgccagtgtggatgggtagatgaccacaacattcaccacgttttatgagagctatatctaagcatgccaatgaccacagcacagatgaaaaatctgctagacgtggcaagtgatgaggtattgtgaaatcaggaaatgtaaaggagcagctcagatacaacagtttctaatgccttgcaagaactcgccaggaggataagcaggaagaagaggccactaaatcagagttaaagcatctagaggggtgaaaactgctggccctacagctgtccaggaacatagctatgtcgctggaaaactccgctctctggtgggcctagacgttggccctgatagctataatggtgaaaccatcaactactgcagtatgcattaaccatgtccatccatgatcttccatggacacttaaatagacttgtatcagatcacacagagggatgaaaggacatcagcattacagattgtcgagatcagcaaggatggcataagaattggaggggaatggggaagagggagcgcactgagccagggaggaagaaaatagaatgcatgtaggggtccaacaggtataggtaaataaggaaaattgatgcctgtactattctacagtggcgatctgccacgtggaaatttgggcactgttacaaaaagggttcattcctaaacaatttactcgattttaaatgcatttcctgaatcaatcaaaaggtaaatttagcatgcattacacacttaagactgatgctgcgctccagtcaatgcacacattcatcatgtcaaataaaaataaaaataaaaacaattccacaccattgatcattgcatagaaaatataatgaattaaacatcaaatccacacaaacatgtgcaaaaaatctactttgttcatttgtcactaagaaaatatgcaaaataactagtggtttagaaaatgtattgccaaattcgagtagctggatgattattgaagttactatgcagatattgcccagcattcaactaaaagcataagaaacaacagtgcatcaagccatcaatgcatatagagatcatgtcgattcaacatctatggactatagggaaaaaaaaaatttcttgcagtgaactttaatatagttgaaaaaacaaagtagattgacaaggatattcgatataaccagaacagaccttaaaatgaacacttccttcacttctgatatctttttcgctgtccactataatcccatggtcacatgcatatttacgaaatgccatcttcaaagcaatttcaattgcagtagatccattgtctgaaaaataaactcgagaagcccaatctaacatacaagagaaggtgtctaatgaatgaagtgtttctcaacaacgtgacttgtatagtaacataaaagtaacattaaacaacagctgtacttagaatttgtcagtgataataattatgcaaaatcatagtgaagttacagcacatacctttaccaacaccaccaagcaaaagttctgcacaacgaagagcaggttcatgaacattctctggaaacatcacatgaccataccttgcagcagcataacccatatctcttgcaagttcaatctaatgagcaaagagaaatttaggctacaaaaattgcctgtcaaaagttcaacatacagagctttagaaataaaacactactaacaatagttcccttagcaaacgagaagacaagaaatttcacggatgatggaagatgtgtagacaataacctgtaagttagaatcaggtccttgtgtccaccaactagcacatgcatcaaactggggaacaatcgttttgtctttaacctgcaccaaaagaatgagcaacaatgtaactaaaattctattagattttcatcataattttcctttttacaaaatagtcctagatgcttggcaaaccttgtatgctgagaaattctcaccaaaacgcgaatcaataactgtaacagaatctacaggtacaagatcatgctgagtgaaaggccaccacaacaaatactttgattttctctgcatactgtttagcctttgaactcttcgtgaatgaaaagattgcagactatctttaagtgaactaaaagctgaggatgactcagaaaaccaatcagttaggtcgtctttgggatcctcaggaattggtggcaggacatgcacaggtaccctaaataacagaaatagcacaaatcagtcatacattgaaatacagaaacaatacaagcaagttgcagtaggtttatcatatatccaaatgaaagactgaaataattattattaacaggataatataattaaaataaaagagatgcttctatgctcctgcacactttcagagtgatttgacaaagaacagaaaggcattaatcacctctttctcaagtatgagagcaggaatctgtcattcgacaagccacgatcttccaaaataactgagcccacatcatatcctctgagcaacagagtttcgtaggcagataaagtagatgaaataccacctagacgaccatctccaacaagaactgcaggtaacctagaggacctgttaagagttgtatgtgatcaattacaccagaaagtaaagcaaaccagcatgtagagataccaaagtttaactttgacatattacaaggttctccataaatcattctaagaaattcaaggtatctacggtactttaatgcatgataagaaatattaggtggcattgccagttcaccacaggtgataacttctgaacgaataaaacatatattaaaagaagtgacaaatggatatgccactgtgtacagtagtgtaaattgaacatagaaattgatgtaggacatgaatatttactcagctcatgaatatcaactactcaaatgaaaaatcctaacatgtacagaacataaaacctcacaaaatattaaaacaacaagattgctcgccacaatttagcatagctaatatgttcattcacaacgtgcacattactctcttacatctgtaagaggcagatgaaatttgctagcgttgagctctcctaagtagaggaactatacagcgcaagcatcacatcaattagctcgaccaagcaaatgtcattgaatgaataatatgcacgaaacaaaacatgctaaagtaatcaaatgtacccaatttaatttctacttgaacgaacgcatacacattcaagtacttgaattcactacgactagccaaaaatgaagaatgacataaatcagaagctgaaccgcgcgcaccgatagagatcacattggagcgtgccagaagggccagggctggcgacgccgccggccgtctcgagcaccttccacacctccccacccccgtcctcctccgccagccaccggtccacgagccacctgacctcctcgtcctccaccggcatcccctccctctccgccgccaggtgcggcgacacgggctcccgccacgcgtacaccgtcctgcacacgagcgccttctcctccaccccctcctcaccgccgtagttcaccaccgtgtcctggcgctcggggaggggatccacggcgggggaagggaagagggtgtggttggacgcgacgaggcgggtggaggcgccgccgccggcgaggcggaggcggcggaggagcgcgggggcccggtcgaagacgaagcgcgcgtcggagtcatcggggaagccggtctggagcggcttgaggtaggcgacggtggaaggggaaggggagggggaggcgagaagggaggcgacgaggcccgcggaaacgagcgtcttgccgacgcccgtgttggcgccgaaaacggcgaaggccggcgaggtgagggcacggcggcggcggcggcggaggaggaggaggaggtggagtggcggcgagcgtggcggaggaggcggagcatggcggcgggggttgggtttttggacggggttaattgccggggtaatcggtttttggacggggttttggcacagtccgactggtgttgggtccgtggctccgtgccagcacgacctgatctttgagtcgtgcctgggccgctgcctcgacagtcgacacgatgtgctggtctggccggtccggtcggagttaaatagatgagagaactaaaatagacttattctagaagatattagataagcaaaatagatttttttcaagaaggagcacagtgggttttcgtgccttccggctgacccgagtcttactagaccatgcctagaccaatggtgcagcaagtggactggcacggcctggcacgtgtaggttgtgtcgtgtcggcccatctgatctcgccctgggcctggccatgtccgggccggacatttggctatccatactgttatctatacatttatcgataaatatatattaatataataataaagtaatttacatgtataactacagtgtggtaactaatatgtaacttttatctaattttaaaaccattagatttgctttaatgtttgtgcaagtggagaagaaaaaatcacaacatgcgcaagtgaggggatttagtctagtgacctccgctttgtaaaaatagcatgttatcgcaatattttcaaaagttacatgcaagttgtagttacatacatgtaagttataatgcaattatactacaattacattatatttacatctgacaatttttttaaagaaatttatcgacaaattatagcaaaactgattctagtttactccggacaacgtgggtaataaatcttgaacattgtatcatatttattaaaggaaaaagtacaaattaccccctgaactatcgcggtcatccgaattaccccataaaccagaaaaccaatcatcattcaccctaaacttttaataccggatgatttacccccccccctccacactgtttcgagcggttttgacttgagtttgcatatgtggcgccaacgtggcaatctagttagtaaataaaaataaaaatagcttccttgggcccacctgtcaccctctctctcccgtgtacgcactcaggcaggcggctccgcaaacggaggcagaccaatcagtcgacggtagaggcggagctcgcctgggcggcgggtggctgaggcaaagctcgcccgggtggccggtggctgaggcggacgcagaactagcggctaaggctgaggcagacctggcggccgacgatggaggcggaggccgaccaggcgacggtggttgcctcctggggaccagaccacgggggccgcgtcggcgccgtagcgcacgtggagagggagcgggcaaggccgcccgagatggcgccggtgaggcggcagagcatcttgcgcggggacgtggaggttgcggcaaagcatctctctcactcttcttctctcgcgcgcgcggtcgaacggtggtaggtgttcagcgcgcacggcgagcggtgggcggcgccccgggacatagaggcggtggtggcggcgcgagacgacgaggcggtaacggcgaactccgggaggatttggtcaccaggaacggaggatggacggcgacggagaagagggccgacagccggggaggggattggggaagcagaaaggacttccgggggtgcaaccaattggaaggaacccaacggcggcgcttggcgggcgcggcggcgatggtggcaggacgatggcgccgactggtttcccctcccgcccgaacctaccgccggcatccgggggctgcgtcaccccccggaggtgaggaaggcggccgtctcggcgtgggaccactgcgggaggcactcccacttgactgacagcgggtcggcggggagcagcggtggcggaggtggaggagggagtggtcgggggcaaagtggtggggcgggcaggcgaggagggggtggaaggggttggacagctcactctcggtgttcgccgctctcgtttccgcgtccctcaccgccgtccaccgtccgccgcccgcccctctgcgcgtgccgtgcgcacctgcgcccacatgcgtgcccccgtgcgtagtgccgccgcgccgtgcgtgcccccgtgcgctgtgccgccgtgcgcaccgccgcgccgtgccgaccacccccgcccaccgcgctgaccgtccctgcccaccgcccatccctgcactgttgtgcatgccatgcgcgcgtgagagagaggaagagtcaggcgagagagagaagagagagaggaagaggggaaagagaggtgagagagtatgatagatgggtcccacttttttaataaataaaatgttgatttgattgccacgcgtacgccatgtaggacaaacccgctctggattaggtcaagggggtattttgtccggtattgaaagttcagggtgaacgatgactggtttttgggtttaggggtaattcggatgaccgtgatagttctgggggtaattcgtactttttcctttattaaaagggatatagcatgtggttttggtataaactgtgcgcaaaatataaagagaaataacttttgattttagatagaagtaactttgtgttttctgataatgaaatatccgtttgatgtagaagtaactttggtttagatataaataacctagtgctagttatatctcaccacaaagcagatgtggagattctttttagcaacaattatttttttaaaaaaaagttgatactatgcaaaaacaaaagagattgatgataagtataaagtgtacatgttgcactgatattgtattgttttgtaggaattttgtgtcccgtttggcttgcgacaaagagagacgaggcaaggggccaagggcttatggtttgggaagtgcgtaaagtttggttcagtttagttaatttgatgatagtaattacggaaagaaggggtagtgcgtttagacaatcgcacgactgtgcgtaatacaatcgtgtcctttttgttaggcatagcgtcttgctatcgagcaacaaagcgaggaagatcctgatatgataagtgtaagtgaaatagtagacaactagtagataaacaattaaattagagtatatcgtaccagcattccttaaacttataagcatgtttcatttagatccacgaacttacaaattgtgcattgagatcccttaacttggtttattatattattccgatccaaagtctcgtttggtcctggtcttatctaatatgacatgccacgtagatttggcatgttaatgctccacgctctgccttatccatttattgtaattttggattgtttctttggcgcagtttaaaagcccattcttgcatggatagatttctccttcacttttagtctgattttcctcccaacttcggtggtttatgacatgcatcgaatattcaccaacactcgtggaatatgttagaaataatccctatcactatgttggatgttttattatctgtgctttatacaagtgttggtggtataaattgggcacttaacagccgctaacaggcgacacgacggcgacggcgcaacagtggcggcggcggcagcacaagggcgacggcgcggcggcacaggagcggcggcgcggcacaggataggggcggcaacgcagcggcgtagctagggcagcggcggcgaggcacaggagcggcggcactacaagggttttgacaggtaacactattagggttacaacaacgacgctaaaagaattaacacctaaactaggagatcacgagaaggttcctcaccaaaccgagacgatcggcgaggatgagacggtgacgacgatccagcggcaacccacggggacgacggcgacggtagatgagaaacaaacggaatagattacatagatgaattgatggttgcagcggcaaacacatcaatggagaaggagaacggagtaccggcgatgacggcggcggcgggaggcggaggcaccggcgggcggcggcggggctaggggcgaccggcggctagggctagggttttgcaatatgagggaaataataaaaattaaggggcatgaagacttatatagggggaaaatagatggattaggtgggtcctacaaggactaggattggggggaggagggggaagaatccgactcggctggagaggggagagggggcgcgcgcggccgaaatagggagggagaggaaaaatccgattaggaaaaaggttaccggaaaaaggaaaagaaaataaaaggacacggtgccgttttgggaaagaatgaaaacggaaccggaaactgactcggactcggctcgttatgcaaaacgaaaccgcagacgaagagaggagtgaatcgggcacgattcacgaccaaaggtggggagaaaaattattattaattcaaatcctgggaattcaaattaataacattaattccgatgctctgaatattccactttaagtcccgttaatgattttagagcaaagagaattcgaaaaaaaaattctccctgacattttcgattattaatacattgttaattagggttttctcctggttaatcaaagtaatttttatagacaatttattggtgaattagaaactacgaaaaaggggaaactctccgggtgtgacaagcacccacaagacggcggcgccgagcacgagtgcgtgctggctgggaacaacgggttcttgccatcgatggtgttcgcggagagcactgcccactcaccagggttgcacgggtacacagcgcaagcgcaccttccctcgaccttacacatgttggagctacaagggatcgtgcggtccatggacgggcacgtcgaccagagcagcggatcggcaaggtcgacgacgagcagcgtgtgtgcactactacagagccataggtgccggttcacaactgggtataggtaccggttttctaaccgacacctattggtcggcacccatactagctgaatttttcacattttggtccttttaaaaaacttatttcgcaaatagacccctaaaaaaacttatcccagaaatagtcttttttggggcaccagagtggctggcgccgtcgtccaacgggacggcaccagcctctccggcgccgtccccccgccgacgtggcggggcgatgctgaggtggcattgggggggggggggggcggcgccagagtggctggcgcccccccccagaaattttttatttttgttttatttttttgatatttttttcacgcttaggaacgcacaagaaccaaccatagaaaaaataagctcaaatggacggaatttgtgacttgtagaatttttcctttcttctcatctctctctaaactagtgcagaagagagagatgtgcaacttttttttttattttatttctttgatatttttttcacgcttaggagcacacaagaaccaaccatataaaaaataaactcaaacggacaaaatatgtggcctgtagaattttccaaagctctaccgaaaaacttctctcctcaaaaacataatcttgcaagcgcaattcggaggttttaatctcgccaaacccggcaaagcggggaagaatcggatgtaaccttttctgtagatgtccgtggatatattatttgcctgattccgagtccgtatgagaaagttacacctattttaataaatggcacccgaatgacttttcggtagagctttggaaaattctacaagtcacatattttgtccgtttgagtttattttttctatggttggttcctgtattctcccaagtgtgaaaaaaatatcaaaaaaataaaataaaaataaaaaaagtgcatctctatgtactgtttaacttatggctatcatttcatttggttatattttgaattagattaagtaatttcatatagtggtggagtgcattatatttaatatgcagatcaaatggttttactaaaggagttatggtctaattttaatgaaggtgcaaagtagactaagtggtatgctatttctaggcttctaactaagtggtatataagtatattacatttgagtttaaatttttttgtggttggttgtatcgtgatcctaaatatgaaaaaacatccgaaaaaataaaacaaaaataaaaaagttgcaattccatatagagaaataggaatggaggcgaggggtggggtgggggggcggcgccagccatgctagcgccctcctcctgccacgtcgattcgcgtgtgccacggtggcaggaggacggcgccagagaggctggacgacggcgccagccactctggcacccaaaaagaactatttatgggataagtttttctagggatctatttgtgaaataagttttttaaaaggaccaaaatgtgaaaaatccagccaatactagccaccggcacctatgaacaaaataaaaccggcacctttagctttactcaagccaaaaaaaaccagctcggctcagctcactgaacactgtcactacgtcatcgcccgagttgctctcaaatcaaattaaaatccccaaatccccaaatcatccataaatcgccaccaaaatcaattcacaatcacatatcacagtatgaacatactccaatccacaaatccaccaaaacatctaaaataaatcccaattccaccatccgcttcgtcgccgacgagcccctcttccgctgccacccgccgcctcccctcctgccagatccagcggaggggagggcgctgcctccgccgccgcctgccgcctctcctcccgccagatccggcggaagggagggcaccacctccgccgctgcccaccgcccgctgcctcccctctcgccagatccagcaaaggggagggcaccagctccgccgccgcgcgccgcccgttgcccggccgcctcccctcccgtcggatctggcggaggggagggcgcggcatccgccgccgccgccgggcatccgctagagagagagagagggagtggataaggacgcaacgacgtgggtgggagtagttgatcgagtagataaggacggcgctcggctcgtcggctcgtttttgtatatgtgtcggttacaggtgccggtttttaaataaaccgacacctataaaaatcggtgtcggttcttttaaataaaccgacacctataaaaaccaacacctataaaatattataggtgtcagttcttttaaaaaaccgacacctatagcattggtatcggttattactaatgaaacgacacctataataatgccttaaaggtgtcggttcttattttttttccacgtgcggaggtgggaaaaggcctataggtgtcggttttaaaggaaccggcacctataaggccgatccctatgagggtttttgtagtgtggtggtagtggtgcaggggcacgggaacaagagagcggactatgcccggctcgcggtggcactgcggcaggaccatggcatgccggccgtcgttgtcgctcgagtgtcggcgtgccccgactggctccgcaaagccgtcgcgtgggcatcgtgggagcatggatgcgcaggacatccatctcggtctgaggcagcagcgccaccaccaccctcttcctcggtcccctccgcccgaggcgacgagcttatccatctacttcctcctggcgtttgggcggcagcagcggcaacaccccgcgcagacgccacggtgggcacactgttgatgcgaaaacacgaggcctgggagatctgcttaactccagtgcaggtccaaaaaatcttgctttcggatctatgagcgtgccagttgatttgatcctgcaatcaataagaaataaaaataggaaaatagcagttaaatccataaatgatagccgatcggctagttgccgatgacatatcatttatctttgagccgatgtcatatctgaatcgatcggcagatataaataagtgagaagagactaaatctactcgatcggctgtagatattaacaatatataacccttatatcgatatatacttaaaccaagtgattgggatagatctgtcaccatgccgagacagtataaaccacttagatcaaaatatatattaaaaataagattatagatgttcatagcatagccgatcagatagatctagcatgtatcggctaatactccgatactattctatattaagatattaaaacaagtaaaatatatcaaacaaaaagcctaatatatctagatgaaacaatatcttaatgtaaaggacagatctagcatatcaataaagcacataaaatataaagctaaatcaggtaagatcggctgaaaccccgatactaccctaatcggcaaccaaaaggcaggctagagattgatattctaatcacgacttataaggtcaaactcaactgatgcagctataagtatgaaaagagggacaatatctagacaatcaagctattggctgtttcatagggtggtggataccttatataatctaagccaacattgatatctaacctaatcggctgccttccaatgatagatgttagccggttggaggttaaatagcaatattgtcaaagattatataagatatatgataactcgacgaattacataaacaagattagagtatcataaagatggaagcactaatctcgagaacgcaagccgccataacaagttttacctctagttgaagatcgaaaccgatgcaactcaacccgaaagaaagaactcgtcgaaacaaaacgaaagtaaaagggtggcgatgcgccaagattgttattgaacatgtgttgttgttttacatgaggctcggggtctatttatacccgagattacaaaatatgtccatgtcggacacgactcttatctctaacaaactctaagataccataagtctttgcggcagacttttgcccaagcttatctctaaggaaattaaataaaatatcctaattaatagatacaattgcctttccaggactcgatccgagtgtggcaatccatatgaagcatattaactcaacccgacaacgtgtaatgagtcgtattgtcagaatcggctcaatcggctaaccctgtccgactcgaactgggccaattaaggtcgcagccgattcggacttaaccgattcttgctttgtttccggaaccgatttttgtcttggattctgcttcgatctaatcttcatctccgatactcaaattaccaaatttggtcgttaacacacacggaccgcgcacgaggtctctcctggtcccggaacctatgggctctacatcgcgcgtcccatgtcgtggcggcggcgcccctctatgtcgtggagcttgagctcctatgcagccgtgaccattactccgcctccatccgccggttccactccttccgttcctctcccacccctcctctcctcttctcctcattgctactctaccgccgcttgcacccgtcgctccactcctcattacccgagcccctttctctcccttccatcaccacgcaaccggtgccagcggtacgccaatgccccaaccccttctcaagcgctggcaacacgccggtcccctagccccctctccggtgcccgccggtggctattgccaccgctccctccctcactagtcaccactgccgatgggggagagggaagggagataggagtgtagtgagtatgacaagtgggccatagctttttctctctagacacttagcatgtgggtctacttctactttgtattgtaactaggctgccacgtcagggtagggttgaccaagccaacgagctacgtcagtgaatttaaaactaccctcaaaaccgttgagggaattaaattgctctcaaaacagaatgctatatattttttttgcgcattctgcaagggagatgcggatcgtacggtcgcaaaaaaaaggtgacaaaccaaaatttttcagctatttgttacataaacagtcctataaatactactacgtgcaacccacaggttgttaactagttatgtaattttgcatccaaagtcaaacagcggctgtgttcttctcccatcttcttaacccacctctctcgttttccgcgcgcatgcgtttcaaactgccaaacggtgtgatttatgcaaaaaaaaaatttctatatgaaagttgttttaaaaaattatattaattcatttttcaaaaaaaatagctaatacttaaccaatcatacagtaatacgagctttgttttacgtgccagagagttcccaacccctcctcctgaacacagcctgcatatgtaaaaaaaaaaaggtagtacatatgaaaaatactgttgtcatatacgccatcgaaaggtttacattgcaaattataaagaaaattacaaagaagaaatcatgaaataaaagacaataaagactccctccgtccctttataattatcgtttgggagttgtacgcccctctcacaagcacagattcctagcgactaataaaaggggacagagggagtagtatacacgagagcaagaaggattttctcccgctatggtgatcactggagctcactggccatcgcttatcctccagtgggcttgttcccttgtcgcaggatcaatcttttttgtgaaagcaggatcaggccgcatgtgctctatctctaatctggaatccctgtcatctaatttgcccttttgaccatgaagtttttggcctaaaagccttctttccgcagttgagctgagcaagagagctgatttagagtcaacgacgtcttcactattttttgtaccagaaagctggtagtccaacgcctgatctggccattttctggtgctggatttttcacattttgatccttttgaaaaacttatttcgcaaatagacccctaaaaaaacttatcccagaaatggtcctttttggggcgccagagtggctggcgccgtcctcctatcaccgtggcgcacgcgaaccgacgtggcaggaggagggcgccagccatgctggcgccgccgcctccattcctgtttctctgtatggagttgcaacggtgtcatttttattttattttttcggatgtttttttacactcaggatcacgatacaaccaaccacaaaaaaaatttaaactcgaactaccacttagctaagtctgaaaatatctagcataccacttagtctactttgcaccttcactaaaattagaccataactcctttagtaaaaccctttgatcagcatgctaaacataatgcactctaccactatatgaaattacttaatctaattcaaaatataaccacatgaaataacatatataagttaaacagtacatagagatgcaatttttttatttttatttcatttttttgatatttttttcacacttaggagaacataggaactaaccgtataaaaaataaactcaaacggacaaaatatgtgacatgtagaattttccaaaactctaccgaaacgg

SEQ ID NO: 24562 - DNA, 3706 bp, Oryza sativa
accgactgttcatcgaagaaaaaacaaacctactcacggacttactataaagaaaatataaagccaaaaaaaaaagtacatagtaccattggaaaaaaatcaatggttaaaccaaatctataggattttttttaatatttaaagatctatataattataaacgtatgcaaatacacatggttaaaccatatctatattataaatatgaaatatccaatcaattctctttaaactttctatcttaacaaatgaggctgacatatactaattaatgttatgacaattttttaaataatttcgcatcatattttagttgtcaaatataacattatgaatatacaacactaatttaaatatacatgtttaatgaaataaaaacaacacaatttagttgttttttctattagatctgatttagttttaatttgtttgagattaagattctcaaagtgtttattgaaaatttttaaaactatttaattggtattggagaagtgagcagcataaatgttacatagatgtgaaaaacaaatataaaaaaatgttttccgacaatgatcttcctataatacaacccattaatctaccatgagatttatgatcagatatgtatgttttatatttgccaaatagttttgacaataaatgaacaatctagtaccatgcacaataaatatatatatccttatagttaaggaattccaacatgttagacataattgatggatgtatgtcttacaccgcactgacatgactataagtatactctaacaaattagttattataaataagtttggggaaataaaagtattctctaaattagtaaaggcgtctcatgtgattatgtatattatatattgaaaataaaccagtagctaaactattgatatttgtcgaaatataaacaataatatggagctctggagattatcgcagtggtattttttaaaagaattcacttttgtcccagttacatataaattcccccattgttctgggataaaatttgactccttctatttatgtggcagatggagtacaagtaagataactctatatttagttggatgaagtagtactattagctatatttttaagtagaaaatatctttcattaatatatcatagaataaaatatgttacttaaagtcatctatagcatacaaaataaaagatgttacttaaagtttggaaactccaaaaaatatttcaaaacagaatcgcacaaaatacaaataaatatgaaccaactccattattgtgatacaattttttttaataaattcaagatgtgcagttctgataatatgcccaaaccagttattaatgaaaacatgtttaaaatagagtcaaagaacataaaaaatatcatccacacttaaacatccgtaataaaaatttaagcaatattaaacaagatgcccgtgcataagttagtcttccttccttgttattcaagaattcttgtagatgatttaaccggtctaagagctgctttgcacaaattggcaagtgagaccctattcaaatttttttaacgtggcttccacagtgtgaaacttgtgagtggtgttgtggctgcaccttgtgaacaatacttgagcaataaagaacatattcaatcatcaaggcattgacgatctctaccggtttcgtaagttttatgtatatatttggttttggcattaacttttctgcgattttggtcaagttaatccatccaaaacctttttaatattttgtaaatcatatctggaagatttcgttgattggttcttgctagattcgaatttgcttaagttttaggttttgttcagatttactaaaattccgagatagctggctttagagtgtgtttcctcttaaaccgtttattattttgcaaatccctccggtggagttgtatcttggtttgtctagtttattctatcaaaatttaatttcaattcaatggttggttttggagaaaacacgtttttacagaagtactgttagcctatttttaggctgacggtcagaccgcgagagtacctgcggttagactgaccctattaggtcagatagaccgttataagtgtgttccattggattttgaggttggggtgtgttttaatctatctaatttcgattatttgacttatactgacataatgtatcattcaccccccctattggggctagtatattcgagacaatgtggtgtatgagctggcccctcataaaatggttgatgatgtgaataacattagatgtgacaatcacctctacgatagaactttccctaatactactacgtgggccttaggattctgcgccaaagttgcattgtagaactgaaataataaatattaatatggattgcagactatgttctatattataaaaaattgggaagaatgaaagataataaaggagggagtaaatcttttcccgaaataatttatcatgatttactgcgtacctccttgaaaacgacacggactgaataatcggccgagaacttttccagctccgatactcggtatggatgcccgacgcaggagcatgcaattccatggtgtcgcgtgtgcacgacgatgcagctgccatttttcttgtcaggtaggtagccccttacggcctcccagtcaaccatggtggtaacgtcctccaagaccactaggaacttctgacttaattgctgcttgaactcctcaatgagtacgtcgtctgtcgccaccatcaagtccaggatttttacagtgttgtcttgttctggacaaacatttttgtggaactgagccagcaagctccggatgaactcaatgggatggaaaggatgcaccattttcacccaggctcggcagttgaaacttttcatggtttctgtgtcgtcgtaggccttcttgatggacatcatctccagatcgcttcctgttccccacactgagatgacttggagtacttctttctccaccttcaactgctcttcacaacaatcatgataacaatcaccattatcatcatcgtcctcgttgttgttgttgtcgtcgtcatcatcatcgtcctcgtcgccgccgcccccgcctgctgttagggatggagccataaaataggaacgagggaaaggtgctaatatatgaagtattaagtaaggaacaaaattaacacttgtcattgtcttattgagttacataatgaaatttcatatacataaaaggagttcacctagcatatggcgtgcttggccccccttcctgttgatcaacatgacaagatccacttgacggctctgctttgctgcatctgtcggtgccattgcattggcaacagcttgttgatgcgcctgctcctcaggcttatgaccggagtcaccaatacggttgtaacgcaagttccggtgacccatggcctcgaccctagccttgagctgctctatattagcaacggcagcgtccaggtccttccctggtgccgcagacggcatgcaccaaggcagaatcatgcggcgccaccagtgcggcttgctgtcgaggtaaacaatggtctcgatgcaatcctccacgtctagggccgtgttgcggacctgcctcaccaaggtcctcgtcacgttgtccgtgacgcggcccttggcatcattaaggaaggagtgcatcatctcaaactcgtccgagataaccaacagatcgcgctgcacggtcttgtgcagcttctcctcttcctcca

SEQ ID NO: 24563 - DNA, 16606 bp, Oryza sativa
acccatgtggtcaaaaaaaataaaaaatgagtctgggcagatcgtccaccaaacgaaagagaacgttggagcatgagccaaaatttaatccatccccattaaaatataggccatctcctcagtgccatcaatttttgttataaaagcttggtattcgatacatgggaacgaggactaaccttgaccttttcgattgttttagtcattgatcactcaagatatcatattacgatataggagcacacaatatttcttaacgaggttcagcccaaacctatatccccggactttgattatgggtgctcctctccaatcaacatagcacctaatcgctacgagtcaatgactgtcagggttatggataaggcatacctcctattcttgaggttacgatgtatatgaatgcggtatactctcaagtatatggaaaggttactttagtcttaaggaattaggccaatgtataaggaaaccgactcccgagtagaaggttttagagtcctattcagatgagaagcagactatgtcatctcgtacgcgtaaggtactctccgagttctacttggaagctaagtcacttaggggtataaatacaaggccccaggtggtatgggatcatcgaatcatagcattgccaccaaccatggtagaagcaatccgaaggactcgaagccaagtcggcgattgatctcgtcgagtcgttctcgacaacagtctaatcggtaactcgttgcttctgttgttctctattgtgaaatctattgttctgttcataatcgcatataaactggattaggtgggctattaccttccgaggggcctgaacgagtataatccttgtcttttgtgagcttgatatcgtatcatagacttagaacatgcagtgtgcaactcacatctctcaggttctcggataatgtttggctttccttacttaaaacttgagcgagtacttaactatgaaccaatacataagagatacaaaacagagcaaccgttcatcattttgaaagtgcattaattcccctagtgggttttggtgattaatgacaaatgtggttaagggactaatgagttcattgagtaactttcaggtgcattagtccaaatgtgtggaagatggatgcttgaagacccccccaaaagtacaaaatcaaagcggaccggaactcgagaagtgcataggatagtttatcttttgaaatcgagtttttagaaaaaaaccatactattaagaggggttccaggtgatgctctgagatatgtcaagtgctcttagtatgaaccaagtgtcaagtttccctaggagtcttttttgcatatactccttctgcccaaaagtgcaagtccggaacttcctgtcttccaggtccggaacttcctgtctagtttccagttcaaaattgtgagtaacggctagatgacgccacctagccgttatacatatacagctcgtttccagctcattccttggccattccactttcacttttcaaacctagagctgttgctagtctctcccaagtgtttgttgccttctccactcaatctagagcctaatacttgtgagaaagagagattgagagggagagaagaagatttggagaggtgtgaagactcggatcttgggtgagcacttggaatatctcgtgggttgtcatctcgttgcttattactcttggagatgatctcctagacggttaggtgtcgcccgcgagaatccgttgcatattgtggatgtcccgggtaagtttgtgaaggatctcctctcctccgaaagggaatgaggtaagttaatgaagttcttgtgctgagattctagaggttttccaagtagagcaacctacacttgtggtggatttctagaagtaggttgagttggatcttggtggtcactcaattctagaaatttgcctaggagtgtttgggttgaaggctgtggattttctttggggtttttgcacaagtgaggcaaggggttaatcgagacccagctctttggagctcctcaacggagagtaggatcgcaagatccgaactttggaaaaaaatcgctcttgtctctttctgtgatgtttctgtgatctatccaaaacttgaccaaaatttaaagtatacatataggattactaatatgtgctcatgcgacaaaactgaaattaagcgtgagctaatataccaacatctgagctgttaagtaagcaagaacaagaagcacacaaacttgcaattaacaaatcatgaagacaacaaaatggccattagctgtcacaccacggtgtggcaagggaatccatctattcgaaattagagacaacgatctgatcgagcaagcaagcccagctgcctcgctggcaccatctgcattgcacgcacgtccatcgcctagcacccactgattaattaattaatcaatcaattaattagtcctaacaacaagtaaatttaaaaaaacttctctgatccgttcatcaaatttttaatagacgcacatacactaatccagatctaatgtcggtgtaatcaagcaaatccagatctattaactaaatgtcgggacggtgtcgcctggtgatgaggataattacaagagttcttcaggttacgaagctgtataacttaaattaattaacccaagttgattactcctgcttcgattgcttaattagcgagcagagaagagccatagctttaaaagacgagacctcgtgcaaccattatattcgtacgtgtgttcatgtacgtcatgggcaagatctgacggcttcacatacctgttccgtttgatccgttcgccgtcactacggccggccttgatcgattcatcgaccggtttagctggcatcacattcacacacacacacacacacacatcactcctcagatctgatccaattcaggacagctaaggtagagttaattaggacaacattatgaagttaactagtgataaggtttatccaaaatatttgaattcaaattcaaatttgaatcggatataattcaaattcaattttgaaacgggtatataaacttttgacttataaactttaggtgtataactttagatgtatagaaatactatatataataaaatatttgaattcaaattcaaatttgaatcggatatataaacttttggtctctaaactttagatgtgtaaacttgaggtgtataaactttaggtgtataaatttactaaaatagaaaagtaatgcgatgccaaaaaaagaaaccaggtggagggagggagaggggaggggatcgatcgctgcccccgtctcggggcaatcgatcgctgcccccgtcccggggcgatcgatcgctgaacagcattctcagtttaagaagaccgaactttctttagaccaaaaggactagaactctctttcctaagtaggggtagtttggatacaggactataactctctttctttagtgactgtcatatcggttgtttggacactaatttagagtattaaacataaactaattacacaaatggaggctaatttgtaagacgaatatattaaaactaattagtccattatttgacaatgtggtgttacagtaaatatgtgctaattatatattaattagccttaatagattcgtctcgtaaattaaccttcatctgtttaattagttttgtagttagtctatttttattactccaaattaatatacaaacatcggatgtgacagtccgccattggcccttggcagtccgaggatgacatggggcaaggagcacgcggcgaggacgaccgtggcgtcagcggctggcggggcgcgcggcaaggacagcatgggcgacggactggttggggcggtagagtagtgttggtggcgacgggcggcgaggacgggaaggacgaccgcgcgtgggcggccggtggccgggaggacgtcgactccctggcgcggtccgtctccgctcccgtgtaccgtgtacgcgcgcggattttcggacgtcgcggcggtgctcgatcctatggtccgaagtgtgcgcgcggcgttgcgcggcctaatggcgtggctcggcgatatgcaaagcggggtgctgacgcggcgagtcgagacgcgtcgcgcaggccgcacgtctcgtcgtgatgcggttgggccgttggggtagtgttgcgggtagcgcagcgtggccagttcgcggtcgacggcggcatggtgaggatggcgtgacgtggtggtcgcatgtggcgcgcgtcggctcggagacaggagctgcaaggacggacggcgaggtaggcggggacaaacgtggcgtcaccagcgtcgttgtctgcgcacgccggtacggcgactcagggcagggcgtggccggcatcagcgggagaagttgtggggtggttggcaacggcgacagggcgggcaggcggatgatgccagcagctctccgtgtactggcgatgttgcggcgttcggaccagtggatctatgatggcggcggcgtgcggtacctttggcgatattctgtcgagcagttggcgggcgtgcagcttggggaggccaagtctggctgggccagctgggctgcggcccgggtggagaaggaggaggggaaggctagaggccgcgggagagagaagaagggaggcacaacgagctttcccagtaggctcagcccaacagaaggggatgggaagggagatggttgggccggctgggattggcgcaaaaggaggggaaacagacttagtgctaggatttgaattctagggagatccttctctatgggttgaatgatttgttgtttgactataatgatttgagtctcatgtctcccatttaggttagagtgattccaactcttgtgataaagtaatatccattacaatcaaaatgttggtcattataatatggattgttttgctttcactttgggaggatatgtgaatggttgcatttatttattatttggattctcgtaacccattagtagttttgcaatttgtgaattaaatgcgcatccccaattccagggcttttattaccgaaatatatttttggttgaatgcctgcattatatctggattggaaattaaattggcatttaatttctccttggtagcattgtatatgcctcattcgaggtttgtaaaataattcattcagtttacttggtatatttcgggatttgattattcgtggctttgttttagggtggatttccacacaaggaaagcaaagatgactgcatgatgcaaaagtttttaaaagttcaaaattttactgatttttttcaactggatttttagggtgttacaatggtggagattaaatttctataactaaaaaccgtgtatgccaatatgtattttggttccaagtgagtgttgatatggacaatgtgtatgatcgatttaattaacagaactacctctctatctacgtgattgttctgtgagtgtgaatgtgaatttgtttgattgatgtgcatttatgctagtaagaaacatactaatgttttatatcggcatacattgttacatggctactggatttttgttttcgctataacagaacaatgcatatgtagttctgtctgctaaaacggttacaagggcggatgtcttcagtaacagcccttgaaaaacctacaccgcatgtgaaatctgaacatatccacccgtgaaaatatgtttttgtaggcggtgtttgagtgcgcctacaaaaatacctgatatttacatgccccggctagaggcaggttagaaaacgtatgtgcaaagaacgtgtgctgtctggacacatgttttctacgacagtgatataaagtcttataataccatacacattaatttggcctatcaatcacctctaagttaattttttaaatttctttcaaccacccaaccaccctaaactatctctcgtttagtgaacgcattaaaatctttttttatataattttggaatcttctaagtaacttataaataattatattttggaactgggagaatatggtatttttccaacagagaaaaatgccaagtcgacagcagcttgccattaattatctcaggtcaacacaattaggttgaggatcggccggctctgccagctcgcctgcaactggatgtgcatatgaccttgcaagttgcagcgacagacatagtatttcctttatctaatcgtaagcctgcaatataatttttagtcaattattggttcatcgccccttgctattagcatgtcgatgtaacccattaaactaataaatcctagactaaacagatagaagatgctcgcgatgctaccacaccccctgtcatcaccatatttcctttggacaagtggactaacaaaatcattttattttctttcgaagggtccaattaatgtaatacaagtggaaccaattgtcttgtcaagtgggatatacttcctccgtccctaaataaatcaacttgtagaattcaaactttgtcccaaaataaatcaacttctatcttctcatcgacactcggttcgcaaatcgaaaaattttgttccttcaatacctctacctccctatccaccaatactaatttgctattaataagtgatattttggtcatttatcctcttttttaattttgcattgtgaagctagaagttgcctctttttaggacagagggagtatgtgtttatcactgacgttgacattttgtcctaatgattctctccgtttcatattaaagtcattttgactttttcatagttaaacttctttatctttatctttgattaagtttatagaaaaatatagtagcatttttaacactaaacaaatatattatcaaaatatattcaatactagatttaataaaattaattttatgtttaaaatgttgctaaatttttatgtaaacttagtcaaactccgttcgaggtggctgttgtttggatgtcctcgaatagagttaatagtagactctagtactcatcgtatcttatcttctaaagccgacggaaccgcgtaatttgattggtacaggtgatgcagtaattcacaaatcgagttagcgcgagactctctcgtgcagtaaccgtcccgatggttcggcctctcgacccatctggagctctgggcaatacttggcatcaagctgggctgcatagcctaattacgtgcgcttaggccaagcaaaataggaggaaaggaaaaaaaataaaaaagatatacataaaatcactgctgcagaaaggggcataagtcccgattgataacccccctatagtcccggttgtgcaaccgggaccaagagtccggtattaaagatatccatctttagtttcgggtgaaataaccgggattaaaaatccatttttagccccagttggtgttactaaccggaactaaatatcgaaccaggccagatccatttgctagatttttcctttttttcattgtttttaacatcgaatattgatttcacttcatccccaaatcgtgaaatcctaaatcgatcatcacagatcatagatcaaaaggatatctccaaatccttaaatcgatcatatccaaacacatcacaaaatcttaaaaaaattacatcacaagttctaaaaaaatcatcacaaatacatcacatatttacattacacacaaatcaaatacatctcagatctgaatcacaaattctcaaaaaaaaaacatctcatatcctgtagaagcgcaggccgccgcccgccgccacgcaggtcgccgcctgccgcacggccccgtcgctggttgccgccttccgccagtcaccaccctccatgcggccagccaccgcctttcgccggcctcgctcgctcgctctcgctaggtctgctctcgcgatagaggaggaatagaaaggagaggataaggataagacagaggaataggaagatgaggagtttgggaggataagtcctaaggattatatattgtatatggatttttagtcccggttggtgttaaaatgcccagccccctaacagcctcgtacagaaaatgaaccgggacaaaagatcaccttgggctgatagagttttaaaccgggataaaaaaatcatctttagtcccaatttctattcaaacagggactattgtggcttttgtccaacccattaaagatggtttctcattagtgaatatattttgattaaactagaaaatgaaacctgtatcctggccacatatgctgatgatactatcaacttttttagagtatgatttacagaaagctaaaaatataaaattgattttagctacttttgaaaaattatctagcttgaagataaattttcacaagagtgaattattttgctttggccaagcaaagaaatgtcatgagcaatattcaaatatttttgggtgcaaactaggagattttcatgttatatatcttggcattactatgtattttagaaagcttagtaataaagattggttaacaattgaacaaagaatttagaaaaaaacttagtagttggaagggtaaacatatgtttgtaggtgggagattggttttgattaactctgtgttatcaagtttagttatgtttatgatttcgtgttttgagattccaaaagggttcttcaaaaaaatgattattatagatcccattttttttggcaaggtgatgaacataaaaagagaaatatagattgacgagatgggaaattatttgtcagtctaaatatcaaggggaacttggtgttcataatttacaaatccaaaaccaatgttttttaagtaagtggttgtttaaattaataaataaataaggtgtgtgacaagatattttggaaaggaaatattttgtactaaatctataactcaagtcaagaggaaataaggggattcccattttttgtcgggtttgatgaaggttaaaagttcttttctaaatatgggtttttgggttattaataatggtgagcatgttagatctgggatgataagtgattaggtaattcatctttaaaggacaaatacccatctttatattctatagttagaaagaaaaatacatcgattgcaagggttatgagtgctgttttaatgtatcttttatgagagcgttagttggtcaaaacttgattagatggcacaatttgtgtgcttcaattgtgcatgttaacttaacagaggaggatgatatatttagatggaatcctcgtcaaagtggtcaattttcagttcgaagtatgtatttggctctaattaataatgggtatatagacagaaataagtttatttggaaacttaagctgcctcttaagattaagatttttatgtggctaaaaaatctggatttccttgtcgctttagaattggtggttcttacttgacggttggccgccaagatatattgccttggcggtttttagattacccttgacagtttttggccacaaagaaaactacggattcttgtagtatgtacatattgggcttactggtgtcacctttgctatactagcacttctcattggggccatcattttggacatgaacttaaggtaagatgtagtacgggctcttagttaaaactagtggataccctatgctttgctatgggatgtgtggatgagtgcatgttattattgatgtgaaaacacggcagcttggaagatctgcttaactccagtgcaggtccaaggctagcctggagtgtgtcaagggcataccaactgatttgatcctgcaatcagcaagaaagaataaaaacagaaccagttgcccgatagtcgatcggccgataggccgatagcatatcattgatggtgtcagccgatagagttagaccaaatcggctatggactggatatatcaaaaaataataaactctaaacacgcccaatcggctataacactatctatagagtttaacaaattgatttaaaacaatattatgaaagtagccgatgtacttatatttagagcaagagagataccgtactagctaatactctagtacaaacttatatagacaaattgatccatataaacatatcgaacataaatcaagcatgaaggtgtagaaatctagccgatatgcttatacaaaacaatctatctatgtaaatggcgaatatacatgaaacatgggatgagacatgcatattaggtaagatcgactgaaagcccgatactatccttattatgcctaattgtaggctagtttgcatagttctaagcacgactagggatgatgcatctcaaagtatgaaaaaaaacatgcagtctagacaatcaagcaattatacacttttcaggatggtagatgccttagataatctaatctagcaagataatttaatcgaacccagcataaaccctaaagcgagcagtagctgatagagctaaattgagaagctaataatatattaactaagacatatgatagcaatgactcacgatatcgagcctaacaagtctaaaacggcatgttagccccagtagcacgaaccattgagacgagttacctcttacgaagaactcaccggaaaacaagaaaagtaaaatgggtggcgatgcattgaagctgtatttgagttgctcccgtattacaatgctatggggttcatatttataccccgagtataaacttagtcctttatggacgcactacaacaaaaaccttatataaagatacttttgtaaagatgttttgcaaattgcctcttagatcaggagtttcatattgtaaagacattttatagaggcactttttaaattgcctagaaaacttttactatatagacattttagaaatatttttagcacatttattagattttatcttgtagagacattcttttggcactttaaactatgtctgatatgtaaagacattttcttgagacactttaaactctgtaaagacacttcttagaataaaaatatatactaaatgactaaatataagtatctcaaggcaaaaacatacaagtaatgacttgtggttgagtaagttattgccttgaatataagaatgatttgtgcaattgatcatgagttcaaggattggcaaacacaagagaaaatattttatttttttacattggttacatatggttgtggtacaatttaatgtctctataaaatgactctaccatcttatagacattttataaaatgcatttttgtttgtagagacaattcaccgtaaggcacttattaggcatatctaaaaaaaattaggcattttttaaaatacctctatagtatcgtaaaggcatttgaaaagtgtttctatatagtactagaaaaatgtctctacaaagcatttttctctgtagtgacacgactcaaaccttactaaagttaagatacaaacaagaccatatacgacggtctcttaccaaatctctaacaaaccaactcaatatcttaattaataaatacaattgccttaaacgagctctatctcttattggcaatgacggttatcccaatctagacccatgctgagcccaagtcacttcatatcggccgcatcggccatcggcttcatcaagcttcaaccagcctcgtactctgtttcggccaatatggtatccagtcgatgtgcaatcggactccaagttcggttcgattcaacaccaaatccgcttcgattttcttccttcttttccgaatctgatgccaaattccgttgttaacagttatacattataagaatggtagatttatatgtttaaataatgtgaagataatgatttgacattgcttgcatattgagttctaaaaacataacaaaactgtaaatgatatatgatgtttgcatgacatttaaaataattgctagtgggtaatgatgtgacataattgcgtatgatttaaaatactctagataagtaattgctagtaagtgagcgatgtgacgcacttacatgttaaactttagtaggtaatgagcatcttatagtaagatagaatatgtcacttagagcaggtacaagagcaggctataagctagttataaacatattttaaagagataaaataggagagagaagagcagcgggctacagatctatagtcaactgcagcacggactccaaaacgtaatgtgtatatgataggtgggaccaggtattaatagtatagtaagcactattgtatgaatcgactattaaattggttatagataaattggagcttgtagttggctatagtattaaacttgctcttagataatactcttgcactcattgagacaacgagacgttgtagtcattaatgtaccaatatttttttattattatcgttagttctttttctctacaacatgcagcaaacttgtatcatgtatacttgcatagcaatgatattttcctttctcccttctttctctttcacgtcatatatgataatagagagaggacgctaataaacaattaatgttacatgtgctaatgttcaaaggtgaggaatagagcagtcacatgaaaagaaggtatatataaagttaaccaaaaggttgtcttgaggcacaggctaagcccatataattaatggatgcataaaagattaaaaaaactgtagtctgcttgatttggcagaataggatcattaagagtactataatgcggcatatgttgcctctaaaaatgccacattagattaagtgatgagatggaggagagaagtaaggagagagataatgagccaccattaaatcaagaagcaacctccacacaaataagacttagggaaaaaagaatttggtgggtgagagttgactgtgagcttctttcaagtctttaaactacaggaagaaaagcatcgacaaccaataagacacagagaaataaaaaaattgataatggaggaggttacaatagaagcaaatgaaggcgttgtacctattttagttctaaccatgcactggggattgtacaataccaaaacaaagagaggagaaatagcaaagaggcatgcaatcgatctagactgtttggtgaagacaagatggatattttccgcgtcgttgagtctatccttacgaagatgtgcagtgtgattgaccaagattgggagctgggaggcaaattgaagaatgatctgatatgcatcaaggaagaaatgggcatgatgaatgccagcatcgagcaatgggaggggaacatccaagggccggtgcagcagcaatgggtgcatcagcttcaagacttggcgtatgatatcgaagacttcattgatggccaccggattggacctcaagagccgaatcacttcatgcctcgtgctgcgcgcatgatttttgggacggatcgacgtcctcagcaagtcctggacgtgaagatcttgaaggaacgtgtggccatcttacagaagtggcaacaaacgtttggatctactcaagccgtcggcggtgcaggcaacggtagcccaccatccggtggcttcggaggctgtgaggctgatgagcagcttgtgggcatcgacaacgccaaaagggagctcctatcgctgctatcggcagccgaatcccagccagatcagcaaaacaagctgaaggttatatccatcctgggaagtaacgggatcggaaagactaccctcgcccgaagagtgtacgacgagggcgatatcgtcgagcaattccatcgccgtgcttgggttgcgtcctgggcgtgtgaagactcggctagcctcctgaaggagatagtcaggcaacttacaagcgaggaagacggtgcgcagggatcaactagttctaccgagcaggccggtggtgccggtgcccccaatgttcgaaatctccgacaagatgtcgcggcacacctgcaatctcacaggtgagctttttaccagagcaatagttattcgcctacatatgcaagctaacatatggagatctgatctttatctattacttctgggcaaaatgtaagtatttgctagctagttgtatactagtatcttgatctataaacataagtaaaacggtcgtttatctaaatgtagacttttcttctttcaaaacgaaaatggactctgcattttaatgcttagattaacaggaaaacaaaaactttgaggtgtacaatgattttttattttgtatctgaaagtttagaattggagctgtaaaaactaccggtttacaacaatagtttggaagctttgaggttgacaatcatatttgacatttgattatttagactgttattgaaccatatatataggacctaaatctttttttttacacaatcaagcaaacttcatgttcattttttttaatcttatgtttttgtatgtgagtaattttacagttcttaagtatcttaagatatctaaaatttacactaagaattttgatgccttgagatacctagtactgcaggtatcaagttctacacttgaaaaatatggtacctcataatatcttctaaagaacagtaaaattatcctttgtgcgttgtggaatatccattgatatatagttttccatgtctgttaggtacttaattgtaattgatgacctgaagaaagttaaagtatggtcagatatagcatctgcatttccagaaaataacaaaggcagtagagtaattgttactacaagtattctgtccatcgctactacatgtgcttatggcagttgggtgtacaaaatgcaatgtcttcaaaaggatgattctgaaaatttgttctggaatgaggttttcaagggtgcaaatagaatacgtacacctgacttggatagaggttcagtaaccattatcgacaaatgtgatgggctgccgcttgcactggttagcgcagccaaatatttgaattgcaagcgacatgctcttagcgggagtgagtgcaaaaaggttggtctcaatctaggtaatcacctagcaagtgaaggttctttttttaaggaaattaagagagttcttgcggaatgctacgacagtctacctgaccatgggcacaggatgtgcttgctatccataagcatgtttccgaggggccaccggataaggaggaaaagtctgcttcgccgatggttagcggaaggattagtggtcagccagatccagttgaatgaggaggatgcagaggatcgtttcaaggaatttattgaccggaacataattgaagcagttgacattggcaacgaattggaagctaagcactggcgagttcatggtgttatgctggagttcatttcccataagtccatctccgataacttcattacattcattggaaacgaccggtccacaatgagcagtaatggccgtgtgttacgtcgactttccatttacaatagaactgctaaagacacaacaactgcagagaaaatggaagtttctcgtgaggtctctgacaatacgcaatagcagcgttccgaacttgaaagaatacaagtcactgagagtactggatcttgaagaatgcaatggcatcgatcaaagggttgtcaagaaccacatatgtgagttgctctttctgaagtacctgagcctcaggggcactggtgttcgccttattccgagcaaaataaaaaggctacggtatttggagacgctagacctgcgggagacagaagtggaaatgttgcccctggaggtccttaagctgccacgtttggcccacctgtttggtagtaagctcgagatgcctcaggagctctctaacgatgcagacctcgacctgcagaggtttttccaacacgaatctgaactgcaggttctggcagggtttgtcatggaggataacaaggcgtttgtacatgtgattcgtcacatgagcaagcttaaaaaggtcaagatatggcgcaaagccaacgctgctcctgccaaggacctaactgaacatttagtcgtctgcattcagaggcgtttacagggcagcagaccccttgaatccttgtcaattgacttcggcgatctctccatagacttccttggtgatctggcgccgccctgtgccctcgagtccctcaagttgcgaggggctatgaccagcttgcctgcctttttcacatcaccggaaaatcaactaagggagctgcacctttggtcaactggattgagcgggaagccctctctgccctacaaaacctgccttaccttgtctatctgacgctaaaagaggaccgtcgtggattttggagcgacacctttgctgtgcagagcggcggattcccaagtcttcggcggctgcgctttcaggccgccatgcttccaaaagtagtattcgaacaaggatccatgcccgatctcgccgatcttcacctgctttgtccagaaatttgcagctccatttttttctatcgttctttcgatatgccaaggaatctaaggcttggtgtttggcacatcgaaaacctcgtcagtcttaacgacgtggtactccatcattctgctagtgagcaacaattgacggcttggaaagatgcagcaagcgcacacaagaacaggcccaatgtgaggaggcaaccgcaataagggcattcctagatatttgctactttctctgtttcactttaatacgttttgggttttgaatacgtttattcatggatccatatatatatatgtgtttcatatatgtattcaaattaatatggatgttagggaatatagacgagggatggaaatgtcaaaatgtgtgaaacc

SEQ ID NO: 24564 - DNA, 11426 bp, Oryza sativa
taccactcgacgcgctgcgcggtggaagaaaacgctgagaagtcgaaggaactctcgcgaagtagcgcgcgtcgatgtagatgaagtagtcgatcgcacccgctcgaccttctcctcctcgtgcattctcctcgccgtactcccacaccgatcagcaccgcaaaccagcggcgcctctaccggtatccacacgtacagggacggaacgccacgcgcaaatgtgctagcacccgcgcgcagctagggttttgctcgaggagggaagtgacggctagggtttctcacgtgatgcaatgcctccgccggtcacaccctcacgaatatataggatccatcactcgggcctccaaggcccgtaggactcctattcggatccctatccgaattaagctcatattggatctctatccaatccccttattccgacccattaagcgtgcgaccctgtaggttcatatatactcgatcggctgtaacccgaaaactccttttcggtccacgcgtcaacagcggcccctagcagaatgtattgacccaccgggcatacataaagatcatatcggttgaacctctagtgtatacttgtatgaacccctttgcttcacgatatcgattaagctcaaggctagatatgtgccatcctctaatagctcaatcattcactcgaacctgttgatagattatataacttatgattggctcatcaatcacctttggcatggccatgcacttccataatctacaacatcgaggggcccagagatatctctccataggaggggcaaatcccatcttgattattcatatcccactacatgtttcatagcatacccgaaaactacttttataactacccaattacggagtagcgtttagccactggtggagaaagggtttttactcccggttcgtaacccccctgtagtcccggtttttcaaccgggactacgaatccgggactaaagatctttagtcccgggtgaaaaaaccgggagtaaaaatccatttttagtcccagttggtgttacccaaccgggactaaaaagactagatccggttgctctttattattttcttttcttcattgtttttaatcaaaatcacaaatcaatcccgtgcccaaaatcacaaatcaatcattcttaaattgcttccaaatccacaatcgatcatctcaaatactcaaatacatcacaaaatttcaaaggaaaattacatcacaacttctacaaaaggatcaaatattcacatcacacacaaatcaaatacatcacacaacaatcagatccaatcaaatacatcacacaacaatctcaattcttaaaaaaaaatatccgccgcctcgccgcgcgccgccgcctcgccggccggccggccctccgcgccccgccgccctcgcaccggccgccgctgtaggctgccagccgccgccgtgccggctggccagcctgtcgcgccccgccgccgcgcggctgccggccgccgcctcactgcgcgccacgccggccgggcctccgcgcccgaccgccctcggtctgttagagagaaggagaggagaaggagaggaagataaggttgaggagataaggttgaggagaggaagagataaggttgaggagaggaggagagaggagttaaaagagaaaaggaaatatctcgatccgatcgcgcatgcctattcgatctccgcgtcgatcttttttcccggttggtaacaccaactggaagtaaagcgtatggcgatcttttttcccggttggtaacaccatccgggactataaatagatctttagtcccggttggtgttaccaaccgggactaaggattgaaaagtagcatggagctttcaaaccaggactaaagatgtttttagtcccggtttttaatacaaccgagactattgtgaaatctggtcgaccgaccaaagatggtttctccaccagtgagcagtccctaagtaagctactacacatgttgagaatcatgataatctcaggtctaaggattcaacaccaacacacaatgagatcactgatgacacaacacatatggctcttgtagtgtctcatgttgggtctatccaacaacatgttcaccaacatgtgtccacactattaatttggtatctctataccatgatccatgagacatgatcatcaattaatacatgtgctgatcatataaacatatttgttccacatatgatatttgatcagggatcctttagaaatagtaacaaacaacataaagagtctcttgaaagaatcacatattcattaaccaataaagagttatctatttcaaggaacaatgtcggataaatatgtaaacatagtatgtgatacaatcatctctatgattgcctctagggcatatcattaacagtctagcacggtcaggatgccatatgacaagcactactacggaaaccatctttcgaccatcaatataactaaaataaatgagaactagctatgcttgcaatgtatatttattttagaataatttatttccacttatacttggattttatttgactttaggaattgagcaaataaaataaagagaaaatgataaaacctcactcctaagcaagcttatggataagatgccacatgtcaggtataaccgtcccggaaaccgtcatagggacccacatgtcagcgccccggagaagtttggaggcttgcagggccagcccaggttcggccaagacgcgttgagtgctcactcgtccgtcgacatcgcaatggaggatgcagagttcacaccaagattgttgagtgacttcgacctcgacctcactggtgaccaggagatgcaagcctaccggatgctcaaggactggatttgttggaggtatgtcacgagggcctttggccaattcttgaaaccattagagttatcaaaatgtcggttaagtcccttgggcgaagccgttgggcaaaaccgaaggatgaggaccactgggtttgccatcaagtttgggcgaagccaggtagtgaagaccggtggattcgcatgttagggaaccttatgcatctaggtgattgatatttgagatatagtttagatgaaggaaattcttgtgttctatctcatggcaattggggatttgtttttaaaatcaaaaattcatttgaaagcttaatcctcatatgactttattcctacctaccaaggtcatacaccaaaatattaatgatgaaccttattaatgtgtatgacttcctgtcattatattgagctttaccaaattattgtgactcgtgttagatctctctcatgctctctcgatcaaggttgcacaaccattatgctaagcttctacattgtaagttggcaccattccatccatttccgttaccactgaaaaaaatatgatgaataaattctccatccaatttatgccttcttctcctagaaaaatccttggaaaagaaaaagtaacagaggggaatgcatggctatgaaaaatattgctctttcaaaaatatggagcaacattgaaaaaaaattaaaaaaaagaaagtttacaaaggagaaaattggagaagaaggcatatacaaaggagaagcatcttctttatttcccattttttcacatatatcatacactttccaggtgcaatccttgatccgagagtatgatcgactatcttcttgagtccatttatttggttttgcaatatatatatatatatatatatatgatgcaggtatgtcccgaaattatccctaccaaactccacataaacggccttcagattagggaataattttggcaaaatatgcattggtaaggatccacagacattgcaaaatatttgagtgattgagggtaagtcattatgaggagaaaagctgatttgtgaaaatttacaaaacccaaaagtctgagatggagtatgagaagaccggattcaagactgttgcatttttcaatcgcccaagatggtaagtcggagtaattccagagttgttggtaatcctcttcttatttcttttgctctgttaattactctgattataatagaaatatcttttgattaacttagttttgcttcatgagaattatctcttggttagttcctaattagcatgcaggatcatcgttcactataatccagtaaaatatagtgattgctttagtgtgtagctaacattaaagtaagttattaactgcgtagacacagtgtctaggtagttgattttcggtgtttgctccgcatcccacggtaggtgtgaggtgggtgtagaggtggtgatagccctcgagatcactgaagtcctccctgtccgggtgcgtaatagagcgatatctgggagcggcgagctggccagtgcccgagcagtggttctacacgaaccgggtgacagttaacacctgggacagatgctccaccacgttcctctccaaataattcccaatgggcaaaactaacgcccttcgcgagagaatatcaagtttccagcagaccagggatgagacgtttcccgaagcgtggaaacgtctgcaggagtatggagccgcctgtcctcatcatgggatggatgactggctcatcctgtagagtttctacaatggactcactcccccgtccatggatcacctggatgctactacttcgggtgctttcttctcaaagactgatacgacccctgtagggggatgtcccgatcttcacggtgtaggatcaagaaccgataactagcctcaaagagaccaagataactagctgcaaacagccaagataacagtgcaacctaatgatcgtactcgaagccaaccaccgtctctattacggcaacttgaatcgagagtttttccaaccacactctaagttaccaaccaacacaacctggaatcaatcaaggaaaaacctcgaagggaccaggagcaccaattggggggcgtcgaacgccacttctataatctcacaaggaaatcacaagagcaaaggggtagagatctctctctgaatttgttagcacacagctgaacaaaaggggttcatattctcattgtcaaaagtcttccaaatgataaaacataggggatatttatactaggaaagcccctcctagatggggataaacatggcttttgaaattcaaggtaagtgggctagctcaagtgtctccatgagtcattcccgagcaggttcaatagagcctttcagcttttgtgcagcctccactaaaatagacattactctctaataggaagtcgaaacgatgagccgtttattggaagtgaaactagacttgattatctttcgaaccatatatattatgcatggaggaatttgactggctgggtcacacacccccttagaagttgaagcatctatgcataaccggtctgctcgttgtcgttaaccatctccacttgagtgagtgccactccatcttctgtgcaatacatctcatcctttatgcaatcattcattgttgtagtagcgaaatgatcctcggacataaaccttaaaaatgcaaatgtacaccatttagatagtataaaattctcatcaatagtaaaaaaccgatagcacatccatgactcgcatggaacatgaataattgaagccggaaacaaagaactaaattgaaaccatattgcacatccatggcaagcatggaacttgaattatttaaccataaccagaatccggaatattgatacaagaataacgtcgtaaacataagataaacttgaaatctaaatggcatgaacaaccgtttgaacataagcggtcacatatcacatagaaatataatggaaatagatagatagagcaaacaatccatgaatcacacaattaattcgtcatgcacttgccttttaacctcgacggcaacccgacagaccaccctccacaccagatatctccacacctatggagcaaaactacaaataaaccattatattcaactaatgatagttgcaagggatatttactaaaaccgaaacctagaacatagaaactttgactgatttgtattaaacaacctacagcaattctgttactgttttatacataactcacaaacagtctaacggaatctggcaaataatacaactccgatcatctagaaaaaaatgtctacaactttcatgatggacgaaaaatcagattaagcctctgaaggtcttagattaaggaaaaacgaattgatgtcctcgtttccagacccggccagcagtactgttgattcaaacctttatatctcgaaatatatacattttggaaatcgacagaacaagacctacaacttttatgtagaaagcatatttttattctgccatttagatggtctaatttgcgcttgaatgcaaacttcagaatctgcccaagaattcagactatccagactaaaacaaccataactggagttctactcgcccaatcaaagtgtactttaacaatatggaaagctaagaaaaacctctacaactttgtttataggcagcctgactaattccgctatttagcccctccgaaaacagttcaatctactactatctagattatgaaaaaaaaacaacagtcatactaaaaaaattcatatcgcctaaaccacttgagataaaataactccctttggtcaaaagatagatcactacatgatctacaacttttatatggacactttgatcagaataaatcattttgaccacgaaattgatggaaaacagaggcgctataaatcttcccacgcccagaactacccatccgaatcacaacgcccaaaacgcttctctaaccctcctcaaccacaaattgaaccactaaaaccaccctagaacaacggatacatcaaggggaaaagcctcacctagggtttgctccggagaacttgtgagattatgatgggaacgccaacccaccactcctcctgcttccctcgtcttcctcgatccgtttttccaatcagattcttgattagggctatggttcttggagatccatggagtagggttaccaggggagaaaagaatatgtgagttccattggtgccaagggggagggtgtggcggctagggccgcaggagcgatcccccccttttttatgttggttaaatagagaggctactaaagatcgaacgaaccacattaattcaatccccggaacttcgttcggactccgattactataagcttatagtctatttcgcactacatgatgagccctacgcatccacggttcctgatcgcctattcgaacaacggtttaaaagttgaacttttgcgcgtttgttctaatttttcccaaaatacactaactcgaaactcggggtattacaaatgttaacttgtatatgcatatttcccttcttgcatgtttcctttccttgcatatttcctttcatgcattgcatttataacttgaaaacaacataaaaatttgcaaaatagaaactaccaaaaaatataggatagattttattatgctaggtaagacaacctagttctccatgttgaaatgatgaatagttgctctgttttatatctttaatgtatgtgttcatagttaagtactatctcaagttttaagtgaaattagccaacaattatccgggaacctgagagatatgagttgcacattgcgcgatctaagcctaagttattgagagatatgagataatgaaatagagttgctataatcttgatccaagcttgatataaattcctgatgatttgttcttcaaaatgataaatttgaaagttcattatttgatataaattcctaccatagccaaatatagattttactattgaaaccttatacttggttgcttgtatttccattgaactttgtcaaatcttgtgacttgtgtagatgcttttcatactttatgatcaagatcatacacccacatatacacacatgctaagctcctacattggaagatagcatccatgtcatccaccatatccatgtcattatccacaaataagccctacattcattcttcctttccaaagaaaaatcctttgcaaaagcaaaagaaaaaggagggaaaggtatggctataaataaaaaataaaataaataataaactcttgctcttccaaaagtggagcatgatgaaaaaaaatatatagccatactctctctatgaaaactaaaggatattttggaggaaaagcataagcacaaaggagaagcattttctttatccacatgtcattttgtaccatatattccacacacactttgcatgatcttgatctaagtatgacttgctatatgctttaatctagatttttagcttagtgatatatgtgactacaagtatgcctcatttgatccttaccaagctccacatattcaaccttagtataggaatcaaaaggcaatttttttggtgatgaataaatattcaaccacttttgagtgattgagagaatcacttgaggaatatagttttaatttgcaaaatttttgaaaaccatccggaatgaaaattaagcagggagatagaaaatggtactctatgatttgttcaatttctcaatctcttaaggtggtgagaagcgtgttgtcacgcccagaaatttagcccaaatttctagactattttgtgtattaaatccctgtctaggaccagccagggtagacaaaacgacaagtaatatatagttccaaacgtacataaagcgtaaaatacttacaggagaggctcttagtcctcgcaccgaaaaggaacgacagcagcggaaaaaggcgatcctagcggggcttcagctccactccacaggcaaaactcaactggggtctgagccttgggcttctaactttatcttcaactcagaagcactacacttctgaaaaggggaataatagcaaggctgagtacaaccaccgtacttagcaagccacaccaacgatgcagacgtgcaaggggatacaaggatggcttgaggctatttgcataaaggcggttgtaaaacattttattgagcaaaacagtaaagctattgagtaattaaggtaacattaaatctccactgatcaacgctacaccgcgttgaacaggcccaaccaactcacctgaactacagtgcattgagtcgatttattaaggtgagactaatcacggtgaatctggtcgatcgcccataaccgcgggcacggctattcgaatagttttactctggccagaggtgcacaactgtacccacaagacacaatccaccggcatgtcaccgtgcccggccggacacgccaccatgtcgagtgattgtgacaagacccttcatataacccgctctgaccaagcacaccacacctcaggtttcacccccgcccccagcaggcagcgggcagtcccctctcctgcctagatgaatccggaagcgataaagaccgtcgcagggcccgccccgctccatcatgcccacccttgccaataccggcagaaaccctaaagcgagaagcagccgatagaggtaaattgatatgctaagactagattaacagagacatatgataaataggtagacaattatatcatccaaaccggagcaatccaagaggtcgaatgtactgatgcagccttgaacgatgctgatgtagattagacaattgcctgggccgacggaacattggacttaccctttagccggagattgaacactgatgcagccccgcgtcaggtgccaagtcccgccggatgataaaataaagtagaaaaggtaaaaggtggcgatgcgccgaattgtattgatcgtagcgatagattacatagacctagagtgtacatatttatacccatgggttgatacaagtccttgtcagacaagaaagaaactttcctaaagataaaaggaaaagataaagtccttataggacactaaacacacttttctaaagataaaaggaaactaacaaactattcctaattaatatataacttgccatgccgcattctctttgaactcggtcttttctggataagcttcctttagtagatcaatttccttaaccgaatatagcaagaatccgacaactgacgacatgacaactctcatcggctaatctcaggacttcgaagccgatgctgactctaagccgatgactactctgggcttaccaaatttcactgttaacaggcccgtcctccgcctactctttattctaaaaacaaacataactatcgttggaatttattttttattttctaaaagtcccatcaaccgtcagcggctctgcaactatactactatacacccgccggctgcttctcctttttattgtcattgacattttaaaaattgaatatgattatcattggggtttacttcttttttactttctagaagtcccggcaatcgccttcctcatttgcttcacggcctcctgttgtccctccttttaaacatcattaggattctattcggtgttttattaacaattttatatgttgtatcaacagccactgctctactcctctgtaggccatttacttaagttatctcgtcatgtgttttagatggtcttttctttcaatagtatttatttttatcacaaattttagctatttataaattgtattcctaattgaaatcttatttttccttttctagtttcataaattttttttcaaattttaattaatacgtattgtgctcttttaatatttttattttttattttcaatttcagttgtttcaaaattatattcctacttgaactcttttttaatttttctaattttgggtattattttatttttttctgaattttaattaatctcatattgggttcttatatggattatttttttaatattgcttatttttaattccgaatttcagctaattttaaattgtattcctacatgaactcttcttttattttatttttttggctaattttggattttattttatttttattatgaattttaattaatctcatattgggttcttatatggaaacttacttatttttaatttcgaattttagctatttttaaattgtattcctacttggactctccttttcttttctaattttggattttattttatttttattttgaattttgattaatctcgtattcggttcttatatggaaacttctttcaatattgcttatttttaattccgaattttaactatttttatattgtatttctacttggactctccttttcttttttttctgtttctctgattaatgtgggaatttttagcccccacagcgaacatggtacctcctttcaaagttattttaataatataatagatagatactcttctttatacatcttcggtactttgtttagtatgagtaatgttcttattttatatttgtgtcatattgattgtgtgggtagcctaccagagaggtgcgggtttaatgtctgatttatcagttgctctatgtcatgtgcacgggtgtagagtaatat

SEQ ID NO: 24565 - DNA, 4343 bp, Oryza sativa
ggtactgctttgtatttagccccggttggatgggcataacaggttgtcgtaaggaactcggcaacccatggtggtctctcgaagtaccaggaggacactgttagggggtattggccacacaattgtatactagcagatgtaaactaggatttgagtgtatatcagaagtataggaattgagtgctttctaattcttcttccacttagttagaattactttattatgaggatttgattagctttgtttcgtgtcactctacccctatatattaaacttaactcatacttagactttgacaattacaagtaatatatgtataaaatacgttagcaaagtccactcttattatcttcccttgggattaaaaatacgataccttagaatacttccgggtgaaatgctacaatggtatatccgtgcgctcgcggattacttctgtaatcataaatataccaggactatttctgacgccattgctgggaatgaatatctctagtaatatcgttaagaaatactaacagtgcactagatgctagaaagaaatggtgacatagtgatttatactggttcagcccctcgggatgaggtaataccctagtccagttgtttggtgcctaaccctccaggggtgttgccaatacccagaggatgcgatatcccttataatccgggtacctgccatccgtcatgatatgacggaataggtttctatctctctattctccgctacttatagtaacagattatataggcctgggcccatatcacgcaagagatccagcctccgagtaccatgatgggctatcctggtacgataacttccacacaaccatcggagggagcaaatatcacgagtgtatacagtcctcaacgaccaagggcgtccgcacgtggacgcagtcctcaacaacgtccgcatctggacgctataaggaagagcgtccttcctatttctttaattttgaaactatgtttactacttatttaattttagagttattaattattacaaattacaattaattttcttgttatccatcgatacgtaatgggcagtgcttcgaactttatttaaggaactgtctatatgagattcatatgattttttaggcttccatcatgcactgtctcaaccttcccatttatttaagcaaactctggaatgaattacattcgatgcacagcataacgtggcttagtaggtagggtatgtataaaggtagagtctaatataagctctctatactaattaatattactagagattatctataatagtagagacaataagatttctataaaccattaatgcaccaaatatttttattattatgcttatttccttttctccaccctcatgcaacaaattttccattaataaatgctaagagtcgactttgagctgttatcatgcgtagtaacgatgtttcccattacttccccctcattcttccacgtcactaaatttatttgaatgacaatgaagagagcccgttattagatactaccatttgtacatgccctaagcttatttatcgggaagcttatttatcgggaagactgtaagccttcttaggctgcgttcggagataactctttctctccgcacggaaaacggaatgatccattaacgcgtgattaattaagtatttgttaattttttttcaaaaatggattaatttgatttttttaagcaactttcgtatagaaattttttgcaaaaaaaacaccgtttagcagtttgaaaagcgtgcgcgtggaaaaagaaggagaagggttggaaaccctgagtagcaaacacagccttaattaatgtcaagttgttgtcctacaatactccctcggtccctcccacctatcgttgacctttgtgattactctatggtaatggcacactccaacactccattatattatcggtctgatgaggatgaggtgttagcttgttcgtctcacccatatcatttcttgttaggggagagaatcagatgctaaactgtgcgcttcaacggggatgatgaactcccttatacggaagctcgccactgtgtcgagcgaggacatcgatgtgagacccttggagaggaagatcatcagaattaactctgatcgcttgttgaaggtgatccatcatgtgggggacgcccaagccatggagtggatgcggcaaatcctggaggtggcctacgacgtggaggattggattgatctgtgcatccatctccatgggcgcgttagagcagatcaactggaacggatagaagaattcattgtccggatagacaacgtggaagaacgtctgagcaggtataatcttttatcatatattggacgaatttgaaccctattctgattatcctcctctgagccaatcacccatcggtgataatcctcacatgctctatgcgatggaggaagacttgatccatcactgtgaacggaaagtccggctgagaagggaccttgtcttgaatttgatggataagctggtggtggattccgaccagcagctgaaggtgcttttcattctcggggataggggtattggtaagactacactagccagccagatttatcatcgtacaattgaagaacgatttgattgccgagctttcgtttctgttggtcaatatagcctgtcagatcaaccatactgaactgtacatcaaatcaggcggcgatgagcaccaagtcattgataacttcaggaatttcctcagaaataagaggtaactgtttcacgacttgttttcaatcgggtcaaattttctcctttttttttctgctttctaaaattttctgcagttctaacaatgaaatcttaccgaagatttgggtttgtggggtgggtccgtgggtggtgctggactgctggtggtctgccggggtgggtgggggtggggtgaggggcggttatatgtgaggggatcatttttttctataacgcaacccatgtgtagtatagcatggatgtcagtgaatctagtcgagggatggagaggtcaaaacgccttataatgtgaaacggagagagtaattgatttttctctaacccttaacccaaaagcagccttatgttgataacctaaaccagtcttaaggaagcctccaacctcgcaatcaccgcgtgcttatctatcctatcagtgccatctcgatcatgcagtcctcactgccactacccacgctacttcaccaaccccaagcccccacttccctcttcagcccctcatggtcgccaccatcctcgatgccctagatggccagctcctaccagccaacattctggctcaagtcgccaccaccaccactggccagtactagggcattcctctcactaggcggagcttcacacgtgtcggcaacaccaggtccgcactctgcaagaacatgccaccacgttgagaccacactccttcaaggagctcgtcgcagcggaaactgttggatttcaaatcctctctgcgccatctaccagctcacaacgccttcaagacgacctttactcaccccagtcagagctcaacctgagcttctccccgcgcatcacctcagcaccagttctactccatggcctataaagctagcccggtgaaggggatggagatgcgacacatccaaggtactcctgccacggatgactttaattactccactcgaacctgtgtggcatcatgtaagagtgcgccattggtggcgtcgggcaacgcattcaagcgagctcgaccgcccaaattcaagttgatgggatctgaattcaaggcgaccctccccgctccttgacaacgccttctatggcccatgcccccaaatgccccccggctgatctccacgaatccccacgcctttcgaaacgtgcatctcatggaaaatgaggacaggatcacttggaaactaataaatcagaacaagtaaatggcagcgttggcctacaatgcacaattcctatgctcaagaaagtacaatttcaacgtcatcatctgaaaaccttgggcaccacgaaaatgcaagatcttcacatggttaatgattagacatgctctcaactaagggatagccaaacaactctctgtcccacctatgccaccgaacacaagagacggccctacaccttctagcggaatgtagatacataaggagagtatggggggcattagcagaatggataacatgtcatgacctaaaccccacccagtgggaatatgctacaatggtgtaggagtggtgggaggtaaccgcaaacatgagagaaatgccaaagcaagtagtccgcagcttaacactgctagtcaactgggagatttagaaggaaagaaatctgatgacctttcaatacaaggag

SEQ ID NO: 24566 - DNA, 5773 bp, Oryza sativa
aacaacagaatatctacacacagattgcagatcttccctcctcaatagttcttccacaaaaaacttttaagtcaacaaaattcagaacacattcgattgttctgaaattttagcatcctaaaattatttaactaattacgtttttgacattatcatggaattgccttttacttttagaacaatattattaagtctagtaagccatgaagaactccatgatttttcaaatccatttcttttatcctgcacccacaatatcattgagctgcactgtatagctaatgcaaagtctgattcaaacaacttttagctaaaattttcctcggtcccaatagctccagtagataaaataattgtgtaagccaaagagagcaatgcacaatatatcagtaaggcgcattgctctttgtgtgagggggcagaatatctatccatatcaaacctaactcctccatatatacaaaagaatcaggcattgtctttgataaaagaggcagatcagatttcacttgtacacttttggaagcctataaatagcaagccagaaggatcatagagtattgcagaacacagaaggcaaagtcatatggatgactgaaatcctacatagaagcggcagtcgatggcatgcatcatctagtggtgcatatcctagagaagttccgagagaagtatagagagactatttggtgcttgttatcacccaatgctaggtatgagttatggctatcagtggccactcgtgaaatgagatagagaacggaatgcagccaaggatgacttgccggtacgtgtatgcatgtttcaaggtactatatgtgcccccaactgttttagatccatgctgacattttccggcaagttgtccttggctacgtcttgttctttttctctcacgtgaggccattgcatggtttgcatttagcttccaggtcatgcatgtacagtgatgtatatcaatgtaaaccagaaatatattgatgggattaaggattagtttagttgtgaaggtgatgcacttctgattgctcacatatagatatccaggcaacatctgattcaacctgattgatctttccggtatgatgacggcttgttcagagttggatatgccattgatgtaaggtgttgcacctcatgttcagttatgttacctcattcaaacacacatgccgctggatagatgtttggacactttctttttattttgtaatttaagcaaacatgttgattataggtgtagtggcccatgctcaacaacattggcaatccaaggataaaataacttgcagaggctataccttgtcataactaactagctagcattatattcaaagttttccccttttaactaaaacccaccgcttcaaatgtttcaaatgatctgttaaaagaagcatagacagtcaagtttcttgattactcaaattttgaagtgatgcatgcccaagatatagcgacagctgataagatgggaatatatgttttgttgtttgaggttaatggaagttggtaatagccgataagatgcaggatcctatgtttggggtctgagtttaatggaaattggtagtaccatgatgcgttgtgaggtggagtgacagcagtaatcagcaagtctttcttcattggtggagtgacagcaggaagatggtgcctagagctaagggacgtggttatgacacaatcatcattctcgcagcttggccgatttggaaagaacggaataaccacatcttcaacaatcaacaagaacatggatggaggtggctgctgcagctgcagaggaagctgcactctggcattcaaccggggtgccaatctggctctcgctggcacggaaactgtggtcacaaaatagatgccgtgagaattagacctttaaccgcataatcagtttttttttcttttgtttctcattttagggatttgtaacttgagctgctgtacaaacactccatcttaatacaaaaatacgcagttcttatgcgtattcccagggaaaaatgatgtgttgtgagggttgtccaaactcagttaactcctgttgatgagaagttagctggacaatcatcagtagctaagagggaaaaaaaaagcactggttctattggtcgacactagattcaatgctactatccaataccaaagtcaggacatatatggtctagtagcaatatcaaagtcaggatatatatggtctactttttttaggggatatatggtctagtatttgatatagagggaaaaaattttccattaaaaatctacatgaaatgaaagaagcagtgatgattgaaatcccccatttggccactagccccaggaaacccaatcagtcaatctaagtgtcactactactagtagtactaattagacctgccctagcaatagagcaactacgacgagctcccaccgtagtcagattcgcaggcactagggtgtatcaatatcaatcaaatcgaaggatcccacggtttcatcggcgatacaatttcgcagcggagcttcaatgcttcatcaagatgtacactacaagttggttacctctcgagcgcccgtggtcgcgtcgcgtcttcgcgcgtggccccgtacgtcgtacgcggcggcggagcgcgccgcccacgacgaccagcgcccgccatctggcctggggttgcctcggatacgacgccgcggcggcgcggctcgtcggagaaggggaagaaggcgacgccgcccgcttgcctcttcgtgggcttcgagactagtatttgctttggattctcagtcactcactaggcctggttgagagatgggctggtcgagctagtgggctggcatgtgaggataggttggttgggtagactattccatcttttaattcttagggtaattttcgcaaaactataggtgttttaatcaagttattacaaaactatgaaactaccgatttaacactaggtttatcatagagctataaaatatcgcaaaagtacatatttagtaacaaagttatcacaaaactacaggttttatatcaatttaatcataaattttggacatttataactcaaacataatattagagctaggaattaaaacgtaaaaatatgtactttttgattattttattattaaatttgtagttttatgatacttagccttaaacgtatagttttaagaaaaaattattgttaaatatgtagttttatggtacatcaactttttgcaataatttagcttaagtatctattgttctgtgaaatttactataattcttataaacaaaagattccttcgtttcttaaaacaagaaaaggataaaatattccaggaaaaacttggagtggaacttcgtacgaatttggaacaaattaacaataaataaggtaataaaataactaaaatattgttcaacaagaagaaatcgtccataaattcaggactttttatagattccaaaattgagaattcccattaagttgcttgaataatttgttcttcttcttcacctgtacaaaagcacaaattttactgtttaaaattatccaaggcttttatggggcgggctttctttggtcaatggtcactaatcaataaaatgttatttggtttacaatagaaatttgatctttaacaaatgaaatactttaatcaataaaaagtgtttactagtgtcactataataccatttattgtatagattaatttaatcattttgatgttaccatgtcccaaccaattggttgacagcatcatcaccaccaccactcatgacatgccacaatgaaaaaaccaacagctaaagcaacacaaaatcaaaccccaatcagctgcaaaacagaaagacaaaacaagaaaaacccatagattcaaatttaaaattcgctggaggaaaaaaaaacaaaaaaaacaaatcggaaaacaaaatccgcttatgcagtcgtggcccccttccccatcgcgtcttccattccagcccagatcgagcgagagagccgtctccctcttcgcttctcctctcccccccgtgatctgaccgccggggacgaccccctcccaccacccgccgccgccgccgcgcccccgcccccgccggcgacgaccaccatgtcgtacgatcgcgtcacgaccttcgaggactcggagaaggagagcgagtacggctacgtccgcaaggttccctcacccctcatcgtcttccttcctcttccccatgttggattggatcggtcactctcgtgcgtagatgcggcggctctgcttcggattcggcttgttccggatcggtggagttttagctgtgagtctctgtggattttagtgctggtctcgaatccccgatcgcgagagtgtgggtggcactgctgctgactggggaatcgtcaggcgatgcgactgtgccgagagcctcggactcgggtggtgtttggatcgagttgaattgatgcgagattaggttgataggacggttgaatttaggtttctactggtgttcggatcacgctggctagactgcgtggatcgacgtttgatgcgttaacttccaaactcatatgcgggacactattgtgatggggttggttagtgaaccatccccgatgtggagatgcgctattatccttgggagtttagcccgtttggataatatgttgattgtctactattggcacatgatccatcatttcatccctcttttttttttttgtattgaacgaattgtttcgccttcatattgcattcttctaggtttctggacctgtggtcgtggctgatggaatgggtggtgctgccatgtatgaacttgtccgagttggtaatgataacctcattggggaaattattcgtcttgagggtgattcagccaccattcaaggtataggacggtgaaattctacctcacatatttgtggtgccttttccccacatgacatgtacaatataaatttcaccaattttttcttgtgattaccgtttgcagtttatgaggaaacagctgggttgatggtcaatgatccagtgttgagaacaagaaaggtgtgatgcattgttaaattctatgtgcatttcacatatggttttcttacccttttcatttcttttataacacattgttgctattttcatcagcctctttcagttgaattgggacctggtatccttggaaatatctttgatggaatccaggtgagacaaatgtaataatcggacatttattaggctgatatgaggactttatgctgactacatgaccttttttcctttctacactttgcagcgccctctaaaaactattgctataaagtctggagatgtgtacataccacgtggtgtttcagtccctgctcttgacaaagatcagttgtgggattttgagccaaagaagctaggtattgtgcctgctaacctgttataaaatctgagcatgtctcttttcaagttttatcctgtacatagataaattacattggtcatttgaataggtgttggagatgccatcactggtggagatctatatgctgtaagttaacaagacagttcccttttttacaagttattatcttgtgttattgctagcgatcttctgcaatctgcagatccctgatgatgttaatctttttatgtgtctttgtgttgcctaactgcctcacagactgtgtttgagaatacgctgatgaaacatcatgttgcccttcctcctggttctatggggaaaattagttacattgcaccagctggccagtatagcttgcaggttagtatgtgttacttaaagctgcttcttctgtgc

SEQ ID NO: 24567 - DNA, 1260 bp, Oryza sativa
gtcattagtcaggcactttccaaggtattttctctattcctctctatttgataactgctagcattgcccatgggcattagccttttagaatgactgaattctgtgcctttcctgactgaaaatatcttatgcagtactccaattctgaagctgtggtttatgtgggctgcggggaaagaggaaacgagatggctgaggtccttatggacttcccacaattgacaatgacattgcctgatggacgtgaagagtctgtcatgaaaagaactacacttgttgctaacacatccaacatgcctgttgctgctcgtgaagcctccatttatacaggtaatacatatatactgattactgatgtttttaatttcgcattccactagtatagtactacatgaatgtgtttcgatcttctgaagttcattttctctagaagaaagtgttgctttgttggagactatagctatctcaatacatcagaccatggatttctgcaggcttgtccttagccatttgtgatctatgagctaattttggaataactaaggttgcattgacaaatacatctatgcatgttccataattgttcagtagaacattgaggatcacatctttatgttatccatggcctttattatttattgaggatatacacatattcctgttagccatgacctgtattacttactaactgttctgttgcagttcagtttatgagttatgacggatggtaactaacttgctagcactagatcttttagtgaatgaacatcatcaaagtggtacaatatgtgtagtttcttgtagaacactaaaaggagtccttgcttagttatgctttatgcctgatgttttctttatcaacaaaacaatcatatttttttctgcccaccaggaattacaattgctgaatacttccgtgacatgggctataatgtcagtatgatggctgattctacttctcggtgggctgaagctttgcgtgagatttcaggacgtctggtatgatgcttcctttcgagttgctattttacctttttggcctgtatttttgtaacttatattgacttctcaatgctgtgctgtgacatgaatgagaattctttctaatgtatcattatccactatttgtatttggggtttaattttttcaggattattgtttattttctttccgttcagtagcttattttattactaatttcattaatagctgactgtaccctccaacatcaagaatactagtgcaatggggatatatta

SEQ ID NO: 24568 - DNA, 9938 bp, Oryza sativa
taagggatgcaaaaacattgtgggagaagctagagatggaactggcgggtaccaaccaggaagttatggctgcggtcgactccctccgtcgaaaaggaaagcgaatcatgcggctcgcatcgtgccggcattcctcggacgtctataatccggcaacatcaacaaggacgttcgagccaatgccggagtgtccctctacctcttcccggccgtccacctcagtccgcccttcagcatccgcgcgacgatccagtgatggtcgtgcaggagtaaggtcaacttcgtttcgtgatccacccactattccgactatcccagaaatcactgaaatttcggaacgcctaggaggctttggttcaactcaaggtaaaatacgttattgcagaatgctaaaataaatgccatttgtattaaagactaatttatacgttcgcagcacaactggaacgggtacccccacatagctctacgcccatcacctctcaatggcagggtgggtttgcgttgtttgctggtacgggatagctcatcaatatgctattttttcccaattgtttatgtgaactgaataaatgatgttttccaattgatgacagagggaacgcgaatggtccgtcccgtgcctcatatgcctcctgctaggccacaaatgattcctcaaatggctctcgatgtgccaacctcacactggcaaggaggatttgcaccatttgcaggtccgtgtacattcagtaccatattggcatgcatatgtccactcgtaattttactttttgctaattaattgcacatacagggactagccaaggtatccctaccataccccaaatgtctgcagattttatcggtcaaggagggtttacgtcgttaggcggtcaatctccccttacatctaatttcatatttttattatttcaatttattaatttttcatgtatatgaatcttattgactatttacttcctgatattaacagggcctactcagtcggttccactgcatgcacctacatatggcaccaacccatggcaaggacaatccatagattacggtggtacgcacagccatcattctccatacacatatatcaatggcactttcatgccatacatgattcccacttcaacttaagacaataactccgtgacattttatatggatgcaaggcacgtcatttggtggtagagtacagggttatatggacttgttgtaacaaggtgattggctatttggtcaatattcctcgcatcctaatgaaattccatatatgcaagcaccgtcaacaggtttggattttttttgtgttattgttgtttgctccagctttgataatttcattgatatctacattgcttctgtagggtcatttcgccctgaaataatgtcagggtttagtccttacactacatcgtacgacgacatgtctagcttcggtggagggtcgtcatcggtacccaacgagcttcggacttcacaaactaatgatgcgcctcatgtgacacagcccacataaccagaggttggcgaaggaaacgacaatgacccgcatagatctaaccgtgagctccatgagccaaaccgtctgtcactctcaggcccgcgacatgccgcaggacaaaggaaaaaaaactacaaaaaagcgaggtggcacatctaggactacgactgaccatgacgatgatgacgagtagaagtgaacattatgtttttcagttcactgccaaccctatctgaaccttgctgtgattttggcttattcttcatgttatttgtactgcaatgaacattatttatttgtactgcttattcttcatgttttgtacgatgtttcgtagttcataaatatctcatatttttatgccctattttgtagccagttaacacatatgatttttggttaactattaatttttcgtacgagagctaacaaaaataatagtctcacaaactaaattaatagtgcagtttctatgttactcgtgcggttaaaattacatattacttttactttttactactatgacttaaattgcccactaatttcttttcacagagatgcaatgatacgcacctaaaatggcatcctctctttccaatcacgggacatgcgccaaagcatcaaatcattcacaattaaactttcaagatttcgctgcgctgcgccgaaagtgacttcgtcgctttgtgattaataaagcaaacagttatgcagcatgtgccgccgaaagtgacggtgtcgctttgcaattattgtcatcacgagtgaaacagtctgacgctattgaattgattagtgaaacagtccgatgcaccgtcgtctctttccaataattgaaactgcgtagcttcttgccatcccctataaataacaaccaaacctagcacacaactacatctcttcttcataaacgttctgctggttccaactttgtgttgcatattcttaggcccggtcttgaggcaggaactgagtagttggtgaactcgctctatgttgttcgttcactcgcgacacggttcctgtcccaagactgagtctgtgaatatacaaatgtgatttttttaatacattctaacacccactctttttttcaagttccagcatccgtttgtaaatatgacctactcctacaaattcataaactcggtgttgcatattcttaggcctgatcttgtggcaagaactgagtagttcgttaactcgctacgcggttcttgtcacaagaccgagcccgtgaatatgcaaaggtggttttctctgtgaatataacatattctaaattcctattctttgtcaactttgtaaaaattgctcccgaatgatctctctactcctttatatatttttaataaatatatattcaatttctgtttttctataggtaatatatgttttctttctctgatatcattattttgcaaattccaagatatttatttttcttctcgtagccgcgtacacaatctttgcctattttcaatataaacatgtttctcatgttcatttatgtatatatatgttgcacacataataaaaaaatatgaaaaaaaaatcctttctactccctccgtcttgaaaaaacgaatatagtactaagttggtattttttgggacggatggaaaaaaattatactttttactctctcagtcccgaaaaaaacaaatctagtactactttggttttttatgggacggaggaagtacgtaccaacggtgacatgaaatattagcaatttgcaaagcgtaattagctaatcgctctcgcgcacggggagagcgataccgctcacggtctcgctctttcaaagagcgagaccgaagccgtcgctgtcgcactgccgcctcccaggattagcagatggattaggggcgtggaccacgcggcaacggtatcgcggtttcaaagggcgataccgccggcgctctcgcgcgcgcgtaccgcgagaccgacacgctctcgctgagcgttagcgcgagaccgctccggtcattcctcggaccccacaggcgtcagtcggcccacgctgctacgctctcgcgtatcccggccgtgataccgcacgcgctatcgcgctttcaaagtgcgagaccgcttcgtttcccgcgtgcgtcaggcggcatcatacggaccgcgctatcgctttacaaaagcgcgacaccgcctcgctctcacgctttacgaccgcgagaccgatgcattagctctccctcactcccaattagcgatagcgccgccgctttcgcgcacgcatagcgcgatatcgcgctatcgctgtttcaaaccgcgacaccagtatatttccgcaaatccgcccctaatcagcttaatcttgcaattccggtcaagaacacgattaatttcaaatttttttccatactactcaaataatctcgacgcaaatcaccagcaaccacaaaaccaaaacaacatgaacacacacatgtggtaataataccaatacaccatcgaatggttccatggcacaacacatcttaatacaatcaaccccaaacaatgcttttctaccaaacaaggagagccacagaaaccggcctaaacaattctcatcaattctagagattattgcaaagataaattaaaaaaaacaaggggaaaatcaatcgaagggtccatatatcatgtatcgatcggtcccatgcctaagcatccatccaacatcattaaaacggaagatactatatgcaacaagctgtggccaaccacatggcatgatcggatcaactgttcttctagatctaaaaccgacgtcacaacaattctcttcacagactcgtgtgatcaccatgcatttggcgatttttttttgtggccggagagaggagggcttgtcactgtcctgaagcagtttgcagctagctctcgtggttgtgaagttacagggtggttcagttttcaggttgagcatgtcagtctcgcacgaaattggagtagttccaagagagtttttcatagaaaataatttactgcctttcaaattttgcatcatttaagttttggattgttgtatggactgccttaggtattgcttgaggttcaagaggaaacgatttgaagctctaaacacaggtctgtagccaagactgaacacatttaaaacaatttcaaccagccgaattcatatctgagtacaagagaaacgtatatcgcgtctgtgtaaagtactgaagtgtggtgcctgcacattgtggtgcatgtgcatctttcatgtaatctgaaaagaaaaggtatagtggaagtccaaaataataatttaaaaaagaaaaggaatgcaaaattaacctaacaagaaagggtgcatcttgacaagcacgttccgaaatatttgtacaccaactaatgacatttagatcgaatctaacaaaaataagttataaaattgtatgatagccataaacatcacaattaacaaccagggtatggtgtgggggaaggacacgggtagaggattgttggccatgcttctgccccacgatccaaggtagtagtacaaaccttcatagttagacattatttggaacacatgaatctcgggggagaaaacattatgacgagttcagttcctgtaggagcagatcaagttcgtttaaacatactaaacatgccgacatctgtattaggccttaggaatacaaaccctatccccgcaaaacaatataagataaaccctattaatagaaaagaatacgcaaggtgagcatagctcaactggttaagttccttatgatggaaccaactcacctaagttcatatctagatttgacgcaggtattcatatttatagctatatgtgccggcccattcctttggagatgcacattaggggtagagcgtgcgtgcgttattcgttaatctcgagatatatgccagcccagttctttagagatgcacattaaggatagagtgtgcgttaataagggtgagtgtgcatgtgtttatagagagaaaaataccttgaggagaaatagaagaattggctggcacttatttttcaaaatacaattatgcaaatggcctggcctgaacctaaggaaaaaaaattgaaaatataccgtttaatttttttctctcaaaaatattcgggttataattttatttgcataaatataccgttgatattacgatctcgcacaataaaaacgcgagaccactcggtgtcgtgcagcaagttcgcgagagtgagcggtctcgcaaactcaaccagcgagagcgagctgtctcgcagactcaagtagcgataccgatccttgccgctattaattagtgattaattaattattaattaatttctaattaggataattaagcactaattattattaattaatcattctcgcacctctgccgcgtgacaccgcgcggtctcgcatcctcttcgtgcgagaccgcctgtatcgtcagcccacgtcagtttcacgcagcggtttagcgataccggtggtatatttgtgccaaaaagtttatatcaagactatttttgagaaaaaaaatatgaacggtatattttcaaatttaagtctgaacctaagcggctaagcccaatccaggccaagtggccaacccagtaatacctttgcggaataagttcactttgactcccttaaaagtgactcgaatctaatccatgaccctaaaccgcaaaaccggatatttcgaccccgaactattgaaaccggtgcaatttgactctctatgtggttttggagggcggtttcactgacatggtggtgttgacctagtctgtagggttgacgtggcgcttaggtggcatttgaattaaaaagtatccgtgggacctgtttgtcattcacacactaaaaaattgtggagcccactgacatgtgggccccacatgtcatcctctctctttcttcttcctcccctcttcctcccttctctctttccttctctctccccttccgccggccgcggggagcacgggctggagcggcggcaggagctgagctcgccaccgccacggaggtcggcgccagcaccgctggaggcgagatcgaccggacatgcaagtgcgtgagccctgggcctgggagcccgacgggattggaccgccacggagctccgctttggctgcggcccgggcgccctagccgaatgcttcatgccgcagctcgtcagtgtcatgcgtgcagccgccgagagggtcagcgtcatgactcgtgacccaccaataaaatcaaaaaaaaaagaaaatcagccatccagtgcaaattcaccacaaaagcacggtgaaaaccacctgttaattatgaaatctccaccgcgatgcaggagatgggaaagagcatgtctcggagttctctttatataggccggaggggaggaggtcgaccgcacggacggaaaacggcgccggcgacggtggagctccctgttgaagacaccggtttaagaaatcgattgggggcgatttagtgcgggattaagtgggatttgttgggaaaattgatgcccactacacaaggaatcgatttttgcaattaatttggaggagaaacgatagggcagggagatcaacggaggtggcagtacttgagtttcacgggagagatgaacagatgacggacagaggtagaagaagctcctggtgagctaggcccgcctgccagcacatggacagcgaatggaagagaaagagaggagggaggatgaggaggatgatttatgtgggccccacctgtcagtggtctcacccatacttttggtgaatgacaaatgggtcccacacatatttttttatttctaatgccacttaagcaccacatcaacgccatgtggaaatgagaccgagtcaacattgccacgtagacgccacatcagcgaaaccgccgagggagtcaaattacactggttttgagagttgggggggtcgagatatccggttttgtggtttagggtcacggattagatttcgatcacttttgagggtcagaaggtgaacttattcctacctttgcaaggtcagaaatggaccgtaattaacttccacaagcccataacataccttgtgccagcccagctcggcccatagctcaggtccacgacactatatactctttgccagagattttcccggtgtccagattcctgaatccaacataaacttctgatcttgcagcaaataaaacagatcattacagaatatgaaggccgggccactttttccccaggtctacagacgatatacataacatgaaacacaagcaagaaagtagccctatggcacaaaattgaaccaaatcatgaatgttggttacaagaagggggtaatgatataatatcatgtctgcaaaagaatacatcaatttcaaatttgcaacaactaagtacatgttggctgtacctccagtatcctttcctgtgtaaatgtggctccaagttgacacacgttatggtgttagtgtatactgctctagggaaaataatgttctttgccagaattctccccagaatgtgccgaaagaatttcctcccagtatctacaggcaactcagcaggcgctcgagatctgtatgtccttgatttttgttttgtgttactccgattcctcaccagtttcatttaccattctagctaggtcttggacaacttcagacattggtggcctgaattgtggttcctgctccattaggaaagtttcagattttacacatgatccctagtactcaaaacgctttgtgcaaagaatgtaaagcattggaacatgtgcatgcgtaatactagtatgcttgcaaatgcagttccagtacgaatgaagaaaatacacatcaattacccggatacacccgctgattatgtcagcaaatcgtgacagtgctttctcagaacattgcccttgtatagaagggtccaccatcctggacagtgattctatgtcatgaagctgagaattggcccatctaacaagatgttgctcagcacgtgggagtgaactgaaattttttttgaggataaaacaggcatgttaatcaaatagttctttcctcgtttcgcactaaaattttgatctaaaacaattacggacagctcttgaactcctgatcaaacatcatgagagaatgagactttaaatttttcttacctgtcgtatggtttacgcccagtaagaatttctagcatcactactccaaaactgtaaacatcaccttgttctgtaactatcccagattcccggaattccggtggttcatagttcaacagtgaatgcattcgatctgccaactggaacaagaacatacaagctgtaagtgcaccagctgtcatttccatcaacataacaagatgatttcttcactgcctagcaaaattaaattagctaaatctactcatttgtgatcaaacaacaaagcatggcatcaactagtctagcagcatagtaaaagtaattgccagtgaatcaaaatttaattatttccaaccaacgggtagagaagaattctctagtaaggtttatttaaggaaatttccaataagcttagtcacacctaaggacctgttggtacctcctcaaggactataaaatgtaaatcactctttacatgttctaaatttaaatgcttcagctatggcaacttcagcacttcaataaatacatggaacaacttatcacacatattgtatcttacctgagtgacagaacttgatgccaacaatttttctagtccacattcagcaacacgcactgaaaatttattatcaaggagtacattagccggttcaaagttctgatgcacaattggaggctggaagctttcatggagatacctacaggaaaggaagtacaaaggttgaaaaaatgaaagccatacatggattacattaaacatagaaccataattttactcactctaaggcctttcctgaaccaagagcaacctggaggcgagcattccatgacagtgtactatcaactccctctctatcatgaagtgcatcatctagtgtttttgtactaaagtgattgtacacaagtaaccgctgcccatattcagcacaatatccaactaactcatggatgttaggatgcctgatatccgagacaagctgaaccaggtctagaaattcatctactgatattcttccattagtattgtcaatcttcattacttccaaaaactacacagaatagcaggaatcatggttaatattttaactgcacactgaatataatgcatcacacttctcattaggataggtaatacttagtggttagcacacacctttccttcaggaaactctgctaggtatacctttcctagtctactctttcttatcaaattctcctctctgaaactgcttgtatattgctgaagagatgccacagagaatgaagtggcagaagttggtttatttatccttggtggagatatgtatctcttttctggaggaacaacaggattt

SEQ ID NO: 24569 - DNA, 8181 bp, Oryza sativa
atagaataacccaggcctacttccagatgtatgagatttatagctgaataaatcatcatgatagggactcatgtcaggcctttcagcagcttgttggtcacactgcacaaaatggtacgaatcttagacaggtagtgtcaacagtccattggttcatttcagcagacaacttaattgcgaatgtaagcttcagcaccactgaacaactaactactcctggtccctggagacatgaatctactacatgatataatacataaacattagcactaacaaaaagagctcacaggggcaatcaacgacagaaaagacaagtattcttccgaacaattgatattgcacagacagtatggtacaccaacagtcacaacacacattcttctctgtttaacccaaacgccgtttcatattgcatcagatgcccccacattattatcgattttactatgcatctggtgatctggaacttatgaagaaatctagattattagctacaactaacagcctcagtttttccaaggctgttttacttatagtctcttcaagctcttcttcctcgcatcaatcttcttcttctcaaccggagctttcacagcatgtagcccatccttcttgggtactgctgatgctcccaaggcaggatcagaaggagcagcattctgatcctgcaaattagagccaaatgctttatttgcagtggaggtagataatgctgctggacccaatggtgtgttcttgctgacagcattgtttgactgatccacatttagagctgtggttgattcagaaatagtcccgctcttggtcttattcttgggtttaagtgcatggatgctagtgtatagcctggatatgaagcaacatgaaataatcagtaactaattacagagccacatgaaactttagcaagtgaaacaacatagcatgctacagtggcaatcctaatatggcattctttgaccagtagagctctaatcaaggtttgatattacaacgctaaaaactgaccttgcatgccgtgcatactcctcatagttctcaagcaacaatttcccagcttgctcattaagggcagattcaggaaatggttctatcagaaggcatctcactacctgtcacatgccaagaaagaactcttactcgctgttgtgctaaatcatagctcagcaactgcttacaaagtaacattactggaataatatgattctggttaccagcagaacatgtcttaatccaaggctaggattccaatccttcttcagtgtgttaacacatatttcaccactagttgctatatttggatggaaaatttttgtcaagaagaatcctgcaaatcaaaagggaaggtcaaagacttacaaccaaatgcctcacttgaagaactaaagaagaacattactgaaagttttgagggatagctacctttaggaggagactgagggaagtcacgagacaacaatagcttcatacggaatactccattctcatatggagttccagctgcaccaagtcaagattcagattttcagaatatggtgtaagaagtacaacaggaaaaataatacgggttctattatgcactgcaagcagcagaacaatgtgctagaatggtgcaaagcaagcacaagagcatatattgatatatcattaccaggtccctcaatatcagcaaaaatggtggtgaagtcatcgtcattaacaataactttaatcccttctggaggtgactcatcaagactcttcagttccttagccaattgcctaacgacatttggtgggaggttctcgttggttgccttggtaatgcagacatacaattagaagttagaatcatgaaagagagaatagctactttgaagtggtgttctcttgaaaatgaatgaggtcccaaaattattaaatacttctgatggcttaccatggaagcaataacagcagataggtaattgtttggcaacttcacttggaatttgatttctacagtgtgatcaatcgccaaaacaagcctacaagaaaataaatagataatagttagggatgtgtgattggattgatatagaatgtttgaacaaaaaaattagcagaaaaaaaaacagtacagcactcaaaatatttcaattgatatctacggagcagcaaaatgaagactgtatcaggtaaccaaaaattaaaacgtggcttgcaaaactagaaactattgttgcagtaatatgcaattgtgcatgcaccaagcaaatattatatccaatacactacaaatgaacaactactatatgtgctaggggtcacttaatggttctagattatactgctatgaatgatacatacaatgaatattttaaaaaacagtaagtggtttcgtgcagtcatcccacgttttagtattttgtgcagcataatcggtcgcttatccggtataattggccacttgtgtggctttagcggtacaaggctggggcacctgttttttagaaataaaaactcacgatgaatgcaaaagtgactggatagcaacacattgcatatgccatgcaggagagatcgatgttatcatacattgcatttgtcgtgttatcgcacaataatcttaacctaaaagccatttctgtgtactgatataccaactcgacgatttaacatcacttcctactgatataccaactctttccctctccacaagtcccctcacgcatgcaagtgcatgtgcacactcacaccaagtaaatttaagtgctaaattagtaatttaatcccactaggaagcaatgttctacttagtaacacttgcaaacatggagtacttcaacatagtatctgcaacatcgagaagctaataacactggaacaatgcactaagaccacaaaccagaattggcggtttgcgtaaataggctacgtacattatcacatgctactgcaatattgcaaatatggtaatgagccatctccgagcgcttatttattactaacttgaccaatcaagcgtataaatagtaactactactaaagtgccaattaacttttatagcctcgctccctccactttacagagagttttcgcgcgcgcaatcgcgcactcccgccacaccatgcaaatacaattcctgcatatttattcagggcaagtatattcaggggccagtgccctgcacccatgcatcatgtgtgaacagaaaatttaacaggaacaacacggagtgcttctcgctctagtgaacagaaacctaatcaacaatagtcctcttagaattcacaaacatgtcctgtcccccctgctcagagatgagattgggcgcaatgtacttccggattaatagatcgaccgatcgatcacactcgcctccactatcaacataaaacgagtcttaacaagatctcatctccatcaacaggacgaaacagacgccttacctgcgctaaaagggcaaagggaagcgtaccacgcggagtcccgccgctaaaatgccgcctccgggtgacccgcccacgagatcgacgcagcagcacgcaaccagccaacggtacgacgatcgggggggaacggcggcgccgggcgattcccttgcagcagcggcggaggcggcggccgggcaattggggcgggcgacgggcaggatgaggaagctccgcgccggagagaggatccccggaggtgggcggccgccggcgagaggccgcgaggggggagggggaggaaaccctaggggcgtggaggaggcgctcttcgatttggggggagaagggggggaggaggaggaggaagaggggtaattaggatttgagggcgactcgagaacctacggaaataaaaacgagatccgcgcggtgcgcggtggtgcgccgagcgcgagatccgaccgttgacgtcggggtgggccccacgtgcacggcgcgtgttggggggtgggtcccgctttgccgtctcgccgacgcgctcggttagttagccgttggggggtgggggagagggggctttggttgggccttgggccgggccgttttcacgagttcgaaatcgtcccggcgagcgtcgccggggagcggttggaatgagagaaaccaacggtataattagtagagggctcgaggctactgcttcattcgtgctagaatattataacctataactaatggaataacatagtaatccaaatctgaatatatttatcagttagtctctttaattataggttctgtttaaattatagtactaaattaagttatattcgattttaggttgtaatattcacatatggagggagtatgtgctaaactgcttatccatgtgtcgttggagtttggagtacggatgcagtataaccaatgttccgtaaagttcacgagaaactactatgggcatggtatatctcctgtgattcttgtattggcaagacaagactcgtctttttacccaagaagggtccatagccccttttagacagtggcgtagctaaaatttagagtaaaggtggtccattatacaatttttattatattatctagcatatatactatagttttaatctcgatcaaatttttaggtggtccatagatcatagtgccacctagctagctacgccactgattttaggccttctattgctgggcctaatgggacaacgccatattagctcaggttttatcaccagacgctatgtataaggtgtgcacctgggcaggcatcaacacgtgtagccaaccgccgcaaactaatcaaacaatagaattaaccacagctgacgatgagcagtggcattatcaggcagttcatcaccggggcactccattttctgcactgtgtgattattagtacacacatgttcctaagatcctagtcacaattgagtgtgtttctgatttgattccatcggggagaaatgacgtaaagccaaggacgaaggacatcgctgctgttgaagcatagcttcgcctgcttggcatcacagtgacaagaatcacaatcatgctgtacgaatttaggcctgctggatactgacatgtggcgtaatagtggccaaaccattgggggccaaatgtcatgtcgacatacgagatcataactgtaccaacacacagcacaggcttagactatctccaacaggctaggcatagcgacacccaaacccaaaatatgtgctccaggctactgtagcggaaaaaaacagggtccaacagagtacccatactaaggacctattttgggttccagccgaggcggaacccaaaaatgagcgccctctctcctcgaccgaaacacctggcgcaactgtttcgcgggaggtggagagaagaggaaagcgcacctggccccggcaatagggaaagctccgccgccggcgagatctgctctgagctaggcttcgcaggtatggatctctctccaaccccaccctccttcatccctggtcccatctctcctctctctggacgtggatttggccgcggccgctcgcaccctagccaagggcgcatcacgctgcatgctgtgcctagccccgacgacgccgctcaaatttttgttgaccgcaccctccccagcatgtttgtgccatgtttaattgaatctctgttgtaataggatgatggataaaagtattggtggctcaagtgctcgcgctagcgaatctgaagaaatatttgggacagatcagtgggcttttgggttttctgccgctttgcattcttttgatgttcctccgaacccccaggtttattgcagccatgcatatgatgattttctttatttacatatctatacatcgatgattaacagttcttttcatcactagttcaacatgcatggctcgtcccaaatgtcatgcccacctataaatgagcaacctagccaggggctctccattgacaacaacattggctctgaggaccctccatcattgaaatcacagagggctgcaaagaagaagaaggtgtccaggagaggaattgcattcaccaaagaggaggacatggtggtgtgttcagcatttctgaatattagcaaagaccctattacaggtaatcatttgcaacatcttttatgaattctttgatgcccaaataacatggtggcataacatgcaggtgtgaatcaaacttcaagtggttattacaagaggatgcgtgattatttcaatgagcacaaacctgaagggtccaaccgtagccagattgctattcagcacaggtgggcattgattcagaaagcgataaacaagttctgtgggcacaaagcagctgttgataggctaaatgagagcggaaaaaatgagcaggatcgggtatactttcactcatattatcctccatctatctaatttacatatggttactttctaaccggtttaatctattttttttatagaaggtttaatctatattcatatttgcagatagatgatgctgtacaaatgtacgagaagacataaccttttaccttcatgcattgttggaaactacttcgcaacgaggccaaatggaacaataagtttcttgagctaaacaactctacatcacctgatcgaatggaacctccttcaactcaaggccatactgtagccggccatgcagaatctgggaatgagaatatagacacaacacggcctgagggtagggatagtgcgaagaggcgtagattgaagagctatgcagagacatcatcatctagtacaacagttgaagtcctccagcggttgcaggagaaatcagagaagaccgaactgaagcaagaccagcagatggttgaaatccttagtaggaaggacgaaaaaattaaaattcagagggatcttttcaaccttcagaagaagcatatgaagatgagtgtgaagcagcacaagaaggaaaatgagattagggagaagcagactgaggctcaactgatgtcagctgagtctagtattatgtccattgacattgagaaggtccccccttatctgaagaactattatctaggcatgcaacgacaaatcatggagcgcagaggattcagtagtcccttgaacaacggagactaaggagcgtgtgtgttgaatatatgtccaacttggttcgcttgagttgaacttttctattgtgtgcaactttgtactattatctattggagtgatgtgtgtctgttcatgtagtgactattgttcatttcagcaacaaaatgtcatatatttcttatcaacaacaaaatgtcatatatttcttaccaacaggcaacaaaatatctttcagccactatagttcatgtgagcagccaacaaaatacaaaggtcttatgagtaggcagcaaaaaaactaagcctacaactaaagactagttcctgtgatttggagcaaagggaccagagcattggccatatggcatctacatgtgttccatcatgtcattttgaagcaatgctgttgtctctctgtcctgaatgatgttttgagcatcaacaagtttctcaattgccgggatttccctatcctggttaataggtgggtcggacactccaggccattatgatggatggacagtaggtagctgaaccccacgctcatcttcaactaccatgttgtgaagtatgacacaagcacgcatgatggaattaagtacttttggactccataaacgagctggcctatgcaagattttccacttagcctgcaggacaccgaaagctctctccacatcctttctacacgactcctgttgctctgaaaataccttttgtttgttgctaactggcaaagcaatgcttttcactagtgtagcccaatcaggatagatgccatctgctaggtagtatccaagggaatagatattgtcattgacatggaactcaacagagggtgccctcccgttaggcacatcatcaaaaacattggaacgatgcaaaacgttaatgtcattgtgagaccctggtaaaccaaagtaagcatgccaaatcctaagatcctcggtcgccactgcctcaagtattagagttggcttgcctttgtgccctctgtacatgccttgccaaccagtcaggcagctagaccattcccagtgcatgcaatcaatgctacctatcattcccggaaaacctctggccaaattgatgcttaatatgtgctctatctcctcactcctgggaggacgaagaaattctttgccaaacaccttgatcacagtcataataaattccttcagggtctttagggcag

SEQ ID NO: 24570 - DNA, 7996 bp, Oryza sativa
actcattagccggtcctccatatgctagcatctttagagccaccgtgcacttgtgaagagcagagaatcctaattgcccagcagcatttctcctctgtgtgaagaacctgttcttggctgtgacctcatccactattcgaaggaacaattcccgtctcatgcgaaacctacaacccaaaattacagttgtttatcaaattaattcaatatatctacaagaatagtgagcaatatacaattgatcatgaaaatgttggcatttccttcaacacaaatatgtcatgaaaatggaaactgggccaaagattctacctcctcctgaaatgttcttcattgtaaagtggacgttcaacgaagtagtcctcattcaattgccagtctgctgcaattcgatcacgcttataagtcttgtggccagggactgaacctccccaagggcgttttcgtggcgtctgggtgaggatgaccactgcggccatgatctcatcgtcctcagagtatgttgcggctgtcccaaacattgacattttgacgtaactccaagccatggccaccacaacggaagtgcaggtctaaagccaagccgatttagggacaaattagccacaaattaaaagggaatgtgacatcgaacaagcaaatgctagaaatcagattacttgtgttctgattgactctgctgcgccaacgttcggccttgtccgaacggttgctcgccggcggctacctcgctgctactgagactcccttctcacatgcagccagggcggcaaaacaatcccgccatcgagccaaccccgtagtcccgcgccccgcgcccggtatatctcgcacgacaccctccgtttcccgcgtaaaaatttcattgcgggcccgcgaaggaaactgtccgcattgcatggtttccttttgcgttcgctgttggagaaggcaagaaataggtgcgtgacccttttgccgcaagcgacgcataccgtccaatgggtctcctgttaagggtattattgttggagatagtcttatgagtttcgaatgcgtgcatggtcccttctgctggcagctgccgcctgccggtgtgtcccgtgaccaatcgagaaatcatcttcctcaccgaaagagaaataaaagtaaacagtcattttttttctaagagttggttaagaaaatctccagagtcctacaagtggtctcaagaacagggtgcgcgccatataatatgatgctatgtaaagattttaacatagatgcctatcttttggggtagttgtgttccagtctccttaggctgcgtttgtttgtatgggttcctaactcacattaatccatttttcaagttagttttagctaatacttaattaattatatgctaatgagctgcttcgttttccgaactggaaggaaaggctttattaaattttatattattaaaataacaagatttttgtattgtataccttgtggtaagaaatggcactacatatctatcattaacttcacacaggtccacttatcagtgtctctcctccctcctaacccctttctctcctccacgcacttagattccattacctcatcgctccctaccataatccccccccaaatcaccaaatgccatggctctctctttcttgttgcccaatgctgaacaccaagagttgcctctcctcctagtcatcgaacgctatgctaccttcacctcctccttgtcgccgaatgggatggaaaagaggaactcagggagctctacgtagcaaacacaaaattgttgtggatccataggcttcgtgcggctcagatcttgcagttgttcgtattttggcgatgacggaaagcttgaaggtgtagatggagcggtaacgatgagcttaacgtctcatggtgagttagagatgagcttgctcgtaactcatcggaatactatctttctcctttggttttgtaaggtgccacccccattatttctttccttttgaaccactcctctagatcattctttttttttcatggggcactcttgtcctctgcagggcacgaggagtctgacaaggttatttgatgggctgacatggagttaggacaatcttctttctagggcatcaccaatatttagggccaatttggattgctaccaaaaacatgccctatcaatattttggtaatttgaatagtacttgtgtttgatttggattgaagcccattcattggtaatacctaatctagatttggcattatctagaacattctttactacaatttcacattttgactctatgttggtagcaaaccaaatatgatcaaaaacaatcttaccttaccaaatatttggtaatattaaaacttgcctagattttggtactaccaaaaaattggcagggtaacaatccaaatagacccttactacctaatttatgggtattagttattgttgtagctataatggtgaaagaagaaaaatgaatagtaaactggaccccacaaccactggccatgatagagagataagacaaatgatttatttattccttatgactaggtagtcagcatatcacctgatatttgttacgtactactcccataatatatacaacttggtagtactagtattttattccttacaacccactttacatgcatattgtggatgcccgatatgaagagttgagccactcgctacctcatcacactaaatggcctaattaagagaatcctacgaacaacctcatatttttcttatgctcataagctaaaatttaaattttcaatcttcaatttagattaatgttgaggtttttcttatcctagtttattttttagtctttatttttagattgctaagaatacatatacaaaatttttattaataaattatttttcgtttgcaaataaggccgattttagtttcaaacttccaacttttccatcacatcaaaactttcctacacacaaacttccaacttttccatcatatttttccaatttcaaccaaacttctaattttaacatgaactaaacacaccctaagccaaacgatggagccataaatttctacgttctcggcacgtctcacggtctcacgccgtttgcacgaaacaaacgtgacactgatacacacgcgtacagcaacaaaccgaatacgtacgaaaactccaccttcccaagtcacgcacggagcaaagagacgaaagttaccgaaacagaacacggggacgacgagacgcaccttaagggtgtgtttggttgcctgcatggaacctggctcgcacacgtggatgcagtgggtcgctgtttggttgcctgcaccttactcccagccaggttgagcggatgcaaaaaagcccccacagccaggctgagcaggaacgctcgatttgagcttcgctgctcggccaggcccgcgcgatgcaacgcgctgcacccgcgtgtgcaagggcaggtgatggggtcaccaccccgccccttgccccctcctcattttctcccaacgaacgatagggcgacgacaagctctacggagggaatggcacccgacgaatctgacttactgctgcatccccctcctcttcccaccatccccccctcaatttctggccaccgctgtgcccagacatcctcgctaatggcgtgagcactgccagatccagctagtgatgaggaggcaaaaagcttgacggcgacgagctcagcggagggcgcggcgacgaggacagcggatccaccgtgctgtcgcgtccctcctcctcttcccactgtgcccccatcttcaatcgccggccaccgtcgtctccctctgtcagccagatctgatggagcggaggagcggcgagcagcgagcagcggacggagaggagcatgagaagatgggcggaggagcagtggacgaagagaagcgccggaagacgggcggaggagcggcgaacggcgggcagatgggcgcacatgcggctgtgggcagagaggagttgatggtgacgaaggcagcaccgatccccttcctctatttctttcgtttcttttttttttgcccctcgttttgcgttttctctttctttctttcgtttttcactagcaacagagaagtctgtatgtagaattactagtagtagattagtttcaccggttcatccaccttaagaatttttttaattatttttttatatattgtagaggtaacctcacctaactatatgtatacgaagagataaccacactcacatcatgcaaccaaccaaacaaaattccttctaaacagtatccctcatacaggcaaccaaaacaaaatctcatgttagcctggctagaccaatacaactaaccaaacagctacatatgtattcttctggccaggtcaaactcagcctagatgagagagatagccaggctagggtgatacgggtaaccaaacacaaccctaaatttctcgcgtcacccccccctgctgaaacgcaacacatcccgccaaagacgacgacgacgaaataccagagacgccatcgccacggagacgtgaacaccgagcgagcgctctctctctctctctctcgccaaaaaacgtacgttttctggcgcattgtcagcgtgtgccttggccaaatttacccacgcaagctagcggcatctgacgcgcgcgccgccgatgaaacgggcctgccgctttggcatcgtgcggtgccacggttaaccgcaccaccaccaccaccaagcaccaacaacaacaacaaaaaaacgcattgattgcgcggcgacgcgagccacagccacagcccccaccgggtttaataccatcgcgttggctggcctggcatccatcggcagtggcagtgcagtgcaaaacgagaattaatctaggctagctactaccacctgagtttgctgttgctgttgctgttgttgcatgcggctgtgacggcggcggcggagatgatgtgcgggaaggaggagaagctgctcggggtgcagaaggcgccggggagttgcccgtactgcggcggaggggtggcggcgacggacgtggaggccaagtgggtgctctgcttcctcccgctctgcctcaacaacaagcggaggttctcctgcaccgcctgcaaccgccgcctcgtctcctaccccgcaattgtccatgactagtagtagtagcgacctctctttctcttctcttcctttttcttttcttttgttttattttcttttcccctgattcggagatttgtcgtcgtctatcttctccgggaaggtgatttgataaattctgttctagatctggaactagctgcttctttcccagcgagaagaaaaatagagcatatgtagtatttgatgagttggttcttgttgcgtttattttttggttcgtccatggatggtgaacaaggggtgttattgccgatgctgcgtgtacgacgatgtgttggttccgtgatgctaggtacctaaaagaaagaaaaagactgcgcgaagttgagttctgcttctatgtgatactccctccgtcccaatatattgcaacctaggatggaccaatatattgggactgagggagtaatctgtttaactgatacgggtgttgtttgtactactctattctaaaaagaaattcaatattagcaacttgcgtattcaggtttattgttaggattagatcattttaatagtgggggtagataattattcttttattaatagacgatacatctattgatagtgtggtgtttatagtgacttcatcaagattatatttttcatgtttttgaaggtgtttatataggtgagatgtgcgaatgtatttataaggacaattgtgtatgtattgagtgtctacgattatactgtttttaaagttatgccgttcttgtgtttataagtataggatgtacgtgtacgttttattagagtgagtgtatgcatgtcaaacgtcatgtttatattactctttctgtctcaaaatataacaattttgggtggatgaaaaataacatagtactatgaatctaggcataacctatttataatattagaatatatctcatatagctagaagttcttactccatattttaggacggtgttatatcttaggatggtgagagtactgtttttcttttgaaaaacaaaagggggaaattgtcacaaggcgataaggccttggtgctatcagtcgcggcggcgcatcgcgatcatgcgggtagttcggtcggtttgctggtcgagaaagacgtgtatctcccctccctcttcgtccgtccgtcgcgatcgtcgttggatttgccgatgatgactcgcgtgtgcaccaggcagcacaggtagacccatgaaatcgagctagtgtgtggcattggtttcccattcaatctttacacggggctaaaactttttaagcccgtatcatatcggatgtttagacgctaatttagagtattgaacatatactaataaaaaaactaattttataaatgagagctaatccgcgagacgattttttaagcctaattaatccataattatcaaaagtttactgtagcatcacattgttaaaatcatggcgtaattagacttaaaagattcgtctcgtgaattagtccaaacttataaaataggtttataattagtgtatgtttaatacttcaaattagtatccaaacatccgatgtgacaggtacttgaaacaagttcgtgaaaaccaaacagcccctagtactacaaactaggagtagctattgggtatttgcctccgtgcctcacggtatctggtgactgtgagagcgatgagatggacaatgtttctgtgtcatcagacatgaggtgacagagttggtcggtgcgctgtccacaacaagctcaactgagattcgtacttaggtttagtttagtttccttcaaactttcaaaaatttcgtcacatcaaatatttggacacatatatagagcattaaatgttgacgaaaaaaattaattacacagtttgcatgtaaattgtgagatgaatcttttgaggctaattacgctatgatttgacaacgtggtgatacaataaatatttgctaataatagatatattaggcttaataaattcgtttcacagtttacatgcggaatttgtaatatggtttgttattagtctacgtttaatacttgaaatttgtgtctgtatatgtcaaaaaaaaattggaggagggcctaaacacggccttactccctccgccacatcctagtacaagtgtgtttagatcgaggggtgtaaagttttaatatgtaatatcggaaattatatagggtgtcgtatggggtgctcgggtactaataaaaaaactaattacagaatccgtcagtaaaccacgagacgaatttattaagcctaattaatccgtcattagtaaatgtttactgtagcaccatattgtcaaatcatggagcaattaggcttaaaagattcgtctcacaaattagtcgcaatctgtgcatttagttattttttagcctatatttaataattcatacaggtgttcaaacgttcgatgtgacatggtgtaaaatttttgtgtgggaactaaacagagcctttgtaataggatatgtcacatccacccaaaatcccttacattataggatggagggagtactttatccgtcctatattattgttattcttagtatatagtactagcatagattaaagtttgagaaaaataatactataatattgcttgttaaatgacatatggttgaatatgagaagatggctacgggtagaaagaaaaaaaataaattataagtgattaatagtttaagtagtactttattgtaataattattttgaggtaaagtttaaattcaaaagaaataaaggacggatgtactaagttcaatcgattgctaaatactcactccattttaaattgatctacatatagtttttttcttaaatgatctacatatttgtgttcattcattaagtactaatcgttatttgttcattggagtaaatggacattgatgcatgcatc

SEQ ID NO: 24571 - DNA, 3654 bp, Oryza sativa
aaataaagccctgtgcataccgatgcaactgatacaaatttaaggaagcatccgttgcatgcacaaatttactggaagtctgaattcataggatcgatgctcactgatcaatggacgggagaagccaagaggtttctgttcactgaatcactcctcaacgggacctgaatattcaactgcggtgcatatctttcttgagattccaaagcctgatatcgccgggatgcttgacaaattatacaggagaaagttatactccagacaacctgagctgtttcatgtgattaattagtatgatcggttgctgtttatgtcgtttgactggattccattggctactaatgaagtaacccatttatacttgttttttcatgtttctttggatatatactttccttctctaagttgaaaaaaaagagaagaaaactttgttctgataaacttataggaaattgatctatagctagttttgctgtgctgtaggagtcctcaaaagcatgaaccctcttcacttcgtcagaacagagaacttttcataacagcagctttggatggttcggactgattaaaggcggccttcatgtaagaatgcaagcatgcattatgtttaagttaagttaacccgactgaagactaattagtcggtaatttaacaattcagagccacagtattctagtccatcttgcatgttccatgcaacaaaggacatcccactagcagcaaaaaatacagaggtttcacatgtggggcaggccatggatctagctaccatttgacccttagacagttaactattgatcgaccaacactgttaggcagacaaagacaacattactcctaacaatcataagatactccccacatgtggatccactgttaaaccctttgctttggactcatcaatgcaagctacataacgcctttacacatcaataaacaatgctgtaattaactatctaccaagttactattactaccatccttcagagttctaaaaaatctgttcatgcagggattggattgaagcagccagctctttaaccaaagagtaccagagtgatcttgccatgcactgtggaaacatcatgtattactttaatttatcccagtgtaggatcgaagttactacagttacctttgcagctgtggcaaagatcaagcaaaaatgtgcagagcgataatgtgtgtttgaacaaagggaatcaactggtggaatctttagtaccgccaacccaacttgtcaaataacggctgaactcttcatactcaaggccctaacctttactttgatgccaaaacagttgcagaaaaaattaaaaaattgtaatcaaggggtgtctttcctttgcatttctctctagctaggatcctacttgatctcatttccctattcttcagctctggtagttcttcaggtcttcaagaaagcccatatcatatttcttttgcattttcctctagaaacctagaatcctatttttttccctactctttcttttttgccttcttcaagaacactatatcccaagaagcacatagtagagtatcgtgatcggaagcgcgatgagcatcccaaaaataaccctgaaaatttcacatttatatattttaggctatatacttcagcaaccgtatggacgaacaaatagaaagtttaagcatgcatttcttacgctgtgctaagtatttgaggatggcaattgtactccttggcaaacacaaacgggacaatgccttgtggaagtgctgcctgtttgacaatcaattaatctataagatcaccacaatacattccaattcaccataattacaaaatttaatattttttttcttttaagatgattgcaagaaataaagaatctactgcttacctgaacaatggcaacatgcaagagtactcccctgagcccaatggcaatggaagtagctgcaataacagctggaccagtcaagaacctcactgccattgcaaatgtcgcaacggtcttgccacaagaaatgatctttggttgcagagccatgaacaagcctgggttacatatactattgtcagaatttcttggtcaaagcaaagaaaaaactcactagttatggctatagatatgtatcaaaaaggtcaactctgtacctaagctgaacatagccattcctagccctgcatctgacaatattgatattgagccctttattattgaaggcatttggatattccacctgatccaaattcacaaagtcaataagcaattaagcatatattttcacaatgtaaaaaaaaattgtatgacaagagaatcaatgctagatgtatcatgcatgtatgcaattttagatgcttgcaggcatgtgctcctccccactaaaaatgccctgttcttgcaaccctccctctagatgtgccatctaatggtaagatagtagtacaatgaatcaatgatgcatccatatcattgtacattttttgctcttcttcttgtacacatgatggatcatctagctagttgagccgaattcgccgtgtctgtcttggatggggacaaacacggcaatcgcagctgattcggtagatttggtctctgctgctaaactccagggctcacataagacctgcacctgcacctgcatctgcatacgtgtgtatgttctttgcatgtgctggaccagatccgagaccaacgtaattatcatgtgctctcacatgcgttcagaaaacactaatccagttgtgaagttaagtaagttctcatcgatcttgcctcttcctagattaaaatttcaagcaatctagcaacgaatagcatagcaaaaatatatcctttttgtagcttcgaacaacataaattgatcagatcgtgaactcaagtgtatattacttatttggtttagattactatgcagattatcgatttcattatacaaataaattaaacaatttaaaaaaaaacttaacaactagcttaaaacaagtaatctaagtaatgtagtagaagaatatttttttttataaaatacttttttgaaatggagagtaaataatctgttttgataattcggtataacttgaaaaaaagcgcccttgccctgaagatgaaccgggataagcgatctgtcatagctgtgggatgtcaaaatgtattggcagaagagtgttccatcttagagggaagcgaccgggaaagcgggcgtcgatgaagtggaactgtggaagcgagaacgtcagcttgagtaccgaaaacatcggtgagaatccaatacctgaaggagacgagggaccagacgaggccgatgaggctggagtaggtgttggggtttctgatgagcttgcgccacaccatgatgaggatgagccgcgtcatcacgctcgtcggcggcatcgggtgcgccgcctccgccagcccgggcacgtcggcgccgccgcccttcttcctcggcgccacgtacggcgaccccgacaccgggaacttcgccgccagccccgccgccgggctcttcagcccgtcctcgatctccaactcgccgccgccgttcttcgccgccggcgtgacactgccactcacccctgtggcatgcacgcaccattagacgaagccttgaacacatgtggtgtgatcggcgtcgtgtgcgtcaatggatggatgagagagtacctttgggag

SEQ ID NO: 24572 - DNA, 2492 bp, Oryza sativa
ccggcatcatgccggggttcggggcgggatacgacggcgggaaggcggacttacaggaggcgaactagttggtgacctgctcgtcgaggccctgggcgcggccgccggcgccgccgtgctgcgccatggggctagccatctggctggccatcttgctgcccggagaacatggcgtagaagtcggcctggttgaagctggacgcccgcggcgtgggctcgcgcgacgtctgcagcgagtagatctccacgccggtgaggttggaggcgcgcggcgtcatggcgttggacgcgccgtacgcccgggacacgccggagcgcgccgcgccgccgccgccgcccgtggtggaggccgaggcggagcggcggatgacgacgtggacgcggccgtcgcgccccacctcggcgtccgcctgcagcgcctccctcccgttgagcgagacgacgtcggagtcgacgcggaacgaggcgatgctggcgccgacgtccggcgggaactgctcggagatgagcgccttggcgccgcggtactcgaagaggaagagcatgagggtgtaccagatgacgctctggagcacgacgatctgcaccatgagcgagccggagaagtcgccgtacatggcgcggagcagcgggatgcccatgaccagcgtgttgggcagcgtggacagcgagaagagggtgatggtccagtcgagcgacgcggcggcgccgccattgcggcggtagcgggagagcaggttgtgccagacggcgagcgcggcgaggatgacgagcttctggagcgagtcggcggcgaggaagcggtagttcatggagtaggggtcgttggtggagatgaagtggaaggagaggagcggcacggcgaagacggcgacgaagcggttgatgccggagcactggtccggcgtgaatatcccccaccaccgcaccgacccgtacgccaggaacatcgccacgtacagcggcacgatcgccgccagcacgtcgtagatgtcgcgtccggtgatcatcgcgccggcgacggtggcggcggcggcgagctttttctttctttttttttcttgacacaagagaacgagctaattaagtgtggcaagagaggcacaaggatggttatatagctggagaagatgccatgacgacggtggcgatgacgcagttagttaatgggagtgttagattgacaattagttgtagttaatcaccactagcagtgttaattaagtggtaaatactggacctttggtaataaaaatggtaaacactgaactggttcaaattgaaagacaacggccataaccctaaaaaggaaggagattcatgttttttttcctcaggttaaacttctggtgtatgaacatctatacttttcttcttttaaaaaaaattaggaaaattggaactatgccattataattttgtaaaatttgagatatgtcatcctgatccacatatcattgactcgggtgggtcctacatgtcattgagataccgatggcatatctcaaactttgcaaaattataatggcatggttccaatttaccctttaaaattacagtaaaaatatagacgttcataacacgcgcacactcaccccttatatatacacgcacaccctattccataaacacatttagaaaattgtaaatgcaagcgttcgtatcaagtctaggatttgaaactacatgaaataaaaaaaaaggttaagttacactcatttggcactattcataaattttaataaaatatttagtttgaaaacatagaaaatgatatgcatagatttatcttaaaaatattttcataatcataagcttaataaaacttttcagccaaatgccaaagactgaaacgaaatcaaacgacatgcacttatgaccggagaggttagcagtgtagtagagctgaagctataggtattaattcgagttgggctccattcatataggtgagttgggctccattcatataggtgaagctatgttaattgattcgatttccatagtaacctcaagcctctacctgcctaactaagggggcatgacattgacttaaccagttaacctatatatgtagctaaccaagttgctcagtacgtaattaaggccacgccttttggtaccaaagttcagaggggaaaagtcgaagggcgaaaaactatcggccccatcgtttcggcatatttgcaaacgaaaagtgatctgtgaataaaacttttatatacgtgttcttagcgatctaaaagcatagagtgaaaaataaacttcgatgaaaaaaactcaaaatcagcttcaaatttaaggttaaaaatttaaattttaagtgataaacataaatataagcgaaaagatgaggtcttataattttttaaccgagtcaattactgtttaggacgattgacgaataagcaataaagttttgccttttcagtatacttttgaggaaaaaaaggcaatcataagagttttatgtgttatctcattctctattt

SEQ ID NO: 24573 - DNA, 685 bp, Oryza sativa
aattaatcatcatgcttatctttcaaatttatagaaatgttcataaaaaaagggtgacagttattcatagtgaatgacaataaatgcgtttatctaataattccataataacaatgaaggttattttgtttgcaatcaggaaaggagagaatgtttacatggccatggggatcgatactccatacacgtgcagtatgatcaatagagcctgaagcaagcttcatgcctaggcagttccatgctacagagtgcacctaacagtaaaacaaaagatcagaattatacaaaatttaaggctgattatgtatgtaagatagataaaaaagaaggcaaaaagcgacagaaccagttaaatgctgcacctccatgtgtggaaggattatttagaaaaacaagaaacagaattcaagaaagaaacagagaaatatcgttgtactatgattctttctgcaagtaagatttttttttccctttgaattcttcccctcagaggagtagcaactttacaaagtcagacaagaagtcccttttcgtgaaaccaaattccttcaaaaattaggagtaattatgaccaggaatcatatttgacaatgcgctcattcaccagctcccagaaggaaagcaaccaaccaaagcttcattcaatctcaacatggcttagccctagagcaaaagaatcagcata

SEQ ID NO: 24574 - DNA, 3754 bp, Oryza sativa
gatgtgggtaaggttgacaaaatcattagacaactggaaggaaaatcactatcttacaagatgtttgcacgtgatacacaagcttcacgaagtgtgtaagtttataactattgtgtatttgtgtatttttcaagtacaaaagtggttctcttgctgttttatgataattaatcacctaggcctgacatatttgttcatctttgttggaatataacattattgttttccttgtaaatgaccatgtcactatttttatgctcgccatcaagttcaaccaaaaaaaaaaaaacttctgttgatgttttgttgttttgcagtggtccacctacagagtgtttcatgttccattctcgagctgcagtggccaaactacacactgctgatgaggtgatgctagtctaatacattgaacttttaaaccagaaaataacaatgtaacttttgctggtaatatactatgtcaggaatcaggttacttcccagtgcttccattctagtactgctaatctctacataaaagtaacagtattattttgtggtatcgcgtttgtaaccttaactttagttgctggacattggcatagcttgagtatggcattatgacgtgtatgcaattgtggattatatagttttgagttgctgatatcaaaactaaatatattatgtggactcataaaatttagcatcatggctatgcaatcgataactccctaatctgttttttttttcaattagcattctgcatgcacatatatcatttcaactggtaataccatgttccattccgttttcccaatttttgcagaattgtgaagaaggcaccaccagggccatatgcattgagctagtcgcaaacaggtttctgcgcaaggtattatacatcaagttgtttcatggcattgtaatttatccagtcgtcccccgaattctagttaatattagtaaatttcattgaacagatggttagggttcttgttgcgactgccataagggaggcagctgctggtgctgaagaagatgctttgctgaacctgatggaagccacttgcaggcgagctactgctcccccagcgcctccagatgggctctgtcttgttgatgttggatacgaggatttcaatagacaaaggtgtttcattgttgattaaacagaacagtcatattcctgttggagcagaacaagatatactgattcaacaatcgaaaatctgaatttttggattcccgagatgaaacttagatcattctggttgaacagtgaacctataagcagcactctcctgtaggaaatctgacctgcttcctagtttccatgtatccatcaactggaattttttgtattatctgagactgaaagagtgttgcttacaccattcgttcaactacggtcaaagtctctctgaactaaactctgaagaaagaagaggccgccgtgcatgctttttcaggttttcacactgtaagttttcttcaacatatttacattatcgaataatttatgatccgaaggtagaacaatcggtggaagttctactgcagatgtcgaatagaccaatgcatcttcctggaccaatatttgctgtcaaaacaacaatatcacgaccaaaatcaaggtacattccaccattttatatgaatgtgacatagaaatgggcatatatagctgtcaagttcagatgattttcagagaacaaaagcatatcaacttaaggcatatcccagcagcaacaacatcatctacaactattgctaatcacatatataattatccctaggccttgttcttgtcgtgcgataacttttttttgcatgatgtatgtgactatgttctatgtgtgtatatactataattcatgggccacgtactcgtgatttttctcttgaatcgtgggcgcgagttggcggcacgaaattctttaagacagcgcgtttgtcggtgggcgcatctcttgtgattaaccaaagcttttgtcgcgcatttcgcttccagaagtgaaaatgttgtgattaattcggcattaaaggtgtgcagatcgatgtgtcactggcaaaaatagtgaaaatggagagccaaacttgccgatgtgctttagaaaaaaaaaagaacaacttgccgatgtgctgctagatggacaaagagtaaacatcatacagctctgaactgagagagagggtcctctgaagtaccgtacgtatacgtacatacagtaccgctcgctgacacatgggtctcacagattcttagactgacatgtcagtaccgtacgtatacgtacatacagtaccgctcgctgacacatgggtctcacagattcttagactgacatgtcagttagcaatactgcacgtacagtactgcaaaggatctacatatagcatacaactacactaggcccttgtttagttccaaactttttttttcaaacttccaattcttctatcagcatccaaaactttcctacacacaaaaactttttaactttttcgttacatcgttctaatttcaaccaaacttttaactttggcgtgaactaaacacaccagaattgaggcttagactattgttcttctttaaccgttttgttaaactattatttggtatccccatgtatttggtatccccatgtaatgggttgagtcttatgtactcttgattgtggtttgggttgtgtacaccttctaaggtgtagaggccgggttaatataatccattatctaaaaaaaggaagacaacttggctggtaaaagaaaaatcagacaactttctcaacattcttggcagcctgcatggtttggttatgaaaattattgtataacccaagagattatcacgtttttaaaggtactttctttttaataaaaagtcatatatattttttttcgtcattgagctttgctggaggtctattgtcttcaccctaagtaaaaatagttatttttcgctccagacaattttaaatccaaataaatgctatcttcatttttaatatataatgccgttgattttttatatgtttgcaccatttcttttaattatatatgtttgcacaatatataattatcatttattttattgtgatttgattaccattaaaagttctttaaacattacttattattgtcatgtttgtacaaaatttagttaaacatatctctaaaagttaacgacatcatatattaaaaaataaagagaatatcactcaagtagggaaaaacaatagtagtgtggtgatttaagttgatgtataacttaagtcactaagatttacatcctatttagccataaatgttacatataagcagaaacaacggtttccaaatagtctttgaatttgtttggagaagcgttgtttccaaatagtctttgagtttgtttggagaagcttctagctgatacatcttttccaaatagtcatttttctgttcggattataaaaagctgtggttgtagaatttagaaaataaattagaagtaaggagctgagaaatccagctcccaaacaaaccctttgtcaatgtgcgagcaagcagccaaataagccattgccaaccgaaacaaagaaaaaacagaggtgatgaacaagaaaacgttgcagtctccagcggcgactcccacaccaaacgccagcttttcctcctcttcttctccctcggggtctaagcctaagcctaagcctcccgccaaataccaacacacacacacacacgcttcccgcgctattcttagctgctctctcccccacctcgcgatctc

SEQ ID NO: 24575 - DNA, 2926 bp, Oryza sativa
gacatggcgccgctcgccgcgctccgggggctccgcgccctcagcatcgccaacaacaacctcacggggccgttccccgacgtgtccatgctcccggcgctcaagatgctgtacatgtcgcggaacaagctcgacggcggcatcccgcccgccgcgttcgcgcacatgaggggcctccgcaagctcttcctctccgacaacgcgttcaccggcccgatcccgacctccatcacctcgcccaagctgctcgtcctgcagctctccaagaaccgcttcgacggccccctgccggacttcaaccagaaggagctgcgcctcgtcgacgtctccgacaacaacctctccggccccatcccgccgggcctccggcggttcgacgccaaatcgttccaaggtgagcaaattatggtgaatttatacattttttaattaaaaaatggtgaaattttgctacctgcctgttcatgcattcgtgcatgcacgaattcctagtgaattactggactagtacatgtttgatttgcaattaggacagaacatgcgatcaataaaaggatttagggagtaatggaattttgttgagatcatggtggtgttcttttctcctgaagatgaagattaatttttttacgtaaaacgaggtggtattaacgtatgattaattaatttttaattattataaatttgaaaaatagattgatatgatattttagagcaactttcatataaaaagttttcgcaccaaacataccgtttacctgtttgaaaaacataccacgaaaattcaaaatttcacccaactttcatatgttgctgttttacacatttgtctagtcaattaaggatttctttaagcaaatccagattgatgtctcactgtctcagaatccaagaataaaatgggctgcaagaactatgtaaatacaaaataaaacaaagtactattcctaccaactactgtaagtggctctttcgaggttgtacagtacgtcatgaccaattaagaaacacttacatgaagatgttaaactcagaagtcaacatccaacatgatcaaacgtgctaattaaactaaccacataaaagtattagattagtgcactgtaatataatactatccttttgctagtgtacaccaaattgcagtattcctgaatgcattgcaatattctacctttataattcttcttttttggaagaacaaaaactatagagcatatttatcaagcacatcgattcaatcaaaaatccaaacccttgattggtcgcactgtttgggctacttgtgaacgcatgatttcataggattttcgcacgaattagttcaattcctccaaaaatccaacaaaaacggattatacaacataccatgataccactgttgttctaaaataagtttatttttcacccttcccatacatatatgatatatataccaatataaaaacaaaagattaaaatactgtcactttataaaatatccatgcaactgtcccatactatctctactacaattcatttgtcttttacttttacaaaccacatcaattcgtactgcttgggtactttggaaaacacgaatttagttcaatttctccaaaataaagtcctctaaaattagtttatttttttgctcatgcaccatctgatccaaacctctccccatggaaatattcaggaaacaaaaatctctgcggcccgccggtcggcgccccgtgccccgaagtgccaatcctcgcgtcaccttcgccatcgccgctgtcgtcgtcgtggtggtcgcctcgcagcttgaagatcctcatgatcatcgccctcgtggtggtcgtcgtcggcgcgctcctggcattcgccggcgcgttgacggcgatgctcgcccgacgccgcgaggccaccaccgaaacccagggcggcggcgtcggcggcgccgccgccaacgccgccggcgccaggatgaaggccacgcccaatccggccgtcaccgtcgcacacggcggcggcggcggtggcggcgagcagcagccgcacgtgacggtgtcggccgtgccggcgaagcgcggcgggcggcgggacgaccacggacggctggtgttcatccaggagaggagggagaggttccagctggaggacctgctccgggcgtcggcagaggtgctcggcagcggcagcttcggcgcgtcgtacaaggcgacgctggtggaaggccagtccatggtggtaagcggttcaaggagatgaacgggtcgggaggcaggacttcaacgagcacatgcggcggctcggccgcctcgtccaccccaacccctccccgtcgtcgcctacctctacaagaaggacgagaagctgttcgtcaccgagtacatggtcaatggcagcttggctcacctcctccatggaggtaattaaccacacaatccttcccatcttgacacaacctgcattgcatttatttgatttatgttaatgtcgccggcgacgcgtgatcggtggcgtacgtgcagggtcgagcatggcggcgctggactggccgcggcggctcaagatcatcaagggcgtgacgcgcgggctggcgcacctgtacgacgagctgccgatgctcaccgtgccgcacggacacctcaagtcgtcgaacgtcctcctcgacgctgcgttcgagcccatcctcagcgactacgccctcgttcccgtcatgacgccgcgccacgccgcgcaggtgaggcgatcgaacgacggcggcggcgacgaacgcccgcggcgtataggccggcacgcattgactggggatggttcgtgtttgcaggtgatggtggcgtacagtcgccggagtgcggggagacggggaggccgagcaagaagagcgacgtgtggagcctgcggatcctgatactggaggtgctcaccagcaagttcccggcgaactaccaccggc

SEQ ID NO: 24576 - DNA, 4195 bp, Oryza sativa
  unsure (1)..(4195): unsure at all n locations
gcgaggcgtcgcgctcccactcctcgtagcgaaacagcagcgatctcaccttgtgtacgcgcgcgtatgtttcacagctttttcggtgcatctgatcagccctacgattcgaaagggacggaggagatcttccgggtatgtgaacgtgtgagataatactgttcagtgcgtgtaaattaattttcttagatttattaaaggaagggaagggttgtggtgaagtttttttttttaccttttgcatacgtacattttcacaggtgatatacgaagattgttggtagaaagagagaatccattagagtttgtaacaggtatacaatttacttttgcatatgccattgacttttttcttaccttctacgatttttaccatcgccgtccggttagtctatgtgtactgtacaattttatctaaatgaccaaaatacccctgggacaaaaacttctaaagtttgataaaaaaattctgaattatcatattttaagtttttgacaaaaattggatgtttacaatcttatgtttataatattgatatttcgaaatttttgtccaaattttggatgtttttgttccaggagtattttgatcatttggataaaaaatgtataatactagggaaggttaaccagacggcgatggtaaattgtagaagttaagtaaaaaaaaagtgacatattgtaaaacgtgacaaaatcagtggtaaattgaagacatgtaacaaactcagtgacatataatggattttctctagaaatattgtgaaagtatagtggtgatatgagtgagcagatgaaaggccaagggcctttgcactcgatgaatttgcatatcatgattgcattgatgacgcagtagttacgacagggactcaaacaaaggcatgcagaaactgctgactttcgtatgcatttaacacatcactccttacaccactgatctttgctcgggcgtcaaaatcagcaaatatccatgcaaaaaaggcaatattgcaaagaaaataaaacggtactccgtacttcattagtttggaactcggctagccactgccacttggctataattacggtgacaatactttctagacaggggttggtaagctgctgctatgtactgatcatagccttgcaagtactaaaatccaacggtggcaaacaatcttgatgacgtgatgcaccatataggatgaaatggaattaactacatttagtatggaccaactgtatagatttataagattagcaccggccccatcttgtcattgacgctaacctatatccccaatcgcagagctgtaacaggccagcacctaagcccctccattgccaccatggtgccagaaacatcgagctgttgatggccctacttccaagtctacaatgtgtgccacacggtccgcccctatgtgccttgccatcacttccaaccattggctctaacaacacagccctctggctttcactagcatcttcatccctaattcgttcatgccttcgtccacatcctccacgaacgaaacataaggaggtgattaatattcattatttgcaagttaaaaaaagaagaagacaagagatgggacttcatagctgctttttgagaggtctgcatacgctacgcaagcgaaacaaccgggactatccaaatcacatatatttatagcaattgtataaaagtccctcggcgaaaaagtcagccaacgatctccatgctgcaccgtcagtccatgcctagttttcttgcccccctaccaccataaatacgcacctagctgtaagatggatcacaaaacacatcgatccatccctctaccagtacataaacaagaaagataacaccaaaaaattagctagctcgccaatggccttgttgtcctccttccggctcgccgtggcagtggcggcattgttggtcgtcggctcatgcgccactgaggtcaccttcaaggttggtgagggctctagcggaaaaagtctagagctcgtcaccaacatcgccatctctgaggtggagatcaaggagaagggcggcaaggactgggtggcgctcaaggagtcgtcgactaacacctggtcgctcaagagtgaggcgaccctcaagggccccttctccgtccgcttccttgtcaagaacggtggctaccgtgtcgtcgacgacgtcatccccgaaagctttacggccggcactgaatacaagagtggcatcaacatctaattcatagacatgcgtactcttgcattgggttgcatgggaatcattaacatctatataattttgtctaaaaagagatcgcgtcgcatgtgagcgagcaaacaattaatttcctatggttatttttttggtaataggccaatggcaaataaggcataattgcgtggataccaaaaatattgttgtgtagctgtatgtgagcacgattttacatatatgttgtttatagaagatgtatcgaaaacaatatatttggtcagctttcattaagatgattgtgtggatttgatttcccaaagtttgagtacatatgtatgtccaaatcaacgtagtccatttctcctttttagcttgtcaaaaatgttgtctgcacttgttttttcattttgtggaaacaaattgttgaatcaatcatactgtgaccagactataagcataaagcatttttacatcatttagcttatttagaggtcagaaaactggaagtcacgttatcccatctctagcatgaatatcatatagaagcacacatgtattgaagcgaagccaactttgagaggagctaagcttcatatcatatagttggccaagaccccaagctatagtcaacaacaaagtttatatagtactacgagaatatcaatctattgcaaaggatctaaagtaaatacacaattggttccaaactttaaatagaagaaaaatctttacactgctagtgtgttagaaggaacaagaaaacataccattagttccaaactatatatatgtaaagaactaataaatccttaagacctaaaaaatgtagtggtggtttatggtcccttgtccaccgtaagcccatcctcactcccacgccctctcgagcgagtcccgcacgcatgatgtcccttctgctgcacgaatggaagaacaccctcgacccccaccacctgatcaaaatcaatcaaccatcattcctcggcgcttgcccatggacctcctttcacgtctagctctcaacttgcatggacgtaacagcatgtgcacttgccaataaaaaaaaaggaaaaagtacgaattacccccccccccccccgaactatcgaggtcgaacgaattacacccccgaactcgaaaactagacattctacacccttaactattgaaaccggacaaataacccccctactcattccggggtggttttgggtccacatggcagtccagtcagcatttttttaaaaaaaaaatcagtgggccccacctgtcagttctccacccctctctatctctctatactctatcccaatctctccctctctctctctcatctcaccagcacggcggcggccgtgcgagggcgggagcaggcggtgctgccggcggcggagagcatcgggaagcgtcgaggcgggagttgagcatgcagttgacggcgtcggccatcgggatgcctaagtggagctcacacatcaccggaatattctgcgtgaaccccgcgacttgcacacagagacaaccaacaaggcaacgatttcttctgaaaatgcgaatcactcagctgctaatttggaaccaaattagaagattcaacaagtaaattctaagcgatttggtttttttaagcatgaaaaattgaagaagggggagattcgggagaaaaatccaattattgtagcgattggtggcgccaccgcgaaggtcaatcttaccacgtggtggcggtggacatcgagagcggcgagggaggcggcgaggcggaggcagcggtcccgcttctcctactaggtgcgcgtgagtccagaggaggaggcgacgatggcggggcggtcggggtagacgagggcggcccggtcgaggaaggtgatgggggtgagcggcncntggttggcggcgcaaagcacggcgccctccatcgccgccgtggtggccgtgggcgtgtccggcgaactcgggatggcgagatcaaagtcagagagacaagctgaggtgaggtgaaca

SEQ ID NO: 24577 - DNA, 6148 bp, Oryza sativa
cctcctcgttgacagatatttgtcacccacagtcgttttcaacacgagcacctgcatgggctgaccctgctggctgtccatcttgctgcaaacaaaaagctataatgtaatacatccaaaatctgtaacttaacgaatcaagaatcagctcgtgaagtgcaacgacgggatgcggatttcctatatccaacgggaatacaatcaataagctgctgacgctagtggccacaagtaaaattaagtaatatctagtctaaaaaaagtttattctgtcaaaacattcagataaaaaatcaacgggaccatatgtaatgagcagttcaggaaaaaaaaaacaatccatctgctttcttgaaccacaaaattcaagagaatcgccatcaagctccttgagttttcatgtattgaaaatttcagaaggaacaaaacaaaggagctcaagaaaaacatggctcagttgcaagcaaatgaacctctcaactagcggacccatcgtgctgcccgcagccccctgcccatgtgggatcgatatgccatcgacgaggctgacccatcgcaacagaactaaagcttgtatacccttcatcccaaaataagctcatttataggtttctgtatccaatcgagcttaaaaaagtagctcagttgcaaccccaacaaagcaaagcttcacatacacacatacgatgcgttaattacgtttctaaaattactcccgcatgacacaaccgtgattagatttgagaaagatagtgatgtgtgtatgtgttatattatttgttcaaatctgctcgtttaaactccaaaatatgcagatctgccattaaaaccacattaggagtaatataattggtattgcaaagcttttttgggggggagggagggggtggttggatgtctggttttattaatttttcctgtttgcgttaagtatgaggattgcatgccctttacattttgagaggtctacacactccatgacatgtgctaattttgcctgacagaaagacaagcgggactacctatcttagatctatttatagcaattttacaagtgtttgtcgaagaacaagccggccaacgatctccatttgcaccatacatccatagcttagctttcttgcctcgccacccataaatacatgcccacatatgcaacatcaatcaccaaaatcatcgatccaatggcctccttgtcatccttcctgctcgccacggcaatggccgcattgttggtcatcggctcgtacgccactgagctcaccttcaaagtcggtccaggctctagcaccactagcctgaacctcatcaccaatgtcgccatctctgaggtggaggtaaaggagaagggcaccggtgactggacggggctcaaggagtcatcggctaacacctggacgctcaaaaccggggcaaaactcaagggccccttctccgtccgcttccttgtcaagaatggcggctaccgcgtcgtcgacgatgtcatccctgaagccttcaaggtcggctccgtctataagagtggcatccagctcaagtaacgtacacttgtgctcttgcattggatcgcatggaaattgttgatctctaaataattcttttttaaaaaaagagagatcgagtctgcctgtgcgcaagccaataattattttttatggtccttcccgcatattgttgtgaagctatatatgtgcacatgattttgaatacgttgtttatgtaggacttatggtaaaaaggtatattatttggtcagccttcaccgagacggttgtttacatttgatttttccaatgttttaatacatatgtatatctagatcaatgatgttcatctatcatttttacatgtaaaaaaaatcctgtaaaattcgcatttacacttgtgattattattattatttgtgaaacacaaattgttcgacataccatattatgacctgaaactataagcaacattggtggttcttttagcttattcggaagttaaaacaaactatatatttgtggatgtcatgtgttctaatgttccaatggatgatggattatacatgaactaagtttattacaataattcaaggtcacaacaaaagaatagatattcattttcctttaaaaaatatattgtagtgagtgatgaacctatcaccacctactcccaccaccacctgatatatggggtccattgaatagtgaatcatgcagacagtcgttccttctcaaacctaaacatgttcaaattgtttgtagcaacgcacgagtatatttacctagttaacactagatttgaaagattgatttaaaaggctctctaaatattgatgaagaagacttccgtataaatcgtaccatttaagaaacaccatgggatattttggccatgtacaacactccaccgtgggtagtggccacagcactctagctaagcgatgggtaaattcccttaaacctactctattcatcatgcgctaatggcctaattcgttttacgtattttcacagccttctcctctcctcttcttttatactcccttagtttcatattataagttgctctaaactttttagtagtcaaacttctataaatgttatcaaatttataggaaaattgatcagcatctataacattaaattagttccaattaaactaacatttaatatttttttagtatgttcattttatattgacaatgttactatacttttatataaactgaaccaatttttttaaaaaaatgactagcaacaaacttaaaattaaattaaaattaaagtgacttaggatatgatgagacgaaagtaacagctctttttctctaacaacgaactggcgtacgtggaaggaacacggccacgatatcgtacagacaagagaagccgcttcgagaagacagccgctgtccatgccgacgcgactccacgcgcgccccgcgtctccctccgccgcagcagcctcgtcagctcgcgagatcaacgccggcccagtcagcccagccacatcaccgcccactccaccaccccaccccgcatggcccggatctaataaccaacggacgcggctcgcgggcccaccggcccacccacgcccgcccacgggatctctcgctgactcggacgacgacatcgccttcgccgctttcacagtgtgggccccgcatgtcggcgccacggggggccacgcccgcctgcgctggatccgagtcagcctcgcgtcgctgtcacactgacgcagccgcgtgttatcttaatcagccacaactttttaatgcctaacctttaaattaagccgcgacgagcactgcacggtggtcggaggaaggcgatgatgaagaagtgcccgtcggagctgcagctggaggcgttcatccgggaggaggccggcgccggcgaccgcaagcccggcgtgttatctcccggcgacggcgcgcgtaagtccggcctgttctctcccggcgacggcgagatgtccgtgttggatcagagtacactggacggaagcggcggcggccaccagctgtggtggccggagagcgtccgtacgccgccgcgcgccgccgccgccttctcggccacggccgacgagcggacgccggcgtccatctccggtaggtacacatgacataatttgagtttttttgagttacagagctattgtgcaaacagcccattttctatgcgtttatttggagttatgaaacacacccaaatttagtcaaattcatcacatgttgggttcattttggttgcagatgaccccaaaccaaccatcctcagcgtaaccatcgcgtcctgaacagcgacgtcggtactcctgattgcgaaattcgctgttagcaagcatgagagggagtccatcgtcctgcgtggcactgataatccacagtaaacataagcgatataagataggtaccatagctggatcgtatcaactgcttgattctctacgcaatatgctaactaaatttgtatacagatgaacgtcatctcttcatgatactgtcttcgttctgacatttcatggatgagtgtctcaactagggtagtcccgtctcgtacgtatcctggtatgtatataagctaggtcacagtttatcctgtaatcttcgaattcacaggttatttattaaatctctcataatgttcaatatttaccagtatgccgtctgatcgcaatatagtcatgtgttgattctgttcaggcatatcctatcttatgagtcaggttctgagctaatctcaaagggcgatatacttcatctcctcttttaagtcagtctctacagagtccagccagcagttcaatacagcggtcacggacaacaggatcctcaaatcggatgtagaggccttaagagtcaaggtaattaggaacccaaactgctccttcagccaccaattatcggcgcatttaacttttcgccacttttaagatgaggtaattaagaattaccacccatagtctatgacaacatatgggtctttatcactttatgtgtctatgacatgtgagtccaattgcaaattgtcactcgtaagagtggtaaatagttaattgtttctgatgatcggcttccggcatctctccaaacttaccaattcttggcttcgatcccaggtcaagatggctgaagacatggtcgcgagggccgcgatgtcgtgtggcctgggccagctcgggctggcgccattgctcagctccaggaagatgtgccaagctttggatatgctcagtttaccacggaacgatgcctgtggtttcaaaggcttgaacctgggtcgacaggttcagaactcaccggttcaaagcgctgcaagcctagagagcctggacaaccggatatccagcgaggtgaccagctgctcggctgatgtgtggccttaagacacttcatccgtgttcgagagagcttgagattctaagaagcagccggtgagaatctgaaaaggctagttgttcagtttcctatttttagtttatgtttgaattctctggctactaatgctcaaaatctgggagagaatctaaatcgtttgggacagataaaaaattatgcgagaaggtgtagctgacagaaaccttcccaaacaaatctccatcagaacctatatgtaaagtaatacggtatcctctgttactaggtgcatgtgcataactgacaagctgctaagtactaggtactacagtctgaggcaagtatttctggtgttttggtgctgaagaactatgttttagtgcgtttgatctgcggcaatcaaggccatctgatcgaaatttgattggtataaatctgatcgaaatttgattggtataagtataatagtttgattttgatcacctctagtcgtcagcgcctttggtgtatacgctctgtaacatctgttacgaattgatctgttcagtatacttcaacagtcctgcattggttcagttcttggcgtagctctggtgcttctggtgcgcatagcatcggtgtgaaatgtgccacttttcatggcagttgtaatagtaaacgactgcaaaattacggtgtactataattcctaaacaaatatgtgacaattacgatgaaaattatcactaagatgttattaccattatttttcgtacacaaatctcttaatttttacaaaatttgttactagcatgtgaactctctaatcccacactatccttattctttttcaagaaaagtacggttggtggtggggatggttgacatatggatcctctggcctcacatgtcctttccctgaaagttggtgatgggatggtgacagattaaccactcaccatcaccattgtttttttctttaaggaatatagattgaatacataagatttaagatttatggggaaaagtatagttcgccaatcttcaagatggttgtgtacaactgattttccaaagttttagtatgccccgaaccaatgaaattcgttcatctttttttagcatgtcggaaatgatgtgaaaactgcacttacacttgaggttttcttgtggatacaaattgctcaacaaaccatattaagacctgaaactataacatcaatcattagtacatcttttagcttattcagcagcctggactagctgcatagtatccacaaatcacatttgccccatccgcaaagcagaatgagcggc

SEQ ID NO: 24578 - DNA, 1130 bp, Oryza sativa
tgcaactcttagtattgtgcaggtaaggaaactgctagattaatccaacctttgaattaaattttcaaacctttctaactgcatgttcattgtttgataatcttaactcctctcaattgcaggtcttttggggattggataagaagctggctcaaagaaagcatttcccatctgtcaattggctcatctcttactcaaaatactcaaaggttattcctaacttccctatgatgtcaatacaattaaaatcgccattttacactaacatactatatcctgtactgtaggctctggaatccttctatgagaagtttgatcaagatttcattgatattagaacaaaaagctcgtgaagtgttacagagagaggacgatctaaatgaaattgtccaggtattttttttcaccttgtgcaaggatgatctgttccctagatttagtcgtagaagcaatagtttgaacttggaccacttaaacatggtgtttttgttttccaaggtcctcctttttggtctttcacaatatttgttttcttcattagatttggagtttctcaaactattcaatttgtattttattgatatatagttgacccttcttgctttgtgtaatattattggggcaccatttggcctaatatcttcaccaaatttcaggcttgttggtaaagatgcactggcagaatctgataagattacattggaaacagccaagctactaagggaagattacttggcacagaatgcatttaccccgtgagtcataccctagttttttctgatttaatacagatttattggttgtctctattttaatgattaaccattttctttagtctgatcatctctatataatgaaacagatatgacaagttctgtccattctacaagtctgtttggatgatgcgcaacattattcatttcaatacattagcaaatcaggtaaatctaacgtgtttttaccactcctttcgtccttgaaccttaaattactcaagcaactttgatttgaaatttgaagtatgaacctgtgaagaatgttttctatagcattagtaagattgatcttgttttgaagttttttattgctaatgacaattttactttaaccaatgtggattgaaatattgt

SEQ ID NO: 24579 - DNA, 801 bp, Oryza sativa
cacaagataatttggaggacgaattgactcccgtatcctgcacagcaacataggtcctagggttcctgatcttcagaatgttaagcatctgtgacagagtgtcgtatgcttcctcaaatgtcccatatcttttctccatggccttttgtttcgccctccaagccttgtggtaactaattgtgtattgttcacctttctccaccagttttattatgtgccgcacaggcaggtcatcaccttcaataatttccttgtagtacttgttcgcaacgtatgccgcggtcaggttgcggtgcgactccctagtgttccgaatcagacaggagtgttcctgcagtttggacagaatccagtaagactcgtactttggcacgtgaccatgaagacggaagacgaccgtgtactcagtcttgttagacttcacaaccctgaactgcctttgcgtcttgaatgaccatgacttcactgcgtcttgcaaccccgttttgtcacggaacattgcacccagattgatttggccatccccgtagaaccatattgaatcatgacaagagttttctgcaatataaccagggtcttcaaggttccacgaagcaggcataggaacttcctcaacttcttgttcatcctcgtcatcattctcttcagcagcgaggttttcctcatcttcgattgcatgtcggtccaccctctcaatttcttcaactatagcaggtatgtcctccccttcatcggcttcaccagtaggatggcggttgaccacttcatctccttgtatggatagattttgaatgtcaggac

SEQ ID NO: 24580 - DNA, 4726 bp, Oryza sativa
  unsure (1)..(4726): unsure at all n locations
tttcataaatgatgactacaggacaagcccaaacactttcagaatcttaggtgttctgtaaccaacacaagaaatgaatccaatttgatcccatgagaattgaccttatttagtatattttaaatacttggaaaaggtaactttgcaagaagtttaccacttccaaatgtttcagaaagtaattatcagaccgatattcagttccttaatcatattttagggacattagttgaatcctattctttgttctattatatcacacgagagtgataattcgaataggcagcaaaccttgcagtacaacttgaactttttgtagtaaaggctgtctgccagaatcagtagagcatgtcttcgtgtaattgcaaaccactattaaaacaacaaacattaacacaatataaaacatgtcagtttagaatcgacatgaaaaaataaaaaaccaaaaacaaaccatatactgctaaaagaatgaactgtaatgccaggtaatcaggtatgtaacacaacaaactacctgggcacccttcctgaagtctttctcctcaatttcagggagcatctcaggagaatacctcccgtttccatgagggccaggatcacggaaactgagaaaataacaatgaagaaaaatatgatcaaaatatacatgcaacaccatttccaagtgatactagaaagaatgaatcaacatcaacttattgatcacatgtcaacagaacttgtttcacctattactcttacttttacatttatgaaatttgaatatgaatttggtgttcttagcttcttaccaatcaatgaagctgatatttgttcccatcagataattatagacataatcaaatgtatgcagtggaacacagctgtgagaaacaggaagataacttcaatatagtgaaagaaaggctcaaaaatcgttatccataatcagagtcagaacctgtcagaaagcaacacatagaactggttatcaacatctgccagtgcattggccaatagtctcttctctgcatcaaccattgaaatggttccccatactacctgcagagcaaccacgcactttggcaaaccccagccaattttattatccatttgaaaaggcttctggaaaattccccaaattttccanaggtttttcaatttgcccagaataaaaaggggaaaaattaaccggttctttttggtatttccaccacaaaataaattggttcaagtggtcttaccattacttaatcttaccttattataataacccttaagctaaaaagaatgaaagaattcttattggcgtagataaagaaccttattggcatagaacctactacagcatgatctactactgatatagaacatcctgaaaaatgaatgctaaatttatgaaaattatctttatcaaatatatgctcgttatgtgctcgtcgctatagtgctatgtcctctggtgtgtaaaacaactatttgtccatcactactaccttgctagatagccaaacaaagaagtttctgatggaaccaagatctaccacttggtcattaacacatccatcagtcatttggaatgcagagagatagacataagctttgaaaatagacatattttgcaggtcaaatccttaataaagaacataatcaaaggaaaggcattaaatacagaatttctgaagatgaaagtaattaccgcgtcactgtgaatatcacgaccaacaaacaaagaactagtatgtacaggcttttcacgtgatgcatgaacatagatggagtatcttccctcctgaccctgtttggagaagtcaaaattattaagattttttaggtttaaatgaattataaaagcaacaggcattatcacaatatatatatacttccagaggttcaggagagaagaggggggagattttttttttttgaaactgggggtagattgtagtaacttgtaaagtacacttgttagttattgcggacttgcggtataatatactagttggtttgttaactagtataaggaaatatccactagtttgacttcttgtgcagtaatggaaatcatccttagcatttctctcaatgatatataatgacccttgtaagatgctagctaagacattacctacggattttattatgttagttcagtatctatcaaatttaaaatgctgttcataatacaatagtgaagcactgctacaagtctacaactttcataaagaacagcaacatattgattaagtgccatttttcagtaatatgtatctaaaaacaatactagagcattaaccactgaaacaacttgttgtctgtatttatgctgaaaagaaactgatgttgctttgcagttaaaggaaacgacatgaccattgaatgatttatactcttaaatagcacaaatgcaacaaatatatctttaccaacctgtaaaaacttttcccataatttctcaaagggcagtgtaccaggtgtcaggaacataagagcgatctttggatttttcgacactggcatgggcattgcaaggatatccctaagaactacagatgaaatgatctcctcatcagtccgctccctgcgggttacagatgggagccaatccttgaaagttgcgcatgcaccagaaccgaagaggtagcattgcgaataccgccgtggtgggaaaacatatgccccaatcaatacaaaacaaaccagtgacacaagaatgattatccatttgggcttcttggcgacagcccggtggcgcagagatggcatgacagtcatgtccttgctgtcctactgcaacactcaagacacttctatctcctctccatatgttcagatcatctagaagttaccaccatcaaagtaatcaaactctggtaattatgatgtgaagttactacaccagggcccaatgaaatttgagggaactaacaaggtgacaccttcctgcaattgcaagtaagcacaacattaatcaaggaatcaagaaagctcctagataagggacagaattcagccgcacaatcacaaacaacattccatttggccaatgattgtttttgcacaaatcttgatgcgtctagtacgcgattcagctatgaccagctgtgatgcgagctaccagctcccatactttggagatttctaaactgctcgatgaatctagcaaaagctggcggttgcaattggttggaaacaggtgatctacgcgttgaaatcaggtgatttccacaggggcaggcagcgttgctcaagtccatggtggcggctcgcggaaaaagtcaaactacgaccaaatcatcccgatccaattcgctaacccagaacgccatttccaactcgatccaatccacagcttcgccaccacaagcaccaaccacgcccacgctaaatcacacagcctaagccacaatccttaccaaaaagaggctcacgtaaaaaatcggaaccaccaaaaaaaatcaagctaaatcacgcacggagaagaattacccaagctatccgagcaaccagaagcccaatgcgagaggactcacacagcgccgcacctcaccgcagcgcaggaggcgcagctcttggagcttagctcgctagctcgcacgcacgaatggcgcgaaaacgggcaccgggctggagctcgcgagcggccgattccggcgaggaggtggccgcggcgagctcggcggcgacccgggaggtggatctggagctcgcgggagatcggattgggatggcggaggtggaggtgggagtcgtagagagagagagagagagagagaggaggaggaggagggagatataaacaaatggattaattaagctggaagtggcactaattggttgggttaagtgctgggagggagtcgcctcttgctgccgtgatgggcttcaaaactggaggagggatttggatttaagtaatcaatttttggcgtgtgctttttttttgcacctgggtcccttgaaagtttctacctttcgaggtagtcatgggctcttcttaggtttctagatttgggattatttaagtcttgatccgtttgaattggatgctgtttatgctttgtgttatgcttaggccctgtttaagataaattattgaacagattattatcacggattatcggtttgattatagggatacattaaatattttgaaaaataaacttagcaaatagaatagaagtaagttctttttagaaaaacgtgttttccgaagtgtagagcaaattaccggttttaataatccggtgaataatttaaaaagaacagggcctaaatctatttgtttagatttttttcgaaataatgtggtaaagttgcaataatctagaaaataatccaaaagagggatacctttgattgaatatacatctacctttggtatcagagtgcatatgcatgtgtggcacaaaagtaatgcagccacccacaaaaaagcacattagcaccaccactacatctttgctggtgcctttgggatcagatcagacccctgtttggatgttggagcacaacaacaggtcaacagcaattttctcgcagaacatttcagcaaagattcagaggaattttacagagtttgaaactcggaaacggtgccaaattgtttgttgactggttaatgctgtgggttggtgactgggtgtacaaatgtacaatactactactacggttggagtactcgcaacgcaagtaccgtacctagaaatgacaggtagagagatctggattctggatctaccta

SEQ ID NO: 24581 - DNA, 1666 bp, Oryza sativa
  unsure (1)..(1666): unsure at all n locations
cgtggtgttggcctgtttgggttgggtgttccatgagccaagacagagagatccaggtcgagacaaaagctaggtaagctggcctggtccgcaacgatgaatggatggatggacttggtaattaaaaaaaaaaagaacaaatggatctcatctcatctcatgcaccggcaggattccaaatgctggcccggatgtaagccaagaaatcacattcacaggtgcaagattgggcatgttgcgtgttttgtgctttgcacatggggggaacccatctcacattccaatggaaacatacaggaagtaaggtgttgatgggagaaaaatatatgatgttcaagtagatggtcatcgtgcttattcaactatcaacatgtgcacaggtatcttacaatataaataattgtacaccaaaaagaatgccttcatcgagcaccggaggtcaaacaggaagctacaaaaagcagcagcagtgtcgatgcagaaggaaaatatgatgattctgaaacgtaattcacatctacaacctcacgcgaagcaaaataaattgccccaactcgcttcgaatatctggtgatattttattgtttacacgaatgtgatcctcaatttacagcacttcacctagcttcatcttctaggttgcggaatccggttgtgaggtcatcatacaatttctggaattttgcgactaggacatcttcaccctctgcagggtcctcaaacttttgagatctgttgcaagagtgaagtattcagcaaacaggattaccaatgaaataaacccaatcaaatggtcaccatntgaggtatggaactgaaatacttacactaggcgataaantagatcacccatacgatgctttatgacactgtatgtattttttgtccatcagcattagctgcacgctccacagcctacaagacaagacagaaacatacaattttgttaaggtatgatggattcaaaccaagcacatttcacttatgaatactataagtttctttccagcaaaagaaaatagtgcagatatcagatgagtcttacaagaaagttcatacatcacaattaactaaaggatattgctacttgctacataccttctctaaaactaggtgaataaatatcaagtatttgcttggtaacttttcttattgacataatcattatataaacttcagcccgttgcaagtctagccaaagcttttcgagtttacacttagccctagcacctagtagtttgtgcaccaattgccaaaaaaaaagaaaaaaataaagaagtcacacactttcattcaaccagaggaatttgagcaaaaatggttcccttaaacccaaatccttttaacttgcccttgctgactcagttgaggtggacatatgaacacaatgtcatggtgaacccttaggcattagcacactagcatcgaagccaaccaagggagctagtgagagtggatgcaagaatgcaacagaactggggttaagtaagcgaagccattatttttaatcaacttttaatgtgagaattctgtttggctgaggatctgtgcgattggtgccaatacccagggttagtgctttaatgttttttgtttagggctagcctcttaaagataatgagcatggctcattgatatttaagacatatatcacaacacagttcat

SEQ ID NO: 24582 - DNA, 2499 bp, Oryza sativa
acatgactgttcgtctcttataggcgtgtgaagtgtaccatttaccaaactactggaactataccagatctgtgatgttcatcagcagtagattgcgtacctgaagtcgaattgctatcttcaaaattagcatccttggttctcgaaacatttgattcagtgttgggggaacttcttctgaacaaacctcttaccttcatcctattaattgaaccaccacttcttttctcttctgacatctggagtatcttccatgtctcttcccagtagttgggtggattcaagggagattttcctctgagaggagatgaaggaagatttgcttcaagagcaaaaggttgcaataatttggctttatcaatcaagctctttaagtcagtgtctccaggaaaatttaacaatcttactaggcatgaagttgcatgttcacttcctagcaaggaagatctgagatggagcatcattgaaactgccattgacaaaatcagggcaccacgatgagaacataaaatcttaaactgatagtctgattgattctttatgtctgcacaatatgaatggttaggagatgagaagatctcatcccaaataaacagaagattgtcaagtgaaaattcacgaccgaatagaactctcagccatcgtagcgcaaagtactgaggctctactcccaactccatcaaatgactgtgaagaggggaatccacactagcaagcaagtgatatattgcagatgatgcctcccttacaggtgttaaacctgtgcttgattctggtgcaggactgagagaatagaagtcagtaatagcaaccacaccttgtgcaccattcatcgaaccatgcatcaaactctcaaacatacaataagcgtcatgctccatgaacttttcagacaaaataatacccagctccccttctgctccataagcatcattaatcaagaaaaggtccctcgtatcagaatcaagatcatccaaacttcttattttagctgcactaccctcaattgtgtttgtcctgtcactcctgttcagttttatcctatctggaaatgtttggccatcaaaatcatcactaaaaagctcatcatgaagctccctgacttgtttgaagtaatgcacatcagcatggaggacatagagaagaggagctaagagctcatgcattcctgcagaaagaaggaatgtgattgatgtcgacaaatttacaaggacagatggatctttagtgcaattagaacattagtacctagtttcaagtgttgattattgatgaagacttatattcgcctatatggaagaaattattattattacttctatagtccaaacaaacttatgttcaacgtgctatgcccatggacttcaacaatattacattaccaattgccaaacctagtaaccaattcacttggcctatttcaaagctgctgcctcggtttaggaacatcatattgcaagattgtgtctttagatggaatctgtgattgttaggtcacatgagaagtgtacacatcaatggcttaccttgtttgtaaccgagctctgggtacctaaggctccaaactaacagtatacgtccaagcatggactgacatatggttgtttggaagaaatttcccaattcagggtagagccgagacaaatcttggttcaacattttctctagttctgcatttctgaaatattggccccaagtgctttctgcattcacgagacataatgattagaaccaaataacacaatataatgaaactaaatagtgatcagtttgtgaagaaagatgccaccaaacatgcgactgacgccactttattatatcacctaggatagtgctgaatcaagaaaatgtcccactgatgagttctgctaattgtgagcaatcagttatcacttatcacctgaagttgtgatgatgtagcaacaaaacaaggtttctggcagctcaacggacttaaaacaatcacctatgcttagagtatctgaattaacatattaccacctcctcccctcatccaccctgaccttcctatgttattctagcaccaactgtataaacaaacagttaataacagaatgtttggcagtattgtttcagcaatcactgtgggactaacaaaacaccactgaccatcttatgtaacagactaaatcaacaagtatttatgcctggtgatgcaagtaatggcaactcaaagaagtaacatttactgaagggcaaaagcaaacccacctgggttctgtgatagtggattttccacagcaaggtcaggagcgttttcttcatccttagagagatggggatctattaacagccgccgccgcaaattagcatacctacaacaaatacaaattacaaaaccaggagtcaaaacctccgaacctaacaaacttgaattcttttgccccccatattaataagtagagtaattcataacagtatactaccatacaacattcaccgctcatcgaatgcccagagaaatgaaacatcaaattg

SEQ ID NO: 24583 - DNA, 6124 bp, Oryza sativa
gtggcatttgaagcactggcattttgagagagtggcaaatagtaaattcatagctaagcagctcattaccattaagcgtaatccacacactaacggggatagatgatctaagaaaccatacatcgcaaaacgaattaaagaatcgctgcatagctaagcattccaagcaaggaaagcatcgccggggtcaccaaagcattccaagaacggagctggaattccccgagggccctgacctgcggcgggagtcggcggcggctcggcggaactcctcggtggacacggaggcgcagtcggggaggacgccgagatcggcgcgccaccgggcgccgcggagcgcggagaaccgctccctcgctggacactccggcattgccgctgccttttggcttccagcctccctaacaaatcaggcaaaaggaagcatgagaaggcggccggagcaaatcatcagctgggttgggtgggtcgatccgcgagcacgaggagggccaagcgaggagaggattgggatcgaggaggacacggggggagcgttcttgggagggattgggattgggagggaagaagggaaagcgttgggagaagaaaggcggaaggcgtctcgtctctcggtgacttgtgtttgcaggtgtcgttgggttgggacgcgacgacctgtttcctcgggcaaatggctgtgtcagctgtgatgatgccttcaattcctctcaatctcaggtatgtgctatgttcaccgacatgtgtcactatagcggaatcggatcctctgacgtaatataccagcgatttccgtttcgtattggataacgagttagatagccgaacgagctcgtgtttgactcataccaataaaaccgagacatcacatttgatgaaagagcttattgtaaaagctataattgcctatagctcgttgttgctcgctgtctcaggggaacttacgcaatctaatatatgtgcaagtcttaacctattgatcaaaatccaccataaagaataaacaactgatttaataacgaaaatgtatatctaagtatttgcctctttctcgttagtaaatggtagagctttaatgtaggtggtggcgaaagtatggggaggagggcgccggcaagggacatgggtgcaagggatgggaaggagggcaccatggaggggaggggcttcctcggggatccgctccaaccacgcctacgccggagaagacggcaagcggtaacgaactgtcagcagtcatggcttctgcaagcttcacctgagacggtgagcgacaacgagctattggtggctatggcttctaaaataaactctttattcaaatgggtcgtcttaattttgctgggggccagacacgagcatggtcatccgtcttgcttgttatatcgaccgatgtggaacggatgtcgctggtgcatccgatgtccctctgacttagcgagcagctatataagaggatccagttcccactacggtcgattgatggttccactgagaatttgaagtgtagatgatttttccgtttgtcgataaaatgaaccaatttgtataaagtttataagttttcaaatggtggtggacactatgtaaaataaagtgtagttgaactataacgcttattatcgattgtttggtcctggttcctacatatattattagactcgcacgctcgttgcttctagaaatgaagttgattcctatctcactctcagtgtgttattgccaacattatcttctacttgctcgccacctgtgatgatatatttttagaacaagctatttgatgtatgagggtgaaggcctgtattagtttttgttgggtattttttattccaatattccaaattcgatgattcacgtgtaggtaacctttttttttaaaaaaatcaacactcaaataacccaatatgaaatttgctcataagaagatttcaactcgggatcttagggtgctgttcaggtcactgtaaccattaagatacataccctttcataaagttttactaccaggaagtttaaagaaagttggtagtttaaaaaaaaggagttaaaagttcatttacgtacgaaagtttttgatgtgatggaaagttaaaagttcgaagttggtggagagaaactaaacatggcctatattgatagagaactaccagcactggcaggatgagtggtatggacgtatgttgtactaccgtgtacgagggtatcctcctccgtacgtgtgtggtccggtccccgccagagggagagaggaaaggaaacgtgcgtgcaaaactgcaaaaagcccacgactccaccaaccccagcccaccccacgtcacgccgcacccgcaccgtatcctgcccaatctcgttcaccccttcacgacccgtgaccgtgacgcagccgcacggcacttcccactcccccgcgcaacgcatctcgacgacgtcgccgtgcaccggttcgcgtcccgtaacaatctttactatcaacggccccggtttcgcgtgcgcacgcacgcacgcacgcaaccgcaaaaaagcgcccgtcgtctcgcgccgcgccgcgcctcgcgggtgatgccgaccgccaagagccagagcccaccccgcgtcgcgcgcgcaaaccaaaccaaaccaaaccaaaccaaaccgcacatgacacacattcacacaaccgcacgcacgcgaggcctcctacctgccgttctttcccccctctctctttctctttctctctcgcggggcgctgcgtgtttgcgcttatcttcgccgccgcctcgccacggcctccttctcagctcgcccaatctctctctcgcccgccgcataaatatagcccttgcctctcctcccctctctcgcctcgcgagcgagcggacgaacggacgagcgagcggggagcgcggcgagccggaggcgggggggctgtgcgcctcggtgtctcttctcccctcctccccaccctcccctttctccgccctcctctcgattcccgcggttcaggtcagttctcttgcgctcttctttgtaggagatgagatgagattggtaaccaatctagttgctttgcgtggggccttacgcctcgtggttctttgtggtttctttccgtggatttctgtagattaatctctatgtcgccgtaggattgaggtatttcggggtgagggttcaaatctgtggggatatgttgggggagaaaggcgcgaggttcagtttctgcggtgcaaatcaaaatcgccagattaaagaatcttgcaccgacgattttgtgtataaaagtatgatttttcttttagggccttttgctgtgtgtgtatctggacctatcagaggattggttgcggaatattgtcacagaatcttacaaatttctcatctttttggatctatcccatgatgattcgtgggctggtgaccttcgacgaaatccgcctttgctccagtggccagcaaggttaaggtttctgggtggtgggagccctcgctaagagggaacacggggccggtgaggctgctgcagcagcgaaatgggaatgggagcattgtcccgagggcctcgctggtgtctctgtgaggcgaagagatggcggcgcatggagcgggggcagggaggtgggagcggcgggttcgctggtgaggttgttgtgaggggagatcagtagggttgtctcttgtctgatgtgcaacggttgatcttaattgaatggtccaaaattagcaagatttggagtgaaaaaaatcttacatatatggtataggcaatcaattcccaattcacctaggagtatgtgtttattagaatttgcttctgtagaagagtggtttttttatatattgggcaatgggcgcaactgcgctgcattaaagatttttgcatttctcatgacaactcctgattaagtaagataaaatttcttatattgtcatacggagtacatgtgactcttgggatgaactgttcctatcagagatattgtaacttttattggcatgtaaaaatacagtggaaaaatattttcttaagtcctattgattatttgatgttaatgctgcaattagactcaaaagtatttctttactcttgatttattctacattttgaggaattattgattgtgcagggactttgctgatcttaaatcttattcctgactgactgtcatgggcatggaacatctgctgaacaccgcgagtccttcatcaggttctagccatgctttaacttggtatgcattgtttcaatgtacaaggaaccactactgactgctcatactttggttacatcttacccaaaaggctttattgaggaaatgagggagctagagaagctgagaacagaaacaatgatgaaatcctgccaaagcactacaagcagggctggagcgataagatgtccagtaccacgcaagagtggcaggtatacttacaatccggttaactggttttaatatgattctaaatctaaatttctttgtccacaagacaattgtggtataaacaaacattgtcaaataccctcagggtgtgttcggatgcctctcttcccaacccctctccctcgttttccgcacgcacacttttcaaactactaaacagtgtgtttttttaaaaaaaagtttctatatgaaagttgcttaaaaaatcaaattaatctatttttgaaaaaaaaagcaaatactacctccatattttaatgtatgacgccattgactttttgtctaacatttgatcattcgtcttattcaagaaatttatgtaattatcatttattttattatgacttgattcgttatcaagtattctttaagcatgatataaatatttttatatttgcacaaaaattttgaataaaacgaatggtcaaacgctggtcgaaaagtcaacagcgtcatacattaaaaaacggagtacttaattaatcacgtgctaatagactgtcccgttttccgtgcgcactgcgcacattcccatcccctggtagcgaacacaccctcaatattctaatagatcacatgttatcaaattcatttcatcatagtgtctaattgtctattgctgcgttggattgcttgaatcatcttgctttggctgagtacattgccgtttgtgttctgcatgttcaatttgactctattgacacactcacttctcatctggaatttttcatattcagataagttcgggtattttgattttaactgcatagcatcggtgatttattttgctgttcaggtcatataaggagtatgatttaacacaggatctttctgatttcattatgagcaaggttagcttatctcttttctctttaccccatattttttggctgttgctcaaatgtgcttccaaattaagctagaaatgcaatctacaggcttctcctccatactttacgggatctccaccagttcgagcaagcaatccacttgtacatgatacacagttctgtgcatggaagctgcaaaacgttgatcagtcgcttagcattcctataccaacaaagggttgcaatgttcgttactgtgtgagggaaggatctattacaaaggcttgaagctacatttatgagcttcatgaccgctggcaaccagacctcagaggacatgcttggttaacattccggcttttgacattagttgtagttgtaactttgcttgcctcttcaaggccaatttgtacatatgagttatcaccctctagaagctgccgttttcaagttttgtgccgttgtcatcggcagtggtgtacatatcttttgtgttcagttttgtcgtctgtgaagttagttttggcaaataaagtctgtcaaacctatgttgctgagaaatgaggtaacctgaatgaaagagaatttgttttcctttagtttctgattaccatgttgacctgtgctggatttgttaatggatgattgaatgttttggccttctatttttgagtgctgcatttgttttgaaaagcccctatactggtgttgaggagagctacatcagtcttatatatgttctctgcaatgtttcaggttcaaccaattgatttatctccattttaaaagggttaaagggggggtcttattctaatcccaaattttgcccagtatttctaacttctgagctcgcaaattaaacatcaatca

SEQ ID NO: 24584 - DNA, 1374 bp, Oryza sativa
cctgtcgctaaaagctccttcatgttggcgtcaataagagggtacctgaaagtcaccatcaacagattcagcaggtttacatgatgaattatgagttaaactgagaaaattttagaacaatttggagtactccatacccagttcgaccatctctccaagattgcaaacagtgcctgatcctggctccacttggactctacgttccttggaccccctacagtagtttaaagaggattatacctttttccagccaaatctaactattctacatatatttagctgaaataactgtgtattttcaggataaacaataaaagtgaatttcagagtgatacttctttttcatgcattatctagggacatgagagagagagttatatctttacctaggtgaaaaatggagttcccatattttgctgatatgaaccggaagtaatctctccatatcaactcaaataaaaccctgaaaacattgtcatatcaagaaagtatttcagtttcaccattgacttctaaggaagttggaaacccttaattgcaataatctataaatatttcacactccttacaaactttatagcatatgtaataactctcatttctcaaatagtataataaacgagagctgaaaaaccagagtttagaagtgataaaactctggagaaggcataccagtatgtagaatcatttgctattctctgcttctcatatctctttacctgcaccatggccaaaaatacagcatgagacaaagctactgatctccagaggttaccatgaatttattacctcttcacaaatataacgaggcgaaagactgccagaagcaagccaaggggagaacttggtggagtagtctggacctagcatgccattcctggtctctttgtagactttcagctggtctttcttccagaagtactcatgaactcttcccagagctgcactctcccctcccacgaaatgcattcccttctctgactatagagagaagcaaacagtgacagttacaacttataggtgaagttctcaaagcttatctgccaaagtggcaaagtacagttgatcactgaaaattagctcaacacagttaactgaaatcactgaacctgcctttgtcatgcttaggcctagtgactccagtgttggtactgttccccaacctccaatttcatccaggccagaaccaggaggcggcccgagtgacggtggcaacttgctacaattccgaactgaggacttagattcaacagcctggtaaaaacattttattgacagtaactatcatgccaatctaaacaatggacaacctagatgaagaaactttatgagaatatacctttctgaactgtgtatatacgtcaggcacattgt

SEQ ID NO: 24585 - DNA, 1786 bp, Oryza sativa
tccccagatgagctgcaacttgggatttcgaggcttcttctggttagatgctcctccctgaggaatcacaacttgctccaagcctttgcgcacaaggtgttcaaccaggagttcctcgctgcaggtttccttatgagcatagacctggagatacaccacaaattactgacctggagatacaccacaaattactgccttaaacctcctcctgaattcagaattccaagtctccaaggcccaaaattcccacatcgaaatctactagaattcgtcgcgggcacgattaggcggatgaactcaccgtatgtgcagtgacagcctttgcaattgaagggaggatgtcttcaggtttcccatggcggatgagcaggtcgagaccttgtttcgtcaggttgcgcttcaaatcctccaagcactctatcaggaattgcgccctcaatgctgaaagaaacgaatcaaatcaacgcgtttccctcatgaacccaacgaacatgcagccaaaatcacaccaaaacataaaagtaatctgcacgaagcaaactgaatttcagtcagagattgacgcccaattctttcacctccagtcttggggaaaccgaagtagtgggtgctccccgcggagatccggggatcgacgcagtagacggggaggacggcatcggaggcggcccacgcgcgcaccaccgcctcgttgtcgagcacccggaggtcgttcctgaaccacacgatggcaaccccgccgccgccgctccgccgcatgctcggcgaggtgtacctcaagaacgcctcgtccgccgccgcgccggcctcgtcggcggagagggaaggcaccgccgccgccgccagcgcgccccgcgacgacgacgacgacgaggagctcatggcggagaccgggatggataggaggacgcgcagcctcgcggattgcctcgggaggaggaggaattggggattgagaggggaggaagaggagaggaagtggagcatttttgagatgggaggttggtttgcgagacgtggcgggagggagggaaaggtggagggaagagtggggaggggtgccacgtggagggatgtgagtggtgctacgtggctcgctcgtgggcctgaggaaacgggtttaaatggattttgtgggcccgtgaggggtggacccaattacccaaaggtcgatgtacagtattttggaatggataaaggatagtagagatatatttatttacgcaggaaattggaagaaatttcactaggatatttgatacatttgaaaaagacgataaaataaataaagttgagcaaataggatcaaattggtagttaaaatttcaaatagggtctaagggcaccagctgtctgctaacatgatatagtactcctttttaatgagaggatatggatatactacatctcaaaaaaggttcatttgttcaaaatttatcttacagagactatatttttagctagcatgatgaggtttatctcattaattccatacctgtcccaagccagtacccttctctcattgacttgttgaggctgtttggtagccagtctttgcggctgcagcaactgccgtgcatgtggcactgtttctaaggctgttatacctaacctattttaattagagatcctgacatttcttaatattactaatcttaataagaattgctagaagtgtactcattttcggacaaagggagtataaatatagagcttagatattcatttgagtgcgtattacagagcggagagcgcattcactgggtgtgtgtagcaagtttcccaa

SEQ ID NO: 24586 - DNA, 768 bp, Oryza sativa
cggccctcgcgaccatgtcttcagccatcttgacctgggatcgaagccaagaattggtaagtttggagagatgccggaagccgatcatcagaaacaattaactatttaccactcttacgagtgacaatttgcaattggactcacatgtcatagacacataaagtgataaagacccatatgttgtcatagactatgggtggtaaattcttaattacctcatcttaaaagtggcgaaaagttaaatgcgccgataattggtggctgaaggagagtttggtttctaattaccttgactcttaaggcctctacatccgatttgaggatcctgttgtccgtgaccgctgtattgaactgctggctggactctgtgagctgcttgaagagggatgagttttcgcctttgagttgctcgacctgatcatagatggattgctgtaagatcacactgatatttgcatcaacgcatctggaaatttgaactttgaagtttataatacctgtgattcgagttcagataactgtgcctgctttctcctcctggatcgtcgagcggactccctgttggacaccatcctgaaattcgaacaagcagttcataagaatgcgttctctgttcaaatttgttgcatttgctagaaatcaagattgatcgatcactatgtaccttcttattcgctttgtttctgtggatttcgtgccacgcaggcgtggactcctctctgcttctaacagcgaatcgcaatcggagtccgagtcgctttcaggcgc

SEQ ID NO: 24587 - DNA, 1646 bp, Oryza sativa
cgcagagatgacctcgactacttggaagagcgaaggcggcgcgcggccctccgagccgcgcgctaccagcagagcctgcggcgctaccatcagcgccacgtccgggcccgatcactctgcgtcgacgacctcgtcctacgccgcgtccaaacgcgtgctggattgagcaagctctcaccaatgtgggagggtccgtatcgagtgatcggcgtcccccggccgggctccgttcggctggccactgcgacggcacagagctgcctaacccgtggaacatcgaacaccttcgtcgcttctacccctaaagggggatcgggtgtcaggtttcgggctcgggccaaccccgcacccccctcgggcgtgcagggttggccgggggctaacacatatccatattcttatttctcttatatctgtatttcaataaaagcattttcgatttcctaaaggctgtatctgtgctgttgtttccttttgaaggatcttgacttgaaataggtcactcgtgttcaatcctgccctcgggggctcgggtcggctaaaatcgccaaacggggcccagaaccgagccgtgccccggggcgtagtgaactccgggggggaatcggcaaaaaacccacaatcgggtcacccataaccctcggtcaccacgctcccggcctggccagtctcgacatgtggatctccccaggcactagccccgacccgagccatttgaggactaggacctgggcacgagcccttgttcaagccaagacacaaaaggaccgcggcacagacatcctcgtctcatacacacaacaaatagaattgacacaaaaaatttcctctttatttgattgcagattaaattagtctatacaagaagggggcccgaaggcctcggaagaagaaaagaagaaactatttaaagattggcgggggcctgggggctcactccaatgcacccgggtcgccagcctcgtcgccactgtcgcccactccgccgtcatcgtcctcctcgtcggagttgagggctaacgcgagccgaggggccgaaccctcgaagctgtggacgatatggtcggcggcgtcccggacctgcgcgcgcgcaccgtcctcggtcccgggagggaactcgtccagcgccgtccatggggagaagtcgggatccctggcttggtaactcgccagtacgagctccaccgctcctcgggcgaggtccctcgaggatgacttaatcgtcctctcgagctcctcggggagccgttggagagtcccggctatctccgagaggcgctgggcgaggcccccctggttggcggcgtacttcgcagtccgcccgccccagaggcccgcctgccggccggcgcggtctagacgggagacggcgtcccgaagcatgccgggccctacctcgcctgccaagcggagggcctcgacctccccggcggacgagtctagcgcgccctgcagatcggcgatggtgtgttcggcagctgtgaggcgggcggttaagtcgctttcgcccgcggccgccccaccgctgcgcgccctcgcgtccagctccttctcccgcgcctcgagctcagtggcccgctggttcagcgtggccctctcggcgcgggcaccttccagattacggcgtgcctgctcctcccgcgctg

SEQ ID NO: 24588 - DNA, 6418 bp, Oryza sativa
tcggcctcctcgagagctcgctcccgctcggtgagcgcgtcctcgcggaggcggagcgcggactcctcttcggcacaggcggcctcgtgcgcagtcagcgttgcctcccggatggcaacggcggcctcgcgatccgccaggtccctctccacggcgcaggcacgctcttccagcgccatggcacgggcctcaagggcttcttcgcgccgccgggatgccacctcggtttccgccgcccgccgttctcgggcagcggcagcgtcaaggaccccccgggcggcgtcgagcttcttccctagctccgcctcccagctcccgtattgaaggcggagggtgtcctgcgcctcgttcatcacggtggtggcgatgagggcagccccccgctcctcctccacctccttggcgatctcccccagcaccttccgacgggcttcgagctctgagacgtgccggcggtgtgccttgcggcccacctccaccatggcctccaccgagcgtcgcccctcttcgacacgcgcccatgcggcgtcgagctccgcccgctctgcttgcagggcctccacctgggcacttaacccgtccaacaccgtggtgtttgcgacggccaaggcctgcagaaggggttctgcgctcagtggagcaacggaaggcatggggaagagctgcctcgaagaggatgccgcgtggcttggcccgccgatggacgtgccggactcgaggatgtcccccggacctggtttgtcctgagcgtcgcacgagggagtgggcccaagcgatgcgcccgcggcctcgtcgcgagttgcctcggaagtcgtcgtcgcctcggcctggcgaagtctggcctcctcccgagcggcttctttagcttggcgagctcggacggccacctgggcagcttcctcggcttctcgaaggcgatccgcggcctcttgccggtcagtttcacgggtcgcctcggaggatgtcgtcgcctcggcctggcggagtccggcctcctcccgagcggcttcctcggtctggcgagcccgggcggcctcccgagcggcctcctcggcttcccgaaggcgatccgcggcttctcgccggtcagattcccgcctccgggcctctgtggtcgccgggtcctcggcctcagactggccggacttggaatggcgggagggacgcgacgggatctcgctgaaacagaagaaagaccagaagacaaacaagatggatgagtgaaaactcgcgttgagagaatgaatacggccacgatgggagtgggacgaacctgcgagggggtcggttaaacgaccaccttggaggggaaatgaggtttccccgggatggttctgtcccccccccatcttgcggagccgtttcttcttccgctccccctcgggctgcgacgtcggcgtggccccctccgggcgcctgctgctggcacgcgccgccccgccccctcggggaggagatgggggaggggttccttcctgcttcctcttcccccgggcgtcggcagggcggccgctccccgggcccccgtcgcggggcccagaagcacgaccccctcccggggtagattgttcccccctgcggctcccgcccgcgccatcgtggcctcgaggagcccgctcctccgacgccccgaccgcctgcatgatggtcaggatggaggcgcggtctggatcgctgcagagggggaggactccttgaggaatgagggatgcctccacggagctgagattcagcacccgttggaccactatcttgaagtcctcaggagcccagtcccatctgaccccctggtgggtcctcatgtagtcttcggacccggtgtactcccaggcgccccgggcgcgccgctggagcggcgcaatccggcgacgaaggtagtcgccgaacaccatggcccctgtgagcccctgggatcgcaggcccgccaagcggtcgaggacggcgtcatagccatctcccagatctaccggcgcccgccagctggaggcctgcgctggaggctggctcggaagtcggaggcgcgcttcgtcagcgaggggggtgtagaaccagtcgctcttccagtcatcccacttcttgcggaggacgcagggaatgtagcggttcagcaccggcccccgcggctggaagtagcaaccaccaaccaccgacggcggcgacaccggctgtacggtgaagaaccaccggaacagccgaagggatgggcacaccccgatgaacatctcgcacaggtgcgcgaagatggccaatgtcattaccgcgttgggggtgaggtgcgccatctggagatcgtaaaactccagaacatccatgaagaaagaagaaaatggcggaaccagccctgcagcaaaagggaggaagaagacggaccgccccgggtagcgtggcgccgggcatccctcgcccagcgagactatctcccggccggtggcagattccggcatgaagcggcgcggcagcccggcctgtctctcgctcacgatgcgggaaggcggcagtacgctaccgtcaagcggagcggagccccgtgccatgacgccggaagaagagatgtttgagagcgagcgcgtgtggcgaaggtagggcacaggaaacaaggagttagggcgcaagcggcgaagacaaggggaataatggcgagaggaaggaagcaaatctcttcctcggcgactttatacccttgccaacgctgtgcccggctcctcgtttctcgcgcccacgcttccactaatcccattcgcccgtttgcggtgcatgaagtggatatgcggctgtggcagtcgagatggaacatctcgtgcgcgcgttaattacgctcgccgaccgaagcgccatcaccatatctccaggaaaaacgaaccggcttgtcccgatttttagaccggccccacctgtcaccaggccttaggaagtggcgtcacgcccgaccgcttccctcgaggagggcgatcgccctggcataacgccgggggctactgtcggtgacatgggaccgggagtatcatgacttagagacttgaggcagacacgatcacccacgtggcctaaccccctcggggggggggtcgggcccgagggtgatacggccgcccttctctttgtctccccgaggggtcggaccgctcccgtctcggccccgagggccgaggcgccccgaccccttgtgggttttgcgccgcgtatatggggtaggtgagcatagcggggctcacctaaccacatttattgcggtttggacgagcgcgtcacgccgcatgtaacgcagtgcagcgcactcgtttatccggtctgtgaccagtcacagaccgatcagatcgtgggttaggtggcgacaggcggtctgacgcacgcctcgccccatcccgtcaggatgagagcctccaagcactcgtccctagccagagccggcgtgttagctcctggagatggcacgttggtcccggtcagatatataccaggcttcatcctaaccattacaagcaagacattgtatgaagaggggcgaacatgcagattgatgaactgacacgtggtggacaagaatgaccgatttgtgaccggtctgacactggtcatgtcgtcagcagacagacatgttcccacgtcgcgcctgcttccggcggaagtggaggtaggtatgggccgttccatcagaaggccattcggacggcaaccatacaagtctctgtctgtttatgaaaagataggataagtccccacaaaaaagagagagatggtgcatgtggtatccccttgaggtataaaaggaggaccttgcccacttagaagggggattttggatttcggagggggatccagaacgatcagagagggagagagtaagagctctctggttctctagctcttttgtagcttcttcatacatagatccaccaaaacacaggagtagggtattacgcttctcagcggcccgaacctgtatacatcgcccgtgtcttgtgtgtttccattctcgcgaaccttccacacaccgagagcttagaatctcacccagggcccccggccgaaccggcaaaggggggcctgcacggtctcccggtgaggagccccacgctccgtcagacaccgttgacttttaatttaacgtttgacaattcatcttatttaaaaaaatatgtaattatcttttattttattgtgacttgattcgtcatcaaatgtcatttaagcatgacataaatattttcatatttgcacaaaatttttgaaataaaatgaatagttaaacgttaataaaaagttaacagcgtcgtacattaaaatatgggaaatatggggtagtactaattaagcagattagcagaacactactggtacaactccagcagtttagcacgagcaagtggtgatcgagacctgaacttgatcgcaacgatcagaagcgcgtccgcgcgtgcactacaccacaccagctttgccgcatgtgcgtccctctccatgtcgtagctactacggtgccttttcacttattcttatgcttatcagctaaaatttaaatatttagccttaaatttaaaggtaattttaagaattttttcgccgaagtttgttttttcaatcatcgctaagaacctatgtatcgtatataaaagttttattcataatatttttttaaaatacgccgtttcgctatatggctccgtcagatgctaagctgcggcatcgagccggccggtcaccgggttcgtcggcggcagccgatcacggtgtcggccgccgcgacgacacgaccgtacaaactttgtcccgggagtggcgcgcggcgcccgacccggccggcggtggcgccattatagtaatcctgtgacagccgagattacttggctggttggaggcttggagctaattaagctctgtgtgtttggagaggagggttgattaattagcgcgtgtgatttggtttggatttgacaggcgcctacggtgtggttcagacttgagagtgttcagaccagatgcacagtcgtgtgttactcccttattccataatattaatattaaggtatggtcaaacttgacacggtctttaaaactaatctttattttataattcttataatatattataaggtttatagtaacaaaattataaccatatgaaaataaatttaaatgttaatccaataatatgatttttaacataagtaaaattcaagtcatattatactaaatgttagttaaaatattttgaaggttgaatcttaaaatatgtgagcgccctatattatggctatattatgagatggaggaagtatcggttatatcactgacttcaataaaacttccactaccttataaaaggagcatatgtaaaccatttgaccgaaatccgatgattgaaattgctccgtagatgaaaaatgaatggtaaaattaccctattagtatatttaagcattatttcttaatattacacaccactacacatataacaccacatacattattggtatggtactcaggtggtattcgtttctagtgaagatacagatgaagttatgacattaaaaaataaaattcattaacgtacgattaattaagttttgattattataaatttggaaaatggatttatctgatattttaaaacaacttctatataaataaagtttcgaacaaaatgtatagtttatctgtttgaaaaacatagtaccaaaaatcgaggtaaaatctatatcatcgtcggaaagaacgaggcatcattaagcagttacacattattagtagactgaaaatattatggtgtgtacgtgcgcctctgtactctaatactccatagaggacactgtcggctctgatctcgcctatcatgcatagacacattaattgttgaaccttatcatcaaatattacgtgatgattaagattgcttgctgttttgccatcgattatatttcttgacacgaggaagaactggcactacctgtcgaactaacctcaagcagccagtgtgagcacaaatcagctgcgaaacgaattgcaaagccagcaaagagatacagtagtactttatcaactaatctagagctctgttctgcttggcaagtcaaacatggccaacagtatgtgtgattaaactaatcaccctgcaaggaagatgtgatccatttgattaagtcaatggacaagattactttgagtaccttgctcaaaaggttctcccagccgttggctatggccgatgtgcttcattgaccctgaaagagaagaagcacctccacctcgtgaacagcacaaaatgtcggggatttctagggtattaatacggctagtacaatgccatttcgtatttttaaatagttaggctggcactacaaatatacagtagtactacttaacatgatcagtgcatatattaattgcagtatcagccaatgtttatgagagactcacggct

SEQ ID NO: 24589 - DNA, 2448 bp, Oryza sativa
ccctgttacagaagtatcaatggcaggtgaaactctccaagtgttcatttgctcagcaacaacttacctatctagggcatattatcagtgctgctggggttgctactgagccaattaaaattcaggaagttgttaattgggttactccagccaatcaaaagaagttgaggggattcctgggcttagctggctactacaggaagtttgtccaaggatttggtatcatcagtaaaccattgacaaatcttctgaggaaaggggttccttacaaatggactcaggaaacagaattagccttccaacagctcaaacaagctctagtttcagcaccagtcctagcactacctggctttagcaaaccatttacagtagaaacaaatgcttcagattcagggattggtgcagttttgtcacaagacaaacatccaatagcttttgttagtaaggcacttggtcctagaacaaaaggtttgtcaacctatgaaaaggaatgtatggctatacttttagctgttgaccattggaggtcctacttacaattgggagagttcataattctcactgatcatcacagccttatgcacctatcagacaagaggctacataccccttggcagcataaagcttttactaagcttttgggactcaactatataatctgttatagaaaggggacaagcaatgctgcagcagatgcactgtcaaggaagttccaaggagatgcagaattgtctattatatccaactgcactccaagttggttactggatgtggttaaggggtatgaacaagattcccacgctaccgaattactgacagctttggctctgcaagctgactctaaaccaggttaccaactgcaatctggtgttatcaaatacaaggggaggatatggataggtaataatgctcagctacaatggaaactgttaactgaatttcatgccagcccacttggtggtcactctggtttcccagtcacatatagcagactcaagaaattatttgcctggccaggaatgaaatctcaagctaagaaatttgttcagcagtgtcaaatttgtattcaagctaagccagatagagctaaatacccaggacttctccaacccctgcttgttcctgatggatcatgggaagttatatccatggattttatagaaggtttgcccaggtctaagtcctttaactgcatcctggtaattgtggataagttctctaaatatggccatttcattcctcttgcacatccttacactgctctggaagttgcaaaactctttatgctgcatatttacaaactgcatgggcttcctttggtgattatctcggatagggacaagatttttactagtcaactctggaaccacctgtttacatcttctggtacacaattgcatttgagtacatcttatcacccatagtcagatggtcaaactgaaagggttaaccaatgtcttgaaatctatttgtgttgttttgtccatgcaaatccctccaaatgggccacttggttacatttagctgagtattggtacaacacctcttaccactcttccgtgaaggcatctccgtttgaagtcttatatggtcatgctcctcgtcactttggtatttctgtggaagcatgtgcaatcccagatctgcaggaatggctcaaggaaagaaagttgatgcaagccttagtgcagcaacatctgaatagagctaatcaacaaatgaaacacatggcagacaagaaaaggagtttcaggtcgtttgctgaaggtgattgggtatatctcaagctccaaccatatgtgcaatcttctgtagccactagagctaaccacaagctttccttcaagtattttgggcctttccaggttctgcagaagattggtatagtagcttacaaattacagcttcctgagactagtaatgttcacccagtgttccatgtgtcccagcttaaggcagcttgtggttttcaaggagacatccagtctactttgccttcagctctttctgaccttcaagtgccactccaaattcttgataccagggtgatcaataaaggtaattcagctgtatctcaggtgctaattcattggtctggtacttgatcagaagatgccccctagagatttggaggaactccgtgctcgttttcagcgactttccaaattccaaggggaggggattgtcaaggatcaggcggtacctgacgatgttccattgactaaagttggggagcaaaactctgacgaagctgaagatcgtcaagttggagctgtgcagtcaaagggaggcaatatgcgtcgtactacaaggcctgttaagcaaaacccccaagtactgtgggcctaactggaccatgtaatagaagtccatattgtaataggctagcgtgaacaaggggaaagaagagagagataggagatatatatatatatatatatatatata

SEQ ID NO: 24590 - DNA, 1002 bp, Oryza sativa
acactggaactcatcaccaatgtcgccatatctgaggtggagatcaaggagaagggtggcagcgactggagggggctcaaggagtcatcggctaacacctggaaaatcaaaagtgatgcaccgctcaagggccccttatccgtccgcttccttgtcaagaacggtggctatcgcatcgtcgacgatgtaatccccgaaacctttaaggccggctccgtctacaagagtggcatccaggtccagtaatggacatgcatgtccttgcattaggtcacatggaaattattagcctctaaataattatctattcaaaagagagaccgagtctgcatgtgaacacgtcaatagttaaatttctattgttattttgtgacaacagactattgacaaaatgaagcataccatgtgcccttcccacatattggtatggagctatatgtgcacacgattttgaatatattgtttatgtaggatttatgggaaaaggtatatttggccatcattcatcgagatggttgtgtacatttgattttccatagttctaatatatatggttgtgcactaaactacaccttggatgcgcaccccaccccctctcccctcccgcaccttttctgttcccacatcttcttcccgcaccttcctaccatatatcttccagcttttgttaataaataaattactctaaactagtctttgttaagtaaataaattacttataagcaattgatcttgccataaaatctgcatttgcgtccctttcaaccttcattcagtaaataaattactcctaactagtctttagtcagtacataaataacttaaaaacatattggtcttaccacaaaattttcattggcatcccaacctttcttatcacttggcaaactatctgcattggcatcccatcatttctcatcactcggcaaaatatcttctcattatgcatcgttagtaaatattttactatcagagattaatatcattagtaattcttttact

SEQ ID NO: 24591 - DNA, 1314 bp, Oryza sativa
catacattaaaatacggagggagtataaaattaaattaggatcaatattccctttaccaaacatattattaacacatttaatagaaagcaaattttaatttttcagataatattaaatatatttctattatccgaagcaacacacggataactgatattagataaaactttaattgttggccaattgtacgacgtgaagcatagattaatcttctcgaagttggattcatttccattttatccatggccacacattcggtgctggagatgggatgaacatgatttgtgggcactctgccttctgagtaagctaaaatatgtaccaatgcatcatgcttatagtatctgtaggtgtcatagttgaacaatttgtggtcacaaaacaatcactattgtaaatgcgacttttgtagcatttttgtcatactgtcatactaaagaagataaacgagcttcattgatatggaaatacatatacatatgtactcaaactttagaaaaataaaatgtaagaaactatctcgatgaagtttcaccaactatactttttcccacaaatattatatacgtaatatactcaaaatcgtctggatatatacctctgcagcaacatgcagacatggcatacggaatgctttattttgttgatggcatatttcacaaaataaccatagaaaattaattattggcttccccgaatgcagacttgatctctcttttgaaataaaaaagaattatagagaggttaagaattattttaaaataaaaacacacatgtctatcacttagatgttgatgccactcttatatttagagccggccgtaaagctttcggggatgacgtcgtcaacaacacggtagccaccattcttggcaaggaagcggatggagaagggtcctttgagcggcgcctcacttttgattgtccatgtgttagttgacgactccttgagcgtcacccagtccttgctgcccttctccttgatctccaccttagagatggcgacgttggtgacgagctccagactttttccgctagaggcctcaccgaccttgaaggtgacctcatatgatatgaagcttaacttagcacctctcaaagctggcttcgcttccattctatccattaccacttattcatgttggagatattattaatgcgacttacattttgttctagcatctgaataagctaaacgatgtgctgattctttatgcttgtagtttcatgtcacggagtgatcgattcaacaatttctttccacaaatttttttttttaaaaaaaaactgtaaacaacatttttgacaagcta

SEQ ID NO: 24592 - DNA, 5620 bp, Oryza sativa
tggggattctcttacataaaataatagggtatttacgagatggtggctaactattatagcagaagctatagaatgactcaactctagtgttttactatagacgtaaaccatctatctatctatacttgagaactaagtagaatgagactaacttatataactgaactcccggcttcgataagaattccaaaatgactctgaaaaagaggggttgaagcaagggtgagtacaacgtactcagcaagttattaaattcaatatgaatgtatgaaatagtggtatttgagtagggctatgattacttgcagaaaaagtagaaagcctgtaatgattttaatgcaacagtatttaataaagtttggaattaggtttctaaccaaataccatatgagtcccaatgctcaaatccgtgagcacggctattcgaatatattcatttatattttactgcagtaaatgtacgctttacccgcaatccatgacgtgccaaacacattagctttgtcatggcaaagcttttcagttactaacattagtggtacctgttccatgaactctagttcccatgcgctctgaacgtaacgttatcagcagcgagaggagttttggcgttcccgaggtctttagagagaactgattgtatgacaccatgtcatcacaatcagggttcacaaacaagttgacgtcaataaatctcatatttacctgcgcctcggtaaatatcacaattgcccttcgcggcataaatttgcctcctgcgcgaggacttaagaagaaccactatacagaggtaccaccttttctagataacttaatcagctaggtctatgcccatacgagaattgcggtcgtactcgtatgttcttcacatgtacttggcagtcttatgtcggttggaacagtactagccacccggaaatcaaccatttctaccacactattccaatctaagttcattatattttatgcaatctaactaggcatggctaagcaaaatctagcatataactggtttgctatatgttcaggttatgcattcaaaatcatgaatggttaatgcatagaatagagatatagaatatagggtaattatgctcaaggggaggaataataacttgccttgctccaacgcaaataaatccgagatagacaacctgattatccgatcctcgaaataccacaggttgtcatccaaaatacaatagactctacttgaagaagaggaagaactaaattcaataaaagccataaaatagcaagaaagcgataaacggttaagagggatagggtttagggtatagcctatctcttttataggttattaggattattgggctagtatttcatgtgtaagttctaaaggcttggaggctagaggggattaagcaatcagggtcacttgtattttatgtgtggcttgattgctgaaaggatgggatgtatattgggtaattgaactggttcaactggtatatggctagtattagctggtggtaggtttaggtagtataatacctagggtttggttatatttaagccgactacggaatagggaagcatattggctaggctctgtataggttctaggagagtaggtggctgcgtatagtggataggcgatattggtaggtggggtatttggatgacggttgggttttaactagcaaggtgttagctagggtttagttgtttaagccgatattgaggtaggataaatatcggctagggttttgggtgtttgctagttgtcgctagagttggacagtatagcgactagatttggtatcatttctagcaggtgtcgatagacatcatatcggctagaagaatagtaggtgggtgcaggtttagtggggtggaagtgttactccgataaccgtgagtggcgacggagcggctaggattacacagagcccgagagctaactgtgcggcgtgctgtggaggtcgatggaatagtgaagctccgaccgctatacgcatcgaggcgtggggtgccaggagcagcacttcgaccttgggtttggtttatgccgggctttacaaccaacggttcgacgtcggggatagaaaaccgtgaacgtccccatggaaggcgcaaagttccaaccggcggctttttagtggctaaaagggtaattgggataaaataaaatatttgaaaagcaaatataggtttaaatcaaatatttattcaaatagtatttgaataaattaagaaaattcaaataaaatattagaatagtaaatttggtaccaaaaggtagattttgaatttagatgaatttaggtctaagtttcatcggaattggatctatggtttaggagatatgggtttctaaagattaggttttgaattaaatctagaaaagatgaaagtgcactgttcatgggcccacctgtcagcctttctttttctttttcctttccttcttcttcctcccgtcgtcttcctcctctcttccagccgagcaaacgagaggagggggaggaggggcaccagggctctggtggttgggaggcggcgacatcggtggcggaatgtgttcccgaacgacgcgcatctggggagggtggtgtccggcagggggaatgagagaggagaccggaacggcgatggccaaaagcttgccccggccggtttgggaagtaacggtggtggctaatcttggaaggggaaaggaaggggaaggttagggaatgggtttgccccatcgaggcgaagccgatggcgcgagggcttggtcggaaatagtccgacgagggagatcggccggtggccggcattggggacgagagagaaggatggagctcgaggctcggatctgggggaaaagaaggggcttcgccggctatttataggcggcgaaaggaggtggtcaatggcggttcagagaggagaaaaacaagggaagcacggcgctggtggagtggaggagaagaaaacggcgccggctcttctctgtgattggtcggcgtcggcggcgcgtccacgcggcggctctgctgcgtttgggcggcggaggaggtagaggacggcacggcgtcggcttggcgtggtcagcaaggcgacgacggcggctccgggagcagctgggcggcggcggcgcccacagtgaggaaaggaataagggagggaaattagactttcagacttgggcttaggtgaaggaacttcggcccaaattgagtagaattgattttgtgtatagatggaattatatttggagggagtttatatgtggagataaatttcgaaataaagatcttctatttatttgagtgcaatatttttagaagtggggtatggtggaattgatgcactcaaatgggagagaaattaacaatataattcctcaaaatatttttgggaatgaggcaagcaaacaaagaggaaaataaataggattttagccccaaaatatatggcatggattttagagaagtatttgaggctaataggaatttggatgtgtggaagagaaggataaaatatattttcttagcacaagagcaattattcataatatttgtaataataccattcttgtgccgagaagggatcaagccgtaggaactaaattggcggttagatcaaaaggaggaatttggatatttgagatttggaaagggaactaaggataggtttggaatcaaaggatgggtcgacaattaattccaattaaaattggaattacaaagagttggtttggagggttttcttggaccataatttatacaaatgaaaagggtttttaaactaaatttgaataagaggaaattttgtcgaaagaaggttttaatttaaaaccaaatcaagaaatacctcaatttaaccaaatatatttttaaatgaaaaacacaaaagaagttaaatatcaaagaggggttttatgcaagttagttctagaaggtccctctaatcataatttcctagatttagaaggttattaagaacataagaaccggcatgatacataattagaaaatatctaattttcagcatgttacagtaatatactcaaaatcgtctggatatatacctctgcagcaacatgcggacatggcatatggaatgctttattttgttgatggcatatttcacaaaataaccatagaaacttaatttttggcttccccgaatgcagacttgatctctcttttgaaaaaaaaaggattatagagaggttaagaattatttcaaaaaaaaaagcacacatgtctatcacttagatgttgatgccactcttatattcagagccagccgtaaagctttcggggatgacgtcatcgacgacacggtagccgccgttcttgacaaggaagcggacggagaaggggcccttgagtgccgcctcactcttgagcgaccaggtgttagtcgacgactccttgagcgccacccagtccttgccgcccttctccttgatctccacctcagagatggcgacgttggtgacgagctctagactttttccgctagagccctcaccgaccttgaaggcgacctcagtggcgcatgagccaacgaccaacaatgccgccactgccacggcgagccggaaggagtacaacgaggccattggcgagctagctagtttgttggtgttgtctttcttgtttcttgaagggtagagggatggatcgaggtgtttggtgatccatattgcagctgggtgtgtatttatggtggcagggggcaaagaaaaccaggcatggatgcacggtgcggcatagagatcgttggccggctttttcgtcgagcaactctaatacaattcctataaataggtgcaaacttggtagttccgattgtttcactggtgcaggacatgcagacctctcaaaaggtagctatgcattcccatgttttctctacttattttttaaattgcgaataataaaaatttgtgatgttccgtttatggaggatatggaccaagacacgaaaatattaggggtgaagatgctaacagaaaacagaggggtggtagagctaacggtcaggagtgatggccaggcacatagaggggcaccgtgtagcatccatagtatatgtcacagaggggccatcaacagctagatgttgatggaatcatggcggtgacagatgggtcatgtgctggcccgttgcggctctgctcgataggggacataggttagcatttatggtgagatggggttggtgctaagtaaattggtagagcacagctaggcagctagctggatatcgagcggtggcggcagttgatgcaatacatttgataggaatacaagatgacaactcgacgaggcgtatgtggggaggagcacgtggccttatgaaaataatccaacaattctaggtctcggtgtagattgtacaataaaaaagagtacactataaattcaattgatatttttttatggaaaaagtacgaatgactcccccccccgaactattgaggtcgaccgaattacaccctcgatctcgaaaccagacatttacaccctcaactattgaaacggacaaataacccccctgactcaatccggggtggttttgggtccacgtgcagtccagtcagcatttttttaaaaaaaaaaatcagtgggccaaacctgtcagttctccatccctt

SEQ ID NO: 24593 - DNA, 2236 bp, Oryza sativa
gcaggtttcacttgcactctatccattaccactcattaatatctatccattaccactcattaatacctgagatgggattaatgtgacttacaatttgttctcgcatctgagtaagctaaatgatgcatcgatgctttatgcttataattttagatcacaatatggtcgattcaacaattttttttcatgaaaaagaaaaaccaagtgtaaatttgacttttacaacatttttaacaagctaaaaatgagaaacggactacatcgaattggacatactataaaactttggaaaatcaaacaccaacaatcatctcaatgaaaactgaccaaatactccctccttcccaaattgatcatcatatatgcttatgcaccaagaccaaggataatttaaatcacatcaatcaagacatcaagcacacattctcccacaatgcatgcatcgattaaaacaccatgccaattacaccttagcatgcacatattctgccatgctgcagtaattgtattctgatgaaatctgtgtacatgcaggtatatgatgattaatttgagaaattttgaattccattatatgatgatcaatttgggagggagggagtataatttttcaatgcatcctctataaacaatatatatattcaaaatcatgcttatatatagccccacaacaatattttggaagaacacatttatgccttattttgccactggcctattaccacaaaataatcatgggaaattaattgcttgctcactcacacacggcatgatatcttctaaaacataattatttagaggttaataattcccatgcgacccaacacaagagcacgtatgtctattaattagaggttgatgccattcttgtattcagtgccagctgtaaagctttcagggatgacgttgtcgatgacatggtagctgccgttcttgacaaggaagcggacggagaaggagcccttgagcagcgcctcacttttcagcgtccaggtgttagtcgacgactccttgagccccacccagtacttgccacccttctccttgacctccacctcagagatggtgacattggtgacgagctctagactagtgtcgctagagccctcaccgaccttgaaggcaagctcagtggcgcatgagccggaaggaggacaacgaggccattagcaagatagattgtttgttggtgttgtctttcttgtttcttgaagggtagagggaaggatcgatatgtttggtgatccatgttgcagctgggtgcgtatttatggtggcagggggcaaagaaaactaggcagggacgcatggtgcagcatagagatcgttggctggctctttcgttgagcaactctaatgcaattcctataaatagatgcaaacctggtagtcccggttgtttcgctggtgcaggacaagcggacctctcaaaaagtagctacgcattcccatatcttctctacttattttttaagttatacaataaaaatgaattacctcatcatgccgtttatggaggatgtggagcaacgcatgaacaaataaggggcgaagatgctagtggaaaacaaaggggtggtagagctaacggttaggattgatggccaggcacagaggggcaacggtgtggcatgcatagtagatgtggcataggggccatcagcagctcgatgttgatggtaccttggcagcgatggaggggctcaagtgctagcccattgtggctctgtgagaagggacataggttagcgtctatggcgagatggggatggtgctaattaatatggtagagcacacctagttggatatcgagtggtggtggcagtcattgcaatacatttgacatgaatacaagatgacaactcgacaaggcataggtggggaggagcgcatggccctggggaaaataatcttgcaattccagatgttagtgtagattgtacttcaaacaagagtacactttaaattcaattgatttttaattggcgggtgcacacattgttacatccatgcagcatgagagctacatgtgagaggaggtacatgggcaagcaccggggaaggatggtggatggattttgacggggtggtgggcattagagggcatgcctccaatcgtgcaaggggaagggacatcatgtgtgcgggaaccacttaagagggcgtggaatgaggctaggcatacgatggatcaggccccataaatcaccactacatttttttggccttaaagatt

SEQ ID NO: 24594 - DNA, 1316 bp, Oryza sativa
tgttgatgaaaatttccatgtaacaagtgatgacaaagtaagtacaacaattctttgtcagtaatagcaactgaacaacatcacattaattacgcatgttaaatgctgttcatttacttcatcttggattatcatgttacatatataagtgcccttggttgccaattttaccatggactcattgatttcattgctcatataatgcatgaaatgtgaaactggaacagctagaaagactgacttgcttttttttcgccttccttttgtagaaacttatgacacagaagccatgcttatggaatggatcgaagagaccatgctatctttttgctaggaagttctaccctgaaactcttgacaacctactgaagctattcaccagctatacatctgtttgagctccatcaaattctttgtccttggcatatggtctcaaaatcccatgggcttttttttgctgtttctgtaaattgcaaaatcaatacctagactcttacacatggatctggacctagagactacaagactacacacgcagatcgtcatcgcagcaactgtgacggcttggagttcttagtcactgggaagggctgtggcgaaatttgtagcaatgacactgccctcactgtaatttattgtgctctctgtaatttttccattgatggttcttagtccattgactccattcctgttgaagaacagataattttccattttgtcataccattattatatgatccattttttatatagtcagataacaagagaagtacctcatcctatttttgccatgatgtgcatcttttgttgattttgtttgccctctttccgaaattaacaatatgttaatatgctcaaatgaaaccattttttcaagattacatggacggcgcacaccactacacaacagggtttaccttaccgccggtaaccgcgcggttaccgggcttaccgcgggggtacgtaccggcggttaccgggcttaccgcaaggagtacggtaatataaatactgcggtaacctccttaaattcaaataaatttaaaaaataatttaaaattttaataaattttgtacggttttgtacggtggtttgggaaacttgctacacacaccccgtgaatgcgctctccgctctgtaatacgcactcaaatgaattatctaagctctatatttatactccctttgtccgaaaatgagtacacttctagcaattcttattaagattagtaatattaagaaatgtcaggatctctaattaaaataggttaggtataacagccttagaaacagtgccacatgcacggcagttgct

SEQ ID NO: 24595 - DNA, 4933 bp, Oryza sativa
tgaattgcaatttgcaaaagcaactagccagccaagcccatcatgatccactgtccaaagttctcgtgacccaaagaggattcaggaactttcacagggagttgctgagcactgcatgcactaggctttacgcctttttcgcttttgatttcttatctgattgattacttagacccggagagtgaaaaattccggatcaaatgggcccaaagaagaaaaggaaagcgtagatgctaaatggcatttgcagtttggaaccaggggcgttttccatcgtcggtgacgtcttttgctttgctccgtagacgcacgcaatcatcatggcttcgtctgcaagtgatccaatcacttgaataaagtcgaggcgatttctgagccaccaacttggtgattaaattttggattatccaaaatgctcatgtaaaagatagcattgaaacgagtccaaagtccacaagattatgattatatatcgacgaaaggagaatctctaatgccacgtagaggagcagaaaaaatccgaccgtgcagactcgttttctctgagaggtcaggtggcattttttaaataatctgatgaggcgttaaggtttggtaaacttcgttttaattagagtttaaagaaaggccagttggtgattttttaagactaaacatcagtacatattcgtgagctatacgttagtgtctactacccctctgagtcacacacggttgagctgaaattgaatagactgttcttgatgaaaaataacaattttgctctagacaaattttttgtgtggacgacatgacaaagcaattaaaaaattttcatttgcaagatgatgattgcaataaattaattaatgtatgaacctcctatatttccatagtttgacagtcggcacagtgggcaacatcaggagttggtgcttcagattcctttttttaaaaataattacaaaaataattgcgtgctgcgaagttagtttttcctatctatagcactaatcaaattatgaaacctgtcacttgcgatatcattcgacgaatgtctgcttcatattggcatgcatgtgacaaaactactgcgtgctgtggttgtttaattaggcctgcatcttactcgtacttaagtactcaatcccaatattaattacctggttggttgatttgattagtcaaccctaggaggaggataaggattgattgcctctggagatctgggtctgctggtttgtcatggtctatagcacttgcaattaaatactacttcgacacagcactctgcaataaaatttcgtaaagatatgccacttgtgaattgcgtttctccatctcaaagtacaccacccattgcattaggtaagagaaaatgatattaattgcagtacaaatcaattacatgtgcatgctgtttaagtcaagatgtaccggatgatccactcggtcaaaacaacaattaccagcggattttacctatcaaaagacatatcactatcgatgccctactagtatatatgtcatcactatcgactaatagtgcaaacgaggtcgagcgtgtctacactacctttagatgtcaacatttcgtactatcgaggaaacgtccgcacttattaaaaaataaattaaaaattattacgccattaccgtgtcgaaattttactggtgccttgactcgctcacactgtcacacatattgggatcgatgacccctgaattttttgttttggagctagacgacttggaattgcaagctttgcaagtcataaaaaaaacacgaagatggaaagaaccacccatgttagtgttagtgtgacactacgagagaagagaagaagaaagacccaaaacccccggcaaaaacagccaatgccaacacaggccgcacccacatcacagagagggaaagatcctcctcagcacgtgcttcctccggtccacgcagcactgtgcacgaagtggaccagccgcgccacggcgacgacgcgagcccgcgccacgtcaaccggggccccacctgccaacgtgagatgagacgactcggacgagacgacgccgcggccgccataaatccccaatcattggaagcagttattactcgggtagatatcatgtaaaacgagctaattattagaaactttaaaagttttgttgtacactcgtaaaaacagatatgaaatacattttcattaaatttgaaatccaaactcaattttatttgagagaaaaaattgataaattttagacgtgtttactattcatatcaaatttatctttttgtttcactctgatacaaagtgaagtttgaacttgatattttgtgatgagaatatatttcacatatacatctatctataataatttttttcataaatttagaaaacttttaaatataatttccacacttttttaatacttaactcgttatcgctgtatatgtagtaactcgttattcatccatccatccagcggatagcatttttcgcatttctcttttcttcctttattttttcctccttgtcgctgccgttgccgtcgcgaggcgcgggggggcgcccaccttttctacggcgtcgttgcgtgcccggggttctcttcttagctgcgtctgcgttgccagccagcctcatctccttcctcgcttccgtccacttctccaccaccacctcttcgctcgctgactcgctctcgcgctcgcacacatcgctctcgctcgctctgctgctgccgcgccccgccgctcgcgctccgagcggggagcattgcgtggcgtggcttggatccggcggtctcgatctgatcgaggcggaggcgcgcgctgcgcggcggatggtgtgatcgggggaggcggcgatcgatgcggggaggtacggtgcggcgtggaggtggggttgggttgcgggcgctggtggtcgtcgccgtcgccgccgctgcattggtggtggcgcgcgcggacaccgccgccgctgacggtaagttggttcgtgctttgacttggtttttttttttttggttttgttcggttggtgtcgatacggggagacgactcggattcctcgctgctcgtgctgttcgtgtggtgcgtgctcgcgtgcgtgcgtggggtccgtgggtttcggtttcgtcgagatgagcagggggagcagggggattggttcgttctcgttgtgctccgccgctgcagctgcttgcaagtttgcaactgcttcgagatgagtccatggttcgtgttgttttcgctgttattttttttagccgctgcaattaactgtgcgtggtgagattgtgtcggtggcggcgcgggcgtcgtgggaatggatcatcggttctgtgaattggcccggttcgactccatcattgggattgattagtttttgtcttgagttcagcacaaatgccatttggcaaggcggttgtggcatgttctaattcggattaattgatgttctcttgcttgataaagcaatctggctgtccctttcgtctgggataacgaaaggaacttttgaggcctgtgatgatgtggtgtcgtgtgcttcatgtcttatcatcctcaatagaaatgggagaaagactgaaagagatggattgttcgcatttggattggtggaaacaggataacatgcaggagaaaacatttgtattggctatgcaagtaatagcagaatggacacctttaattgccatactgatgaacaactgaacataatgaagggggtaggatatgatcataggaagggaataatgtaagtgataggtgtatgttgttctcattgagtcattgtgatgtgcacattactcaatttagttaggtttatgctctaaaatcagggactgagcaatttcttttcgtgatgtgcacatgttattcctgcaattgttcttcatgtgtcctgcaatttaggtgattttgtggtcctcgtagaaaggtgcacactgtttttctttgtaataatgacttctttatgtttcccttaacttgtgtagtctctgctataaatggattgtacatttcactggggtcgccaaaacttcctggatggtcggggaatggcggagacccctgcagcgagctttggcagggtgttgtatgcaccggctcaagtataacctcagtgtaggttcttcattgcgttttcttttatctcatggaaatcctttgttttgttctcatattaactcaccgtttgtagtacgatgaatgctgcaaacttggggggtcagcttggtggcttagggaacttcacctccatcgtcaccatgtaagggtgttgaagttgtaaagtttttccacaaccatcgtagtgtctgtcaaaactagaagattctaggatttcttttttgtctggttgaattaactctttttttatgtcctggttaaatttctcattgaattatttatatgtttgatgtagaaatcttagtaacaataaaattggtggaactataccagaagacctaccggttacgttgcagcatatgtatgtacgattgatcttatctatagtttatcagtctttggtattattcaattgatcctgtgatctttgcactggtacagttttctttcagctaatcagctcactggaagcatcccaagttcattggcaaaacttaaaaatttggcagacatgtacattctcgcttctttccgcagaaagtttatatacaggctaatttgtgttgtaaatcacatatatcattttccttgttttcccaggtcactcaatgacaaccaactaaatgggcaactgccagatgcttttggttcactcactggacttgtaaatttgtaagataccatttctgtacgtttttatgccttggtgtttggttgttgtcttagtttgctgatggtcggtttcttgcagggatatttcttctaacaacttgactggtgtgttaccaccatctatgaaaaatctgtcatctttgactacattgt

SEQ ID NO: 24596 - DNA, 8207 bp, Oryza sativa
gcgctgtggtgggaggtgtcggcccaccgcgtctccggcgtctccggcgccggccatgccgacgcgctgcggcggctggaggcgtgcgcgcacgtgccggcgaggctgctcacggcggtggcgtcgtcgatggcccgcgcgcgcgcaaggcggcgcgccgccgcggacaacgaggagggctgggacgagtgctcgtgttctgaagcgcccaacgccttgggtggcccacatgtcagtgacacagctcgtcagaaatgatacttatgcagaggctttgtttgatctctttttcttttcccattacaaagagtgttaagtagaactaaatctcgtgactagcctctcaagaatattggtgtagtagattttctttcctttttgtttgaaaaaaaagaggtggctaccaatgctgtaacttcacatatgtgattagatgatagtgctatagggaaccatacattggtctaattaattattggtgatttgattagacttgtgaacaaatttgtggctcacatcattcacatgctgtttggtcgtgtgggggaaaatatctggagttgtggatcatagcacatgcacacagaataacagaaagtcataaactgtttgcaaagtttaatgttgtggagtcagagatcagcatgcagccttagtggcttatgtcatcatgcagaagttagcaatggatgactttaatttgagattaattcagaagcttacagtttgcactaccttgtgtaatttgagatttgacatttttatatttgcctcctgtattggatatcagagcatgatggattgatatagggtttatgacttggaagttaaaagaggagtttgcccacacttccagctcctagaaatctttttcacataaaggaatacacaatacacgaatatgtactgattaagcaatgactaaacatgaattggatctccagcagtatttacttattagtagttgaaatgtactgtactaggagtatgtgttttctgggtgaatgtgctgatcttgaagacttgatgaagacttgatcaagttcagactatcactttcagagtttccgtaccaccgaagcaccggctttctcgttcattgcgtcagtaagatggaagaagaggctgctcatcgtcctcgctgagtacaaatatgcaacctcaaaccaatttccaaccctaaactaaactagaacatatcttgaattctcgatcattcacacgtatacatctgattcaagtatcctccaagataagtggattgtcctactgcttaatgcttctcagagaaacaggtttgctgcagagatattattagttgttacctgcacaagtgtataaatcattcttgagtcttgacaagcactataatactcccttcgttttatattatcgatcgatttgcctttttaaagataaacttctcaaaagtttaatcaagtttataaaaaaagaaaaatacaagaaataccattgacaaacatcaaattcaataaataccatcaatgagtgcaactttcataaaaccatcatacaaacaattttatcccagaaataccatcgtcgataggattatgtccattccacgtcgttaaaatgcacacggttcatcctatagcactttaacgaaggactgctaacgaaaacctaacagtggtgacatttctaagacaaagtcgcttgtacaatggtatttcatggaactcgtactcatcgattgcatttcttagaattgtgtgcttgtcaatgacatgtttaagattctcttatagaaaaatataccaacattaatagcgcaaaattagttttcttaaatctagcattaaatgtatttttgatagtatatttattttatgttaaaaatattactatattttgtatgaacttaatcaaactaaagaagtttaacatagaaaaatcaacgctacttataatatagtagtataaattaccacgtaatttcgttctggcccaactttataggtcgcacgtacgccataatcgtgtttccggcccaaatagtatgggttgtgcagacaccgcaatccagttttggcccactccaatatacacggccaccgcatgggacggacagcttcgttgtcaatgatcgcagaaatcctaattcgcgcgtacgcgctacttctccaagtcgcgagcgtgccacatggccggtcctcctacgaccgagcctgcgcgcttcttttttctttttttccctttttttcaagtaggcgcaactactgtgtttctttcttcttctttttttttttgccgttaactaccacacgcgtctaagagtaggagtcaatatttgaaaacgttcaggtcaagatttaaaaacttttaactcagattcgaaaactttcaagtcaagatttaaaaactttcaactcagatttgaaaactttcaactcggacttgaaaactttcaactaaagatttgatactctcaattcaaatttaaaaatttcaagtcaagatttgaaaacttaactcaagtttgaaaacttttagctcaaatttaaaatctttcacctcaaaattcaaaatatttgataaaatttgaaaacattcatcttaaaattcaaaacattcaacttaaattttagaaacatttcaactcaaattcaaagctctgatattgaaggtgaaagattgaatttataaaatattaaaaaaaatcatgcgcgcgtgtggaaaagaaagaagcgattaaaaaatctggaaaaaaaagcgatctaaaaaaggaaaaaaaattacgttaaaataggagatctaaaaaaaaaagaaacgcgtaggacgcggctggcgcccgcgccggcagcatcccccaatgatcggctgggccgggaataacaataggcttgatgtacctggaatttagcaaatgactacctgcttcgtcaggactatttggaaatgagccctttcctggattatttgcaaaaagaccctactctgggttgttacgggcttattcactttgtggccaaaatcatcccaaccaaaatttctttatgaatcttgttggttttggatgaatttagtttgatttctttacaaaattcgatagtgtttttatgcgagaaaattttcaaaactaccaaattttgataagatgataccaaatttaatcaaattaaaagcagtagtaataaattgaactctggttcgatagtgttcgatttattactggaactgggaagctctccgcgtccggttcactcgccggacgccggcggcgcatcatctcggcacaagcaacggcgatcgccgccgccgccggaggaggacatgatcagtgcgcgcgcgcgcgcgtgctcgcttgtgctgaatcgaatgcttcgatcatctgagtaggcacccatggcgcggtgcgccgatggatccctctcatttttagcaaccgccgaagtagccgggcagcttccaccaccaccaccaccaccaccaacgcgcgagcctcgcctcccctcgtctcgctcttcctcttcgtctcccagctaaaattggcacaccgttcgatccaccccccccccccccccccttgcgcgaggctgcgggcgcggcggcggcggcgggcgacggcgagggcagcatatggggcccggaacctggcgcaaggcctacggcgcgctcaaggactccaccaaggtcggcctcgccaacttcaacagcgagtacaaggtcagccccctttccctccccaaatcctatcccctccatcgatccgccacaacactgctgcgtaatgtgcatttcagatttgtttggttggttgttaccctgatcgatctgatacctacattgttttcttgatggaattttggcaggatttggatatcgccattgtgaaggcaaccaaccacgtagagtgcccgcccaaggagcgatacctcaggagtgagtggtttctgtcttgggggtgggatgcaagcaaattccccatatggccatatccaattctggttcaccaaatgttgctaggttttattttatttatttatttatttatttattgctggatgcagagatactctttgcgacctcggcgaatcgaccgcgatccgatgttggttactcaatatgtacattggctaggagattatccaagaccaagaactggattgtgggtttatgctgatggtccctgattttttaagcatattccatttggttctgttcattcttttgttttccaatgaatagctactgagaattgctcctgtttggaattttcaaaataagggtgagaaaaaaaaattcagatgttaacagctatttatcttgtttttgtaggtcgcattaaaaacattgatagtgatacatagattgctcagagaaggtgatgggacatttaaagaagacttcttgaactattcttatagaggaactattttgcagattccacaattcaaggatgattcgagccctttaggtttgtgatttttttttctctgaactataagagatctctctatcctagtttcacatctgaactgatgctctccaccctacttaagtcagcttgggatgctctgttgggtgcgcacatatgcgtcctatctagatgaacgggtcgagtgctttagaattctaaaatatgatgttgaagcggatcgcctggtgaaattaccccaagcttctggcaaggtgacatcagatttctaagttggatacagatagtcgaacagcgttaacagaattctgactggctgatttcatggttgtaatgttgaaatcttgataaattaattccaggcacacagcagaacaagaactctaccatgtggagatcttttagatcacttgcctgcattgcagagactactactcaggctcatttcttgtcaggtttaattttatcaagctcacatgcacttaccctgttctccaatattattatctcgtcaagtccatcatttttgttgttgcagcctgaaggtgcagcctgcacaaattatcttgtacaatatgcattggcccttgtaagtttcaaactttgccataaagatatccccttttcattacaattttaattcacagcaagtgcgtgattcctactactattgtggaggttttttttattggccttaggttttgaaggagagcttcaaaatatactgttcgatcaatgatggcatcatcaatcttgttgatatggtacactgacagttcttcttgatatcctcccaagtgttttgcatatgtggagcaacaatttgtgaacataagcttggtttctgatctcatgtagtatttcgatatgcaaaaatatgatgctatcaaggcacttgaaatttataaacgagctggctatcaggtacataaagctctcatttgtgatattctgtagcgaggagtagcatatagctacgtcaacttactattttttttaactctatggtatgatttttcctgttcaacaggcagaaaagctttctgctttttatgagcactgcaaacgtcttgaattggcaaggactttccagtttcctactttgaggcaggtacattcattcagtgattcatccctgttttaaattgaagaatccttcccaatcttgacttcagtaggttcattacttctacataaaacgaaatagttttatcggacgcggaaagaagcacgaatatcctgatataccaaacattcctaattagtacccgttgtcaaaatcacatttacgtgataatggcctacggttttctttacttttttcttggctatttgcctattcctatgtataaatattacacttcagttatttcctatctgctaaatctccagttacaatgatttcatggtgttttgatggattacccatatgcagcctcccccttcattccttataacaatggaagagtacatcagagaagcaccccgtgtcagcatagcaagtaaaagtttggtgagtgcgttaacggttggtacaactacaaagagaaggtcatagcagaaagaagattccacagcagttctgttgatttgtttctgctgctgaaacaggaaagcgaggagcagaattcacctagtgataacgaagatgaagctccacaggaaacagagaaaccagtggatgaggaggaacaagaaccttcagagcctgaagaagagccacagcctacagctgagtccgtggaaggaacagagccggtaccactagcaactactggggatctgttagtaagttccatctcctccaactcagtgcctatttcatcgcatcctccacgctgatttctatgttgcgtgcagaatttcgacgaagaagtaaaccccctgattgcaaatattgaagaaagtaatgcactggctctgcaattgtggcaccaggtatatactagatgcaatctctggttcagatatactactttcactcatatttgtcatataggataattggctaagtagctgataaggacaacacctcagcattgaatgcattttatcatcgtcgatcctattttcatgtgcggatactgttttttagtttctaaagattgtatctgctactaaatattgtactatggatggttcagggaatgaaaacaaggcctcagcttcacaagatttgtttgcgctggacaagtctgggtgggaattggcactggttaccgcaccaagtacccacacaagtcgaccagttgacaatcagttggtaattatcttctttctagttgctgtattttttaccactctatacaggatttcagaaagctcaatactagcaagaaggataatcataatttgcagctgataccaagttactactaaaatcagtcaatagctaataacttatctgcatttgcccaacaggctggaggatttgacaagctactgctagacagcctgtatgaagatgaagcaaggaggcagcaaatagccagtgcaacctacaacggcagcgttgcaggaaacccatttgatcccaacgatccatttgcaatgtctaataacttcgcgccaccgtcgaatgttcagttagccatgatgcaacagcagcatcaggattatcaggagcagcagcagcagtattatcagattcagcaacagcagcaaatggtgacgttgccgccgcaaacataccatcagcagcagcagacacagtattctgctcttccttctcatgatggattatccaatccatttggtgatccattcggtggccttgttgcgatggctaatcctccaaagcaaaacaattcaaatttagtctgaattcgcacattcttttctgtatcaccctccgatttttgatcgtatctccttttccaattttgaggagcaacttgtatagtccgacgattttcaatactgcatcctgacgatgcaatgtaatactcacatttggaaactgatatgatcattcaaatgtcgatgtaccaaaatcacatgttatgctccactcttcatttcaccaaccaactcagataataccaagaaaagggtggtaattattaatctctttatagtttgtttgatgagtcttacatattataaccagatgagctacatggattcctgcgtttttattccctcacagtagctcatgaatttctggattctacatttgtacaacagcagaaaacaaatactagcacatgaaacaggcaaagcttgaattcgtcttcggctgatttggcttccactaatgcatcttcagctggaatttcgctcattcatcttcagctggaatgacatccgagcgctccacttcatccggaaagtgtcctgcatgatcattaaataagctaaaaatgagcaacggtgcaaaattaagtgcaagaacagtagggtagatactaaataggcaagccaaattagactggaattgcagaagagataaggaaaacaatgaaatacacaaatttgttctgctcagttcttgtgcgtgtttgttgaagcatttcatgattaggaattgcaggatggataaggaaaacaatgagtagtcacaaatttgttccgaattcgagcagttcttgtgcgagtttgttcaagcgtttcatgattaggaattgccgaagggataaggaaacaatgaatgaatagacaatagtcacaaatttgctctgaattcgagtagttcttgcgcgagtttgttgaaaaatttcatgattaggcagcatgagcaatatgggggaaatcgagatccctgaatggttagattctgaagaactcttaccatcgatgaagtagg

SEQ ID NO: 24597 - DNA, 2813 bp, Oryza sativa
agagctcgcaaaccggtggcgcttgccgcggacgcgtggtggtgtcgcgaaggtttgagagaaggagagtgggagggagccgatggtaaatatagcagtaatcgtagggcttttccgcaaattacacggtatccggttcggatttcggaaaactgcaggctgcctccgccggttttgccccaagtcggcttagggacctatccgtaaataaaattattgcaaggggttattcgaaaattacccgccgcctttacccttgtcgtgtacgcgactcaactccctctttcgttggagaggcggcggcgcgaaaaatccgaagctttcgcgggaggagctagggtttgtgtgtgtggttgggcgcgcggcgagcggcgggagatgtcggcgtacgacgaggtggagatcgaggacatggagtggaacgcggagctcggggcgtacacgtacccgtgcccctgcggcgacctgttccagatcacgctcgccgacctccgcctcggggaggagatcgcgcggtgcccctcctgctccctcttcctcaccgtcgtctacaacgaggaggacttcgccgacgccaaggagcccccgcacaagccggccccgcgccccgtcgccgtcgcctgaggcggtgagtttttttttttttggcgcaattggaatccgtttccggtgaagcgtgctcgtttgttaggttataagtttgaatcgttgctgtgtaatttggagtattaattaatcgatctcctgtatacctgattatggattcaataaatagttctgaaattttagcttttggatgacttctgaattctgttgtatgttttattttggacgaagtggggaaaaaattgcagccttggtacaagcatgcgattcgtatacctgattatggggaaaaaattgcagccttggtacaagcatgcgattcgtatacctgattatggattcaataaatagttctgaatttttagcttttggatgccttgtgaactctgttgtatgttttattttggacaaagtgggaaaaaatatgcagccttggtacaagcatgcgattcagcggtttgcaaagttaggaattgatgtatagtatagtagacctatgtaattttgagagtgtggttggctgataatattgataggtaaaatggaggagtaggatattgatgctcaggattgagtacaacctgaaaccacagatgtttgtattttgaattcctcatatatgatggcgcctgggcttgattgctttgattgtaacaggtgtgagattgtcctaacttcattgtttgtactaagacatatttaggtggtcaattaggtgcaatttgattacctactatgttttggcatgagcctacctcaaagaaatttggcagcctcttcttatggcattggtccagaaagtaaatagagtaacggttgtgcaacttgaataagtgaatgatggtgattggtgagcttcaggaatttttgtcagtcgattggttaatgtgacgctttgggggtgtttacttggttcggttgtttactaattggagaaatttgttaattgatgtggcaatgtggcatgataggttctctctttattttcgcgagtgataggtctcctgttggattatttgttgatggaaaaattaggttttgtttgtgccagtggacatgctttccaaaagagtcatttacaattagagtaactgatgatgtagattggcaactcagtttttctatggtgaggaagcttgttgaagtttaggttatagtgacttcataggtgtttattcatcattttaactgggaggatgagcttgtcttaggtgtgcaagtttttttcttgtcttgccaagagtattggtaaggctacaaggggagcctatggttctttgtactttgatctgtattgttaacttcttagaaaatctttactcgatttggttaacaccaaatttcagtattcacactgtataatattctatacattttttggtaacctttgctgcattagtagtattttcgtgccaatttgcaagcactacttaagtttcagaatgcttgtttcttcttgctgtcatttgggtattgttgactgacatcattcattgcttgcagcaggatggaatcaggcttaactaagatgagaaaacaaacgggagcatttgtacttctaagatgagaaagtagttatatcgacctttggcttttgaattcactatgtacggagttaccaaaaaaaaaaaaccacaacgtgttgacggggcattatgaataactattgcttggagattttgctgttgcatatttttttacacgatcttgcgcttacagatttacaatctcggtcacggttccatgatctgtgtggctctgtgccatgtaaaaaatcttgatgaaggtttcttcaggggaaaaaaaatggggatgatgaagcttatgcagtgcaagtatgctgacacggtataactcttctattgatgttgaatgcatagatctttacattgctgctcgatcaagatcaaaattctaaccggataaaaggagcataatattgtaaacaaagttcaacacatgagaggacaccaatcatgtgtgtttcctcattatcaaaacatacagatgaatggctccatctctttcgtttatgcttatgcttatcagataacatttgaattttcaaccttaaatttaaagctgattttgagtttttttcatcgaagtttatttttcagcctttgcttttaggtcactaataacacgtatataaaagttttatttacaaattacttctcgtttgcaaatatgctgccaaacaatgg

SEQ ID NO: 24598 - DNA, 594 bp, Oryza sativa
atgttggagctatacatgtcctaaaatcacattctttgctttcgtggtggtttcatgccttgtacacacccaaccatcttgttgctaccttcccatcctgtaaaaatataatgatcaagatcatgattagtcatgaacatctgtctttgtgaacatccacttcttttttcttccctgtttttgtgttctttcagtaagaattgggagggagcaagaagacctttggacatgttgaagccgcgtttttcgagctccttgtattcttggcatagcgcacaactatcgcagaagaagtggacgcagcagtccaagcagggcgactgttgcaagttgtactgtgcccgcattgaggatcgtttggtacaagcatacagccattggcagcctattgtcgccagcaaaacatacaaggtcccgtgcatgcagcacgctggaaacagggagagtcagcatacaagattgatggttttctgtgcttgaaccaaagcgcgaagtgataagttaatatgcctacatgttgagcctttgtccacaatctcagcaatgcgaccgaacgtaatgcaggggcaccagcaagtcaagcagcctgtgtag

SEQ ID NO: 24599 - DNA, 3736 bp, Oryza sativa
tttgggggtgaaagcttttttcctagttggtttagactaaagagcctgctgactttaaggagcctggtgcttttccaatgtggggtctgaaaatctgtcaatcccatcgtttccttcccttgaacttctaatgctatcaggaaatatttggctgaaaacagtaacaattcttggtggttcgactggtggtgaaacgatgcagcatgcaagcagcagtagcagtagcagcaatggcacaacatgtcttagtggactcacctatataggtctttacagttgtgaggacctgcagaatcttgatcggtgcttgtccccggaatacttgccatccatcaagtccatagagatcgacagctccagcgatctaggactgtcaatgcctgtcgatagtttcgtgggattcaaatacctacaagatctgaaaatccactgcaaattgttatgcccgcagggaatggttttgccaccctcactccgacgactctctattgtgtctggccgtaaggttgacttcccggcctgcctacagagcctcacctctctcaacatcctgcatttgtctagctgcgatggcatggagtccattccgctgggcacaaatctttaggtcaaatgcctgcttctcgagcggtgctcggagctgtcatccattggaggatcacacgttctttcatccatgcagttcgtgagcatatcgatctgcccaaagctgcacgaagtagagcagccctttaaaaagtgcctgctgactaataaggacaagaaggaactgcttcaatttacctatcacttatatggataaagcatagctgatttctaaagacttccggggtatttttcttcacgctgcggcacccagagccttctgttgataattgagcgttggctggtttgggtgagccgtcgacgtgtgccttgagattgaaatggccgagaagaacaaagaaaagttcacaccatgtagagagttggagggtgagcggtggatgtggtttttgatgttagaaacgagtgcgaaagcgggagcaggtctggggttagccatggcgggatctgccgaggtgcatgagcagactttcttctgatactatgaagagattttcttctgttcagcaggtagcccggtaacaaatctctgcccttcgttctatccgatcagacgattggcaaggtgtggtacctccagatacatatttgcccatgaggtggtaccggcagtgttgagagaggtggaaggtgcttgaatcccctctgtccgatgagtggtaacagcggtggcttgtccatgggcaactgtggcggcgaggtggtggcggccgtggcggtgaggtggtgttggcggcggctggtgcgtgagcggccgtggcagcgaggtggtggcggccgcggtgttgaggtggtcatggagtcgttagagctggcgatgttgtggcagcggcgggggctttggcggctgcagtgacgaggtggtcgtggagcgaggtggtggtggccgcggtatcgtggtagtcatggagtcgttggagccggtgatgtggtggcggcggtggggactttggcagctgtcggcggccacagcggcatagtggtggtgctccagttgtcctctgaagctctaagacttttcgtttgctgttgctgcgatgccggtgatcaaggatattgccgatgcgtagtggtattacataagttgtacgctgaagtgtgttgataggtaagtttcattccaagcatatgtcatttttttagtggtaattcagtataaataaattttcttttaatttagtcatgcatgtcaatataacagtcctgtttttttaaggaggatgacactctgattggagtagatctggcatccaagagtacaaaagacattcaagcagctttggcacttgctggaacatgtcaatctgggtacactggtggagaaaccatctttggtccgtcggccgaaatccacaatagttccggttccactaaaaaccgagactaaagatgatctttagtatgaagctagagctggaaatggcggaccgtttttagacatggaaatttcactcaagaagttgtccaagcaggaaaaggagaccaatgacattagaaattggttcataggaataatagttctagctgtgctccttctcatgaaattatttgataatatgtactatgactaccgttgttgattttctggatgttaaaatggaaaaaaatttagtcatattgctagatgttattagctatgctaaatcacaacatattccccaacttacaatatcaatatcaatttttaactcaatgcataaagctgttcttgatgtcctcctgataacttaggtgtactccagtttgtcagtttgtttcatgttcttgtcacaggaagcaactaggacagttgcttgtgtggaaactgaatgacactaattttttgtgtagtctgttcaattttttgtgttcagttcttctcaccattagaaattaaataacaatatgaatgcaagtacctaatgacaatatgaatggctgtgaacttctttgaatgactgaaaagcaaattggcagcaatgataaattaatgaattccaatggaattgcatgttaataagtgcccatccatctgaaaacacctgcaggaaaatatttacatttatggaattgcagtcagaagatctcatgtgaataggaaaatattgacataactgaaagtttcagatgcaaatcagcaaatgtgtcaccatatggctcgtgacgccatgatccatgctaaatggcgaaccagaaaattcgatttgcctggcaccaaattctccaatcccaatacctactcaacaggttagcttgcatctgagatctgaccatctactgaaagtctgaaactaatactccatccaccactagtcttcactcctcagtcgcacccaatacattgcactaggtatttagcaaatgatataggcggaaacataaacagaggataaacaatcaaacccataatatgcaaacaataagaggacaaataattgaaacatatagacttaagaaacagcaggtgcatcaagtaaacagatgctgaagcctaaaggttccctggctacagaaagtgaagttgtgaattcttgcagtgcataacacaagattaagtcagggcatacacaaagcgcagctcatgaatggtgtcatacgcttaatggcattacatcaccctgatgccagctcgcacaatttcagagtattgacgagtctcgaagaaattgaatgccaacaatcaagctccaggaaaggtgagacatgtccgatgatgccccgtcggcccgtgcagttgcagcggagaggcgcacgtggctgcgactgccatcgacggccggctgcgtagcctccgaggatgtgggcgaccatccgcagccgccgcactactccacatctgccctccgcctgccgtcgtcggccggctgcatagcgccggggatgcggacggactaatccgagcgccggtgaggaaaagaacaaaggataagagcgtcattttatagcttacttattttttacggttttactacgtggggaatgctataaagtcttatattataaaacagagggagtacttgcatattttttttacggttttttaggcttaaaaactttcaaattgtagactgttagatcacatcaaaattcgtgcagatcggataataaaaattggcgcaaagtgcacaggagcaaagaatcaaacctacaa

SEQ ID NO: 24600 - DNA, 1801 bp, Oryza sativa
  unsure (1)..(1801): unsure at all n locations
ggctacagatatgtagcttgctgctcttctctcttatcttttatctcattaaaatatgtttgtagctggctaatagtctgctattgtacctgctcttaggattgacccagtctgggcctcttgggtccatataggaaggataagttcactctaggtccctcattttgtcgtcgagcctggaatttgtccttaatcgaaataccagatataatggatcccttaatttataaaatctgatcatccgatatcgtagacagtatcatgctcggcttttagctgacgtggcaagccgagtcaacgtgggacccatgcggggcccacatgtcagtggctaacactctcttctcccctctcttccctttcccctctcttctctctctcccctttgccctgtaaggtgacaactgtcgggaaggacggcatcacgagtggcggggaaaaggggcggcgcccaacggtcaacgggagaggagaaggacgtcactcgatagagagaaagatggcatggagaagtgtgtggtggcttgcggccttctctctggtgcctctacccgccgccctctccatcttgactccatccgcgtccccgtcagccgttgagcaaggtcattgtcgatgtcgggtctgtcggtagcacacttagctgcttgagctacgcacaccgagcttcttgacctccaccttgagcaacttgaggtacctgacggccttgtggaggacggtgggcgcgtccatcttgctgccgccaggatgatccccttgagtgtncgcataatattcttcatctgctccttcttcctttcatcacctccggcgccggccctaagcttccgaccaccactgtagtcagacctcgacgcgtagatgctcaccccgtacctggacaagcacgtggagtccacgaagcccccagctcggcaccctggcatgcgggccgtgctcagcatggcctctactccgtgctaatcagcgcgtctttcttgtccgtgatcagcatggactgtaactctatatagttggcttagactccactgctatttctttctggctctttgagacgtccctctcaggcattcggtgaacaccctccacgcgtaccatatggccccgaacctgacgagcgtgctcagcatggtgttcctgaggcagagaaccaagctcgggtgctcggcatccacatgcgcacaccctgcatcccaccgtcgaccgcgcggtgccattcgcggagccggaacagcgcgacgtaggcatcctcgtcgggcggctccgaggaggactcgaggagccagagcgcgcctgcgccagctggccatggctacagagcacccgcagtgtggtgctcctgtcgaagtaggtggcctccgcagaagcggtggctgtggcgatgcgctggcgaggttggaggagaatgtcatggtgaggttgttctcccagagatacgttccgagatcaacctttccgctgtgttcgtccatcagcttccgcacggtttccttctcctcgccggtgagctccagattgccagtacagctcctggacagtggttttccctaccgtatatacttggcacggccatgatgccgtccatggttttcccactgttaccgctccaacgcccaccctatcgcccattgccacaccactccggctgattgccagcgtcgcacaggcagctgcagtcgaaagggaagagaaagggcagagaaagagagagggagggagggaggaggaagaagtatatatggccaaaaggcccgaggcccgacggcccggcccatggcacggtattttggcccggccc

SEQ ID NO: 24601 - DNA, 3436 bp, Oryza sativa
  unsure (1)..(3436): unsure at all n locations
aatttttcaccaacgtcagctgatgcacggtgtaattttggctcagctttgggtcccctagctgttgaccacgactcttacgacaggtaagtgtggtgtgtggataaaggtgggcccaagcccatggcgacgggcccaccacccagcggaggctgagagggacaccgtgggtctcggaaaaaaccgtaacggcgtctctctccgttacaacggacaatccttcgcaaacactgtacgtttttttcgtatccaggtccacctcagcccctatccttttgcaaacaaaaagagaaaaaaaaaggtgacctgattgttttatttgctttgcaccctgtcaatacttctttgttagataaacacccctgggaatatttttccttaggcaaatcttatctgcaaggaattgagtgcaaggaaagccttagaaatgacatagcaactcatgtttttcctatgtgatggattgagtaagtcaataatgtgatattttttattatgtggaaggcgtggccatgcataaataattattcatgtacactgtattcacgagtacatcgctgacactagatacactcaaagaatgtattcacgaattcatacactcaaagaatgggaggctaacaatagatccgtgacatcaataaaattgagggctgctagcccacgggataccgttgcaacggaatatttacgaaatattntaagtgactctcctttntccttccctctgtctacgtgtgctcccctagtacctggtaccttacgtaccggttggtacttgatacctgctatcttaggtaccggttggtacctagtacctggtaccttagataccaactagatatcgaccgatacctgatgcccagtacccaagataccgggtggtacctaggtatcagaccttggtaccaaggtatcaagcctgatacttgtggggtatcagagggtaccgtcaaaaagaggaggagacgtgggggagggagcgccgcaacggcggaggatggcgtcgaggaggcatggcgaggtgagggacgtgtgttcccctagtacctggtaccttagatatcggttggtacctggtacctggtaccgactaggtatcaaccgatacctgatgcctggtacctaaggtactgggtggtacctaggtatcaaaccttggtaccaaggtatcaagcctgatacttgtggggtatcaaagggtactgtcaaaaagaggaggagacgtgggggagggagggccgcaacggcggaggatggcgtcgaggaggcacggcgaggtgaggggtgaggcccaagccagagagcgcgagaagtctcgaggaggagccgaggaggaggttgacggccatacctgttgcaggtcgacgcgggctgtcagcgtccatcccgaaggcgcaaaagcgccagcccgcagcggggaccacagtgacgccaggccgagggccgaggacgaggggagctcccgcttcttccctccccggggcgatgactccccggcgcacacccgacccgacgagggcggcgagccagagcggcgcagcgaggggaggcgagctcgagggcgaccccgccgagggttggccgaccttgccgacgcagtgccgtcgtcgtcctcctcagccgccggagacgacgacgacgaccccttcctcccggccggcttcgtctccgctcggtcttcttcagagagagagaggggggggggagagggagagggagggctgcagtgctgtgtgatttgggggaggagagtgaggtaggaggagaggattcggatgattttggggagaggagtgaggtaggaggaggggatcccgtctccacgggatgtcgtggtgtaggttttctgataaatttttattgaaagtagcacatgagcaaaagctcgcgagctttaccgagccgagctcgagcttctactgagcttaaccgagcttggctgtgtatagtttatattgcatgctcaccttattgatataataaactaatagataaatatatatattagtatctatttacacaataaattagcatgtgttagcacaatatatttattttagtcattttctactcttttattactgcgattaactagaaaataattatacttatcaagagattatcattaaaatatatattatgctacttatggccgagctcaagctcgaacgagctcgaatcgagcttgcctaaaagctcgaaggtgcaataggctcggcttgagctcggctcgagcttgtgtcgagttcgagcttaggcaaacgagctcgctcgagctcggttcattgacagccctagcggggagttaaactatgtatatttcttgattttttccactacatattcacatgaaataaaatgtagagaagtcaaatctttcttggtcgtggtgaaaaaacttatgtgatgatcaatgcggaatggagggagtaataagtaacatattgaagtcttgaagcctcttttctttttgacggtttgcaaaattgttttttttttatcagaatgatttacgcggtattatgtctcatttggattgcaatcatgcttatagtgtatagtttggaacattttattacccttgactttgcacctatgcatgcatatcctctcaattcctccgaatcttaaaaagatactttattgtttatcattaattttgttgaaataataattccaaatagtaatatatactccctttgatctcgaataattgatacttgcactattcaaatttaaattttatcaatttgtattttcattaataaattacaaatatggacacgactacagggagcgcaagcacttgttagtgctaaccagcgaccatccttttttacccaaaaatagtacagtgtgtatcaactcattacccctcttactaaaagtagtagcacctgccacatgcatcctcatttaaatacttatatgatctaagatccgattactcagttgtgttcgttgcagttaaatttatacaacaagatcttatatgattatattatgatgaaaaaatatttatgtttgtaaaatacttttattatatactaagttacttttatcatatatataaattacttttagatttagatttgattaaattacttcctatacattcataatgctatgaggtggttacttttattattgtttttagtcaattccataatttgtgctgattaatttagtctctagatagagttatgtttttatccttacaacagatttacttctaatgttatgacaaagttactttccttttgtcttaagttacttctattataatatatgtaaattacttttagactttattaaatttacttttatatgtccaagaagtactttagtgaaatctaaaaataatttagatatattataaaagtaatttgtaatttttcatcataatataatcatgtgagatcttattataaag

SEQ ID NO: 24602 - DNA, 2284 bp, Oryza sativa
attcctccaaaatttacatggcattaggcaatccataggaatttcataggattccataagatccattcctttgattcaaagggctgtatagaaaaaattcctataggaaagaaatcatctaaaattcctatgaatttcctttgaatcaaagggggcctaaaccttcccaccgagagagttgtcagtgacaatgtgtgtgcacacatagaacctagcaaactaaaggaactttcccctgtaacagagaacaacaggaagcaagtggaagcttcagaagaagtagctcatgaagaaatggccataaacacatcgggagaatcatttgatagagcaacagcaaatgtagatatctactttgctaagaaaatagcctctgtcgtgaatctcgactgcgagcccatatcactcacagaatgcaagaaaaggtcggattgggacgaatggaagaaagcaatcacaatcgagttaatttctctaaacaaaagagaggtatttgaccctgtaagccgtatccctcctcatatacgggcataaatggttatttgttcgaaagaaaaaatcagaataacgagttagtgagatgtcacgtccaaaatttctatccaaaattccaaacgcttacatgtgtgttaaaccctcgtccagaaattaaccgaggcacacaataacaaattgataatagagtgctacacaaacaactaattaatattggcccaataataaaataataaactattatagaggtggatagttcttctcaaagaataaaattatacgcagcggaaataaaaccaaaacggaacagttatggggattccactccacaagcaactcgaccggaacaaagcttaatcctccagatcatcaccttcattgaagtactcttcttctgacgaatgaatattgcaataatgagcatatgacatactcaccaagccacccagcaaatatgcaagtgcacaggataacaaaagatggcatagtaaagctcatttgcataaacagcatttaataaacattttaaagaataataaaccagttgaataattaatcagtattaaataaacactatacaacacacccgtgctgcataggcccaacctcatctgagcaaccaaccccggttgtacaaatcaaacctccataccaggaatataccattccaaaccaaaagtcaaattaattaacacaatattatcattaatgaatagtgtggggctaatcacgaaaaacattgttaaactcacccataaccgcgggcacggctattcgaatagttttactctgatcagaggtgtaccactgtacccacaagacacaactccacaacatgtcatcatgcgcctcagtaccactacggtaccttggaaaggaactgtgacaatacccctcgcacaacacaactcatcacagtgcaccgttcctggatcatgatctccccctcaaaaccagaggcaatggactccccagcgacccccacagacttctcgccgcttcacagtctggcacaccataataaatcatgctatacaaaagataaagccgttgcccatgctggcttgtggttggcacggtaaatgtttcacaacagtagctcgcgaaccggtccttaattgtcatgagcacaaccatcaaaaccatatgctcacaacccaccttaatcaggttttagttatcaattaattaacataacacaattaaccattgtgagctaccattaaatataaccataattaataatgtagtatgattcatcccattaatgagctaatgtttctaagcatggctaagcaattatacatatagcatctaactgaaccaatccaatatataaggtacaagctaatcaatttattacccataggaaaataaagacatctttggccattaattaattgggaaaggctcaccacccgatgacattcgaaaataatgcataagttaaaataaaacattagctttaaacgggttcaacatgctcaaagggttgtttgggatctatattacttgccttgagcttccgcaaatgcttccgaaccttcctcaacgaaaacgctctccttcggaacgtcggaaactaaagccaaagaacaaaatcaaccaaaacagtacaaaaacaagcataaacagtacatgtggatatttttaacatgtagatctcgattttagaaaaatttagcaacttggaccactcgaattcgagttacgatgatttagttatgaatttccgaagtttaatcgatttgcatctaataaagaaaaccttaaaaaagggatttatgac

SEQ ID NO: 24603 - DNA, 3050 bp, Oryza sativa
cgcttttggaccacataatctccttgtaatcttaatcgatcgctcctgtttctcatcagaagtagcgagagggcaagatccggagaagtaatcaaggactacggaagtgatggacgccgtggaaacgatcatctcaaccgggatcaacatctatgaagcgacccagctgagcgatgaactgtcccgcctgcaggccaccttgcccaaggctcgcttcctcatcaatcgcggcgagtggggcaggttcaagaacaaggacatggcgatccttctgtcgcagctcaaggacaccacctacgacgccgaggatcttctccgcgagttcgatgaccaggcgctgcggcaaaagatggaggacgctgaccggagctgggcaggtcaactcttatcttcctctctaaatcatgcaaaaactttgatccgtggtagcaaaacaaggataaagtaggcccaggagaagctcgacaaggctggggctgatttagagggagcgatcaattcagtgggtcttagtatcgaggcagttcaacacatgccggagacaagttcagtcatagatgtgtctcaagtgtttggccgtgataaagaacgagatctagtgattgagaagctgggtgtgcgttcgatgattggacgtaatagtcaacgagatcaggtgattgagttactgggtgtgccactcaccaggggtgctgctgcacgggctaaagagaagagagcagcagccactgtcactggcacgaaatcagcatcctgcagaacgaagaaactgaagggagagagcagcagggcccctagacttgatgaggccaaatgcatcggcaatgtttctgtcttgccgatttttagcattggtggggtggggaagtctaccctggctcagatcatctacaatgatccaagggtgcaagctcactttggcaagaggagggtatgggtctgtgttccacacctcttcgacaagagaagaattacaaaagagatcattgagtctttcaccaaggaagagtataagccactgctcagtttagatgctcttcaggtggaaatgatggagcagctagggagacgaaagttccttttggtgttggatgacattgggcaagaagctattgacgagtgggagtcattttatgcaccattcaagaacggacctaaaggcagtatgatcttagtaactacaagatttacaactgttgttgatcgtgttgccaccaacaattgtaagcctatccaactcgaaggcttggatagagatatattttgggagttctttagcaagtgtgcattcggagaagagtgtccagaatcatatcctcaattacaagatattggtcggagcattgcctctaggttatgtgggtctcctttagttgccaaaactactggacgtttgttgaatatgaagctgactgtgcaacattgggagactgttcagaacagtgaattgtgggagctgccacatcgagacaatgagatattaccggccctccagctgagctacttatatctcccacaagaacttaagagatgctttgcattttgctccatgtttccaaaagattatagctttgaacgagatgagatcgttgacatttgggtggccgagggctttgttgtgtcaagtggaagcacacgtcttgaagatatggggattaggtatttggatgatttgaggagcaggtttctttttcaaaccgaccccaagtaccctgatcgaactagatatgtaatgcatgacttgatccatgatatggcacaatccgtttatgtggatgaatgcctcttgatgcaagatttgaggtctcggaatgagaggagaatgctacatgtagttcgccatatgtccgtgaaggtggctgatgaatccctgaagaacggaatgagaggcattcaggatttgaacaaattgcattcacttaggtttggaatcaaactcaatgttgagattacctggttcaatcagctctccaacatcctatatttgagcctaaagggttgtaagctggtcaagctacctgagagcataggcgagttgaacagtctccgttatcttgatatttctcgtagcggtgtacaagaattgccgaagaaattctgtagcctttacagcctacaggttgttgatgcaagtcgttctagtctgaaagcaattagtctggatgtcataaagctaatcaacttgcgtcgtctagcattgccagtgagttgctctccaaagttatcagagataagtaggcttggaaatttgtctcgtctatggaacttatcacattttagagttggaaaagcggatgggcgaaaaattggtgagctgaggggcatgaatcagctcagtggaacgctaactatcagtttatttgtaatgttaagaatgataaagaagccgctgaggctagccttgttgaaaaacaatacctccaggaactagttctactctggcgagggcatggcaaagagatagggaagagcagtgagaatggagtggtcgaagccttgcgtcctccaccaagaattgtacgccttaaagtccaaggttttgggggtgatagcttttctcctagttggtttagaccagaatgcctgttgaatttaaggagtctggagctttccaagtgtgatggcttgaaaaatctatcgatcgcatcgttaccttctctcgaacggctaatgctagaagcaaatttacggatggaagcagtaacaattcttggtggttcaactggtggtgaaaagacgaagcatacaagcagcagtagcagcaactgcactgcatgccttagaggactcactactatacgtcttgtcaactgttatcagctacagaatcttgatgggtgcttgtccccggaatacttgccatccatcgagtgcacagagatcaacaaatccagccatctaggactgtcaatacatgtcgatagtttcgtgggattcgaacacctacaagagatgaaaatatggcgctgcaaattggtgtgtccgcaaggaatggttttgccaccctcactccgacgactctctattgtgaattgccgtaagcttgattt

SEQ ID NO: 24604 - DNA, 1361 bp, Oryza sativa
ttctcttagattttcatagttttcttttggtgttcgctagatgtggcgaaccattgtatattcggcaatctgccgcaaacccttttattgtaaccgaaacaggtggccgttgggcgtttttaaaatttgtataacagacctacttttcgccatttactgtcggtccaagtctttgacatattattatttcgctcatttcgcattatgccatacctcccccttcttccgcctattcctaccatgtaagctgtgttttgcttttttctgcactgtctatgtcacatcctgattttcgtttcaggatttataaattatttaataaattattaatagaatttatattaaatgttctttaatttacaagtgaagttaaatgtgggaaataaaatttcctaaatctaaagcatggatggatttaatttttattaaattctccatgattaattatactctctgaaattttctcgaatttttcggagctcaattcctaaatgatacaaagaacagttcagtaattatttgatcaataatgatctaattataattattaagagcttttcttgtttaagaatccttaaattataaattgttgtttaaaaggaattattagaaatgattttaaaagcctaaaagagaagatctaattttaatttgttaaatctcaatataaaattgggctaaataaaattttgttaaatactgtgcttaattctataattcctagatttttctgggatttatttgagctaaggaagtatttttaataaatggaattgcatttcatgaataatttaaattgaaaaaggttttaaaagtcttcttttggctttgggccgaaagccggcccaaaaccgctctctctctcctcctcggcccagtccggcccagtctgccgagccgccgctctcctctctctctcgctgtcgctgacaggtggggcccgcctgtcggacccgtcgtcttcctcgcgtcggccgccgcccgaaaccctagccgagccacgccgccgccgctttccaaattcggtcgatcctttccttctccggccgaattgattgaggggaaacaatctccgggatctcctccaccttttcccttttggaatcatcctctacttcggtttggaaatcgatggattcgagtttgttttggattcgttcttcccgaagtttccttcgccgtcgccggtcgccgtgggccttcgccgccgccttccaacccctatataaggatccccgagctctcctctacccgtcgcctcctttgccttagcctgccgtcgcgtctagcgccgcctccgcgtagcctagtcgccgccgtcgttgccgtcggttcagccgcgtcgcgccgccgttgcagcc

SEQ ID NO: 24605 - DNA, 2813 bp, Oryza sativa
ccatataaaggttttaatccgatttaatctttaaaaattcataactaattcatttgaactcagtttaatgtggttcaagttgcaaaagttatataaaataaagatctacatattaaaattgtccataaattgaattaaatttatttaattctttttaaatgggctttaattagatttaatcttgtaaaattcataataaattcatttgaagtcagaatgaggccgttcaagtctcataattcatctaaaattataatctacatgtttgtttactttttatgtactgtttatttggtttttattagtctttttcttcgttttacgtgttagcttgtcgtttccgtcgttgcgaaggttcgcaagtgcgccggaagtattcaagaagattaattgaagaccgattattgcaaggcaagtcacacagatcttaaacacaatcctttgagcatgttgatcctatatttaaattctctatatatttcaactgtgcatttattttcgaatgtcactgggtggtgtgaacctattctttgttatggcctgtttgcattgattactttattccttgataccttgggttattataacttgactagctgggctttatatattggttcagctagatattagatatgattgcttagccatgcttagaaacattagcacataattgggataactaatgtttcactatcacttatggttatatttaatggtatctcacgatggtcaatcgtgattggttaattaattacttgccaactaaaacttgataatggtgggttgtgagcacatggttttgagagtcgtgctcatgacaattaaggactggttcgcgagctactgttgtggaacattaaccgtgccaaccacaagccagtgtgggcaacggctttaccttttgtatagcatggttcattgcggagcaccagactgagaagtggcggagataagcccacgggggtcgctggggagtccatgccttgtttataagggggtgattatgatccaggaaggtgcgctgtggtggattgtgttatgcaaggggtaatgtcacagctcctttccgaggtaccgtggtggtactgaggcaaatggtgacatgatgtggagctgtgtcttgtgggtacagtggtacacctctgatcagagtaaaactattcgaatagccgtgcccgcggttatgggcgggttgagcaatgtttttcgtgattagtctcacacctctcacaataattatagatgttatacctggtaataatttgcttagctcctggtttggagttagatctgtacagccgggtatggttgttcaggatggttgggcctgtgcagcatgggtgtgctgttcagtgttgattaaaatttctgattaattactccactgttttacttctcttaaaagttttgctaaatgctgcttttgcaaatgagccaatattatgccatcctttggtatccttgtgcacttgcatatttgctgtgtggcttgctgagtatgtcatatgctcaccttgcgataatcaatcaacctcagttgaagaaaaaggatccagaaggagaagacgtttggcttataccccagttgagctgcctgtgggagtggagccggagcttcgctagattttattttccgctgtagttttcttcatgttgaggactaagtgcctcttaagtaagtatttattcgctttagttattgatgaatctgtatattaaattgtcagtttgtgtacctcggctgattcctggacgaggattttatgcacaaataagttcggaaattactagtgaatttccgggcgtgacagtctaccagggggttcgccgaaagtcgtgcattcggcctcctttcgggagctggcgaagtcaaaccgagaaatttgtggcgttgaagggtctgccgaaggtgcgatgtccatttcgtcctacttatcgcgaaatggagataaacggtcgcagctataaggttttcaaggttgccgattggctgcgggcgcaccccgggcgaaccttagaagattacgatcttgttcattcaagacgtttggaggatatggctcgcttttggcgaaaccatcagaagactaaacgtcaggaaacgatctttcagcgtcgttatagtttagtctgtgtttcgccccctactcctcttaaggttgtgtatgatattagtagtgatgacgaacctagttcgcctgacccttccttagggagggatagtgattatgggggcgaagatgtatttttacttgtaaggtgaattgtatcgtgtgaaccttctattctttcgaagttaataaaaatgtgttttatttccttttcgctatttttcgcatcgtcacattttgtgcttttgttaggtcggaacatgccggcccctttgcgtatattagcgaaataggtgtactgacttttcagcttttcatcgttcgttttcgatctgtagcgttctgtgttgaaagaaacgcttttgcttttatgttgatcgagcgtaacatcgttcggctagttattttctgagacaagctgttgcggtttcaacgttcggcgagcgatgcttcggccgattcgtttcgcccccctggcctttttcgctgatcaggcgtttgccttggggtttttccacaaattatcaatcacacgaaaaataaaaagaaggcggaggacacagagattttatactggttcgggcctccatggtggataatagccctacatccagttttttttctcttttttctctctttctttttttttcttgccgaaaggcttacatagtgccaaagggcttacataacggtatgtacagg

SEQ ID NO: 24606 - DNA, 2174 bp, Oryza sativa
tatcagaacatttatatattgcatcactttgttacttatttttccttttcatttcctaacagaaccgccgatagagaaaaccttgcgggcttccattgctgagatatctgttgttcttttgttcagtgatgaaatggatgctggcaattccagtgttcctatcagtcaattcaatgacatgagaaattctgaaatgttttcaagctgcctttcctttgcacattttgagcaatcaatgatatctcctgctcctgctgccagcttgaatatgcatcacgttgaagccaagtgtcagaacattcatctttccctggaggtatggtctgcttccaccaatagcactttttcgtagtttatatctcctaattttatgaagcttgattctaatgttatgttcttgatgtttgcagacatatcctgaaaacctaagtctcaagggatcaattgctgctataaagcttgatgaatactatggcagtaagaacaatgattcagatcatccaaatcttggtgctgctttcttgaacaataatttttgcagagaagttcaagcttctctccctcaatctgtatttgcttatcaagattaccatgaggaaacatcacgccgtcataccaacaattcaaatgacctcactaaggtcgaattgctaaacacgtttggtgagtgcgtattccactatgatgtcagttcctcaggtcaagatggcaacccagtaagctcaacttcactatcagtctgtttggctcctttggtttgctgggtgcactttcacacaatatatatgctactgaattttatcagtaaaatcgagtctgatgttttgcatggggaggataaaattcataggaagaatgacgaaaaaaatgtcaatttgtctatgaagtcaaatgtttctttgggaggaagccaaaaggttcagatagccctgtcgcctgcaagagtcatcttttgctttccttctgaatcatgggatttgagctgcccatccatgctggataagttccttgtcattgaccacacaccatctctgaaatcaggagcagattcatctccacatcaaaatgaaatgcctaatgatgtcaatgcaatcacaccatctactttggtccatttggctacagggaactttgacatctatttggttagaccagttaatgatgaactgaatgctagaacctgttctctgagtaggcaaactttctcttctctgaagattttctctgttaccggatccaattgtcatgaaactggcattacgatgctctggaagaagtatcctttaaaagaccctgagatggtgagcaaaacttggagtttgccaaacctgcatgagcaaaagattgctcagaacaaaaatggtaaatgggttggtgtttcctcttctacaacctcagaagatcttgaggaatcaagttccagtatacgcagggagctcctccggagcacagagtttttgttgcacattaaactttcttgtgtctcagttcatctcagtaagaaggactgtgggatactaaaccatttgctaaaaaacatccttgatggtctttcagatggagcaactggaaattttgaaaatgacagtgacaattgtatgccaatccatgatactgctagccaaacatctgtcatttttgaatgcagcatcttggatatctgcactgaattggatgaaactgttgaagttggtcctttattgcagactgaactagaaggttcctggaactgtctcaaattgtcaatttcaaaattttctctgctatcctcttctaatgttggcggggttaacaatgccaattttctttgggtcaatcatggtgaaggtgagctctggggctctattactggtacggatgactatgaagaaagcaaagatgttcttctagttgtttgcaaggattcggcaagtagacgaggtgatggtgaaggtagcaatatcttgtcttttggaactgcgggctgttctgtgactcatatcatgaacccaaagtttcagaagaattatacttctatcaatgttcgttctgcaacagccgttgcacctggtggccgcatggattggataagcgcgatttgcctattgtttagttcagcttcagatggaactgaacaaccagctaatagtagcacaatgaacgattcccagggtggtgaacctttttcatcactg

SEQ ID NO: 24607 - DNA, 4172 bp, Oryza sativa
tacttgggcaaaactaagtattgcttaagcttgtaacttgagcatacccccgaaggggtcttagtgcatcagtcaatctacacacagaaagtgttagaatgatttggctttgaaaagacatatctttctaaaacccctatggtcggaaggtcactccaagtagaccaagatccgtatagaccaagagaagaagggaaggaagtcattggattagaatatccgtacttgagtgcaataggagtgctcatgtaccttgcaaattgcacaagaccggatatagcatttgtcgtcaacttacatgcaaggtacaacacagagcccaccaagaggcattggaagggcatcaaggacatcctccattatcttcaagaaagtaaggacatgaaattgttctacagaaagaaccaggacctcaccttggtaggatatgcagatgctgggtactctctccgtcccaaaataagtgcaaccataagtttcaatgtccaattttaattatccgtctgatttcaaatttttttttgaaaaaaaataaaaaacataagtcacgtataaagtactattcatgttttataatctaacaacgataaaaatactaattataaaaaaaattcaaataagacagatgaccaaagttggacacggaaactcatggctgcacttattttggaatggaggaagtacctatcgaacccacacacagccaagttgcaaactagttatgttttcctatatggaggaacaaaaatttcctagaaatcgtcaaagcaaaatctagtagcaacttcgatgaaccacttgaaaatcatcgcactatacgaaacctctcatgaatatgcatggtttcgtcgaatgattcaccacatttagcaatcatgtgaattgaacaccatccagactcctataattatctatgaagataatgcagcatgtgtcgcacaaggacaaatgggttacgtgaaaagcaatctcaccaagcatatataccccaagttttttttatgctcatgaactgcataagacgaacgaaattaaagtattgcatacaagtcatgtgaaaatatcgtagatttattcactaagtcattaccaacatccccttttgaaaggtgcatctgagggatcgggatgttgaaacttagagaaatgtaaaattcaggaggagaatttcactgactcacttgccaaacttagtccagaatgacaaagtacctaataagaataattggaggggttgtactctttttcccttagataatttttcccgcatttctttatcaaagtttttaatgaggcaacccgtgccacacaaaccgtatgttatgtactttttctctattttttttccactggctcaataaggagctttatgaggcataagcaatacatggtgacggctcaggagagtgttgaaaaacttggccaatgaacgcccaatacactaatcaggcctcaccctactttacatgtataagaattggctatataaagaaaaaagaggagaggctttatgtaccatgtataagaattggctataaagaaagaagaggagaggctttatgtaccatgtataagaattggctatataaaggaaggagaggagaggttttgtggacagttgaaagaatgtgaatgacaatactgtaccccttctcatatctcgtatctccaattttctgtagattacataaccctcaataactacttcaggtagcagaagcgttgcgtaataatttggacttccatcagttactacaaaagatcatctccagacacgcacacgcgaaacaagcgcttatatctcattgcagcagcacaaaacctgatgatatttacacttgtagagtgagagttacagtgagcagtttctcaaaccaacaaaaacgtaaatggaaaaccgagaaacaagagagatatttacatttgcactactcagtaatcaccaccaaatttatgtacaagagccaccgagccaagctccctgtgaccctctctctctagccaaatcctaagcaaggagtcaacaaaacttccacccgctccgggtggccacgtttgtgattacaaccgtgatcgtgtgctagtaatttacagtatgaaggttttcgacgtggcatctgaaactgtacacctgcagaggagatggattatgaactccaacaagaacatcggagatggcactgattcacaaatggttggattgctagtgtggaaatctgacttatcctgtacaagtttgcccaccaccctttgatgagattgcacacatgtgctcttgaaccagttcttccaggtaaatacgagatctcgcaaaagaatgaacagaccacctcttctcaatggaagtctacaattgaggaggcccgtggtatttgtacatagattctttcttgcgttcaggatcaaggctgtgaatgtagaagaaaagaaaatattagcaaaccaacattagcagtctgtggtcatgccaaaaatgaagtatgctcaagagttgtaacattcgcataggacaaatatgtattttcaccgatgctgatcggaagagaactcaattccactaatattataaatcaaaccaagatcacaattagatttttctgtagattgttccatagttacctagtcagttgcctagcctaattcatgcacattattatttttgcaattcgtaagagcctagttaaaaatcattggttacaagttctcccagttaagtgagctggggtcaatgtagggaatgccaagccccttttgaccctcataagtcctcggtgtaaataaactgtttttgctcaaacacatattttacccagagtaacaaatagttttatcagtgcacagactgataatatttaggacgataaatcaactatattctcattcttttgcatagatatacatttttcatttggggcaagtcagttacagttatttagctacgaagttttattgattaatcctaagctgtccagatccatgaactttgttaccttccgttgctaacttcttccagttccaacagaagacaaaaatatactaatacagtaaattgcaagtcaatatatttctattttcaaatctttttaatatctatttgtattactccctccaatctcaaatagaaaactattcagaatttgtgcaatcagaccttgagatcttgctcaccattatatgggggaaaaaagagagaggagattttatttttttatttttattttataaatactacctccgtttcatcatattataagtcgttttgattttttttcctagtcaaacttcttaaagtttaaccaagtttatagaaaattttagcaacaactacaacacacaattagtttcattaaaactaacatttaatatattttgataatatgtttattatggattgaaaatatttctatcttttttataaacttaaaaagtttgacttaaaaaaaagtcaaaacgacttataatatgaatcggaggaagtatatgattacaaaatgtaataactccattttttaatagatgacgtccttgacatttggaataacgtttgaccatttgttttattaaaaaaaatagtgtaaatatgctaaagtataaatcatactttcatgataaaacatgtcacaacaagataaatgatatttatataaattttttgaataggacaaatggtccaaagtcaacggtgtcatctgttaaaaaacaaagggagcattatctaacatgtgcatggagactttgctgatatatcataaataaacaagtaaaaaaagaaaacaagttagattagaaaatacaaatttttatgccatgttttgagtctagctgatggtctcatgtcacatgtgaaatgtgatcagaaaaacttagtcctattgcatcgagtaaatgataacagaacagaccgaggagtcaacagtgagttgggaatggtctggactgatttaagaattcaaaataaccgtagagcttcacaatgtttgctgatttgaaggttggaggtgaatggaatcacctattccttataccaagaagtgtataatgtgcagcacgaaaagacgctgattatggagccactgcagcacctggagctccacagattgcagtaaccaaagctgatccggcaccagccccacgattataaactttaataggatttccaatcaaagcagagg

SEQ ID NO: 24608 - DNA, 1311 bp, Oryza sativa
tgggttccaaatacttagttatatatgcagtctcataaccaacgtatattccaatcttttccaatggacccctttgcttgttcgttgaggtggtaggataggtatatagactaggcatccaaatttgaacaaatgggacaatttccgtgtgaccccttgcaccaatttcatttttgaatggattgtgtagggccatgaatctgaaattaataagaattaccacgtgtagggctgcatgttcccaacacgtgcttggcaatttacaaccttgcaagagtggcttggtgatgaatttaattcttttaatcaacgcttctgcaagtccattttgcgtatggacgtgacatatcgagtgctctgctttgattcccattgccatgaaatattcatgaaatgcttttgaaataaattcgcagcattgtccatttgaatggactgcacatgatgatcaagaaaattattcttaatttggatgatctgctagatcaattttgcaaagtcatggtttcgttttgatagcaagcacacgtgcgaccattttgaggaagcatcaatgagcaccatgaagtatctaaacggcctttataggtgctgtatagggccacatatgcccactgtattcgtgctaagaatgcagggatttcatccttcattttccatacggatggtcttgtgatcaatttcccggtggcacatgcatgcctcgcaaaatcttctcttttttttttctgaaaggaacatagaaagggaagcccctgttaaaaaaaaatctaaattgataattgaaaaaaaagattacaacaacctaatccagtttaagactacatctttatcaccctcattcaatctaaataacaaaagaaggagatcacccttgagggattgtctccaagaaaccaaggaatgaagaatattctcaaagaaatcaaattaacgtgcaatctccaatattacttgatctgaattgatgggccgcacaggtcctacatttgcacatcgtgctccatgtggctgaccgcagaggatagggtggagtccgccggtgatggatgttgtttgctatttttcttttgccggtgatggatgttgtttgctatttttcttttgcttgtcatctctatgacatgaacgaaaatgttcttacatttttttcgtgcttgctagatgatggatggctgctactgcgcaacgtcgagcccatctctataccacaccgctacacccttccatgattccatcgtcaaactaccgctcgccacccggttaccctctccactacccgtcacaagacacagactagcctctccatta

SEQ ID NO: 24609 - DNA, 2670 bp, Oryza sativa
ccttcagagtcagagccagacctcatgcggcggtggagatgatgaaaccgataagataaagccccgtcttgctgtttatgcccagttgccagtagaggacttgaagaaggatctggaagaatgccagaggttggacccctcagatggcacaaatcttgagcttgaaaatgcgtctgaatttcgactgagccaaattgtacgtttccattgtctcatgttaaaacgtccagttttctctccatcctttactttgctaaacttgtgcttcacttgcaggagttttcgcaggatagctttacgacggcatgggctggtggcaaggtgatcgattgacatgtctccaaggtgctgtcaacaccattttgtacattgaagaaacaactgaagcctcttccttctgcgagacaacagtaaaatgctgtcgatatatgtggtgaagcaactcttgtctcggacagtaaaaagtcataattttggcccggcggcttgccggggtaggcaaaaggtgagcttatgcgctggcttgcccctgaatcccttgatgcatatggactgtgcaccggtgactattcaatgctaaagatcacatattcctggctgtaaattgtgatggtggatgtctcattttgcttggatactctggaccatccggtggtacaaggggaacttttgcttctggttgaactgattactccaataactttcgtgttaataacttttgccatcatgatagtgcctattatttataaatgtggacacaagtcattttctggagcttgtggtaaagcagggctgagaatctcgtgcaagcttcatcttgtaaattgcagtaatcagcataagattgtgacagataacttccatgtttcagttcctatgcattactactatctaattttcctcgggcaatgagcatgaactatgcatgagactctacagaagatatcggatacgaccatacgaatggactaggatgaggatgctactactggccgccaattttgcttggcattatggtggattactctaatattgttttgtgaaattgtttctactacctccgtttcagattataagactttctagcattacccatatttatatagatgttaatgaatttaggcacacatatatgtctagattcattaacataaatatgaatgtgggcaatgctagaaagtcttgtaatatgaaacggaggaagtatttttttttcattatcaaaattatttcttttaattcatgttacaaatgatagctcctcgaaaatttgaacaccatttttttaaacatgagatagaagctccaccgatcaattaaaagggaaaaaagcttaacaaggtctataaaacaaagctataccgatcctactggtaacaaagttaatggacgcttaaaaaaagtatggacacaataactagaaagaaatttgagaatatacttttccttttaaaaaaatggacatgattgtaggaaaattgagaaaatatacacgtcatgtggcgcaaaactatggagtaacgggaccaaccaacaagttcttgctaatgggaaaaagagagggttgaatgtgggtgctgttcttattttgcccgagggatccgaattagcgccgcccgactgtatttctcctgagttgaaagaaaagataggaaatctctcttttcagagttatcgtcccaataaaaaaaatattcttgtgataggccctgttcccggtaagaaatctaccccgcgcattggctgagcgtcactgggttggtcccacagcccggccacgtgagactgagggcagcaacaagtaccgcgccgtgggtcggtcccatagcaccgggtctacaggccccatcgtttggccaagtatggataatagcactgtaataataatttataagtaataatagcactgtaattaaacttttatatatgtgctcttaacgatttaaataacaatgctgaaaaataaactttaataaaaaaatcaaaatcaacttcaaaattgagttgtaaaattcaaaatttggcagcggctgatattgtatggaggaaacgatgggaatcttaatacactgatgcatattgattttctcagttcatctatctctaccgagtttctaatccctactccctccgtaaaaaaaaagtttggacatagctaactacaagtggttttttatgtgaagagcacatgttatcatgatgcatcataacttcactaccccggactaaacaagattataatatgctgcaatctgcatggtttctgaaactttgaatccattttgaacaaaaaaaaaaggttttgagatgacatgtagacctagtggtgcggagctatatctgatatggaatcgattgggtattacgccgtcccgactgttgctaccttcggtcccgcgttgctgggccacaggactaacccactgccccgcagccgaggcgcagggtggagttggtatcacgctgttgagcaacggtaccaccgtcctcgttgtcggtcctgcagcttcacgccgcgccgattgacccacccatgtcttcgctccgtgggatgtgtatattttctcaattctctacgattatgtatgtataaaagcaaattcttaaaaatgaaatctatatcctcaatatttttttctaataactattacaattggatgggatcaatgg

SEQ ID NO: 24610 - DNA, 7341 bp, Oryza sativa
tgcatgtgcatattgatgaaaattctgcattgaaatttcgtaagatttgcatggtttttgacttggttttgatccggatcatgtcacatcatgtgcggtggcgacgcgccggcgcctgcatcaagtgtatctagctgaatgttaccagatctgtgcagctagctagctttggagactggtttacctttcagagtgcataatatatctccaagataagagtcagagaacatcaaagcaaaataaaagggataatatgtaatgtggtacaactgaattgtcgccctgtacttatcctggttgagtacccatttaacaaggataaacatctgactgttttatcatgtctgtcgcctggtgattgattagatcatctttaactccaaatacgtctgagtttttaacaggtccttcggcacagaatcaataattggttttctaccgtctaagtcaggtttgatttgttcatatgtcattatattaattgatcccttcgatcataaaaacatatcattttggacattgatatggtcttcggaatataactttatccacaaatttatacggcggaacattaaaaaacccaataaaattatagcattacggaagtcaaatgtcacatgtagttttcattcatccaatccaaatatttaatcaaaattttaaagtttgacttaaaacatatccaaaacaacatgccttcaagaccgaagggagtatgaaacttagaattacctagctaaactagcaccttgaaccgctgtccatggatgcagatgcaggttatacactttgagtcagaaaccatcggagcagaggaaaggcctgagataagcatttgacgtggaggtttattttaggtttgacaaattgacgtactacaaacaatcatgaatatcatatttgttgtttcattcaaaccatcagatgtgtaacacttaattatagtgtaatttttatcgcctcttttgaggaccttttggttatgtacgagagaaaaggtcgcctaaaagaaaaaggaaaactatacacagagtgaacagctgatagattcggctgtatgattttctttttctcccctccaaatatgaagaaaaggtcttctataaaagaaacaaaactacgcaaagtgaacggctgatagattcggctgtgtaatttttttcgctccaaattaaatatgaagaaaaggtcatggccggttgagccaaatgtgactaactacacactcttaactttattttagtttgttctctctgattcagtaactccaatttccgattaacaatattttttacttggctgcttcaagtgatctagaagcaatcaatcaagaatggtggagagaaaaattcagatgcagaaaaggtatctgctaatttcttccggtggcattacggtcatgaagcaaaagtaaccagcacaccaaattattctaaaatccaatatagtactatcagtctaattaattgatagaaggtgatgccactgttcaattaatataatgcacaattcaatgaaattattccatgcatattgaataagaaaataaatgaaggacaagggatcagtgtctttgtacatgttatgagtcactaacttaattatgggagatgcctatcaaatcccaagttaagagcaaaatgttggatttttcatatttgagctatatatacaaaagaaaggctgggcaagattatgcataaacaggtagtctaaaacaaaatggcatgtaacaaagcacaacttaacagctttatatcatgttagtttttttccaaacaaaatcataattacgtcatattagtcagtgaatagttagacaggaccaaataaaagtaaaaatacatttcaagtctctaacttagctagatgaattaaggatccaaaactaacgcaagaatgcagcatccttccctatgcacagtgactctgtagtcctatctgaaactccacatcatgacacatgaatatcattttggtacgaatccacatgatcaacccaataatgtatcaagctctctatctaataggctttcgcatgaatgctatgggcctcaaaatagtgtctttaattagatgctttctcctcttatacagctttctacatgcattattcttgcttggtgtaagaaggttatactgtatcttaagcaacatgcaaactctcatattcaattttcccctccaaataacctagaatcatataattagatggagtaactataagattgttgataatgcccatatgaagcacatccctaaatttgaagtttaatgaataattatctttttgcgaccatctatatactggtattgttctgtctagcatagctgtacacaatccttttgtattcacagagggaagctgtgaccgacataacatcaaattaattaaacacttcatttgagcaggaacagcgtgacctattacaaataaatcaacaattattttttccctttggtgagcacattaatttgatacatgtaatctaggcaatgaaagatttatagtgtatttttgtacagaattaatgaaagatttacagtgtattttgtacattcagatcataaacaaattaaagaactaaaagtaatcacaaaatctaattaactactaagaggagtgcaaattaaagcatgtgctcctcttagcaattaataataattaatagatcggtggatggatgtgatggtgatgaaatgatcaggaggggtaagaagccttaaggtgagcttgcaagcatggcgagtccttccaaaccctagcgttcgccctgagcatctccctcgccctcgccctggcgcgctcgccgccgtccgcctgcagcaccagcagcagcttcgccaccacgccgacggcgagcatctcctgcagcacggccggcgtcgccgcgttcctcgcgacggcgtggagcgcgcgcacggcgctctcggtggccgccggcgacacccgcatcgccctcttggacaccacggcgagccccgccgggtgcgccaccagctccgacctcccctccgcgcacccgcacaggtggtcgatcgccaccaccgccagctccgccgcgcgccgccgcccgccgccgccctcctcgtcgaggaggagctccaccagcgccgccaccgcgccggcctccaccgccttcacgcggttccgcccccacgggcacagccggcacagcacgtgcagcgccgccttcaccgccttcgacgacacgccgtcggacaccacccggaccacctcctccaccagctcggggctcaccgccatcagccgctccggcggcatcgccgacgtcaccgccttcaggaggaggatggcatacgcgcgcgaacggtagctcgggcggcggagcacggaggcgagggtgtcgaggaagccgacgccattgtccttgccgaggacgcggcgcagggtgggctcggacggcttgagggagtagagcacgcccagggcctcctcctccggcgagctcgtcgacatgggggaatcgatcaccgagtcgaacaggtcgtcgtcgtccgagctggctgaggtggaggcggcggcatggctctggacgacgacggagacgaggaactcgacggcgccgggcgtggcctcgacgcagcgcttgttgcggtcgctctcggcggcgatggccttgatctcccggagcgcggcgagctgccgctgcctgccgccgccgccgagcatcgtcgtcgtcccctcgtcgacgagcgcggcgacgcggcaggagtcgacgggcgggcgcggggtggggaacctctcgacggcgtgcgcggcgcaccacgcctggatgagccgccgcagcgtgtggttgggcgtcgcctcccgctccgccggcgccagctgccgccgcgtcaccgggcacgtccccttccccccgtcgccgccgccgccgccgaacatccaccgctcgatgctgctccggtcgtaggtgatccccgtcgccagcgtcaccgggtccctcatgatctccagcgagatcgggcacaggaagtaggacggcacctccgccgccgcctcctccatgctcgctactaccacgagacgagttcgagctcgagttgatcgcgaaggagagagatcgatgggaggaagaagaagaagaggagtttgagttgaagggaatgaattggcgggagaggggagaagcgcgttggttttatagggcgaagagacggaggcgcgaaaaagtccacgcgcgcgggtaaaaaaggagggagacgaccagggttggtattaatcaatttaatttaatttaattacggcgatgaacagtgagcgttaatttaaattaattaatgtcgtgccggtttttttttccccgtcgcttcaccatgccgtgttggtgtgaaatgtgccgacacgtacgaacgcgtatgtgccgtgggaaattggataggtggcgcgagtaattaattgtacctgtttaaactaaattagtaattactatagctgtttaaattaaattagtttcggtaaattgggtggtaaaaacgggtggttgtgtcgggtcggcgtcggacggctcgtccgcgctgaccgagtgaccggacagcggctcaacggtttggcttttaatggatcccttcctctcttcttcttcttcttcttgttttttttttaactactattctgcttcttcttctttgtctttttgcttggtcttttcttttcttctaatcgcttacccttgaaagattccgttcctagccgatcgaattggctctaatttgaaaattctgccctgtttaatggtattcatttctttcacacattttttaattccccctgtggctatttcggttacttttgtgtggtggagagaacaaccactactgccactacgaatataatttcatgcttatggttgatcacaactgactaagcttgagaaacgcgtattaccacttttagcccgaggaggtgttgtacgtagaaaatatttttacactatatattatggtataataagtagtaaaatgtttttataaaacaaattgacaaccatatcatgacactgctggagaaacggtttttactcccggttatagcaaccgggatgagccaatcgtagtcctagttgagagaaccggtacttaaagttacatagcaaatgaaaaatacatgtgggatgtgggtttaaattcaagatctctcacctcagtcctcacgcacgtaaccatctcatcagtcctcacgtacgtaaccatctcacctactacacacatctaacttgaatagagatgttgtccttttgaactaactctagagacatctttagtctgagttggtgttaatttttagttcgggttggtgttaccaaccgggactaaagatcattcatctttatctttagtctaggttagtgttaccatcctagactacaaatcaatttttagtcccggtaacatcaacctagactaaaatgttttgagggacttgaaacacttttagtactggttcttaatctaaccaggacaattgtgattttgggtaacatgggaaaatatcagttcgccactagtgtgatgatatctataacaataaattattttttttgagagggtgcaactcaggacgccacgaacacaaacgcacacatacgcgtgcgcgttcttaacacacgctagaattgagattggaggcacaaggctaccgggataaccgaaattgatcccggggaaacggggaaaaaatcccctagtgagacacgcgagttacgattccagggatcgaactcgcgtggctgcttgctcacctagcgacgctagccatccgagcgacgctcggttccctaataataaattattttaaatagaaagagttacatattgggatatgatatgatgttttacatattctgatgatatctagtgatatgtgcgttgtgtggtataaaatttaattattcttttttatttaagtgcagatcaaatttagacttgtatatttatgtgtaaacttatagcatcactgaatctatccactatctctcttttttaaaagaaaatgtctataactatttaaaccgcatgtaagtaatagtaggtgtaattacattcctctactattttaaaagtggagtaaactttcttttatctcctactattgtcactgcgaagcacatccataagctccgtgtgagtaaccactagatccaatgtttgttttgcacagtaagcatgacaaatctaagtccgtattattgttagtaacaaaaactaattgaaaccgctcgtgtacgtgggacagtgtaaaaacatacgcacacttacgtgaacaaattagcgggatgaatagaacagtattacggtccgtatatatcttcttgccatgaccaagagccgtaataccaaacagccgtactccatgtgtaacacgtgcggttatatatggaacagtacacccaataacttgcacgtgtcactgtcacaaaacaacgcatagcggcttttagcctgcttgtcctgacctgcaccaaattaaggcgcacacgttggatttggatagtagtaattgcgatgaatgtgcaagcatatcagcatatatacataggccctgcttagttcaaaataataaaagttttattattttagaacacatttttttctaaaatggatctaaatgctagtaacaaaagttagcaatttagcatttgtcatttgggagtctacaatagcaaattttgttaaaaagtgcgttgggagtcgtgctctccctctactaacaccaactagaaaaacttcaatgccaaatcttttgtcaaaaaaatttaccacatcaaatctatctattatatactaaaagtacatgaaacatcgtacaaacgcttctaataaacatgtggcattcctacaaacattactaggccgccacattttcctttaaaaattagcaccaattaaatttatatatcttttataaaaaaaggcccccatcgtaacatgcaatacgtacgtacgtcccgtgcaattcttgcacgctcgtaggtacggaaggtccgattcccctgcccggcctttctttttttttatttcatggatttattcttttaattgttaatatttatgtatttatgtctactatatactttttaaaaaaggtccattaaattttcttaaaatactcttaaatcataaatggcgctctaataaattagagataaatcctaaaaattcaacatctaagcatcgttttttacttaaaccgataaacccttaattttagaaattagattatattgatcataaaataaattagaaaaagtgctcttaagtctcaactctcctgatctctatatacatacgtgcatgcatatttgatcgatcccaaca

SEQ ID NO: 24611 - DNA, 7602 bp, Oryza sativa
tcaaattacaccggtttcaatattttggcgagttgttctatccggttttgtggttaaggggcacgaattagattcggccgacttttaagggagtcgaagtggaccttttccttcatgtatcttttcaaattcaccgtactaaggtgcatcgtacctgtaataggttggaaggagtatggtagtagcactagcagccccatcgttttgcttattcgtggaataagccaaacgacatatttgcaaacaggatgtaatttgtgagtaaaatgtttatatatattcttagcaatctaaaagcaaatgctgaaaaataaatttcgatgaaaaaccccaaaatcaattccaaattttaggtggataattcaaattttggctgatgcggcataagcataagcgaaaagacgagccctcctaataacgatccggctcagaccccaacagttcttaggcacacccactcggggaaaggtctaatctccctaaaaaactagtccaataggagaagggtggctctcccttttaaggtggcttcctcctcccaagctaagcaagtgggattattcagaggctcactcggtcgccgcctgacttttgcgtctttgtcagcgggtaatagtggagaatgttctcatcacctgctccatctgttttagcactaacatttctatcactccgggatgtgtatagcccgccatccgagtagagtactaagagcttattcagttccttatcattctcaaccatttcaaatactatctccttctccgtaatatgtttgacgttgactagttcaattttgtgctaaccaacatcaaagaaaaaaaaataaaggcagtaatttggtaagttagcaaattaaatatatcattaacaacacgaccttatctattttagctaattccatagctttctgctcacaaaactactgccaacatttgacaacactaccatcttcattttaccttatcaaaatttactaatgccaaaatttaggattatcaaagattaataaagttttgttcatcaataaagtgaaaaagccctatgaaagctaagagtatatcaggtttgagacgatttgtttggccaatcgatccagataatgttttccatatcttagtgcggatctcagtagttttcctctttttttttccttttgaaaaggcaagaaatttgccttgtcgatctatattgagcagatctcaataatgtcactgtggaatttgtgatcgtaacaagaggagaaaataattgcgactacaaattaatgtaattaactgtgagaaaaattaacgcaaggagaaggcgtcttgttgactttagcttaaacagtgtttagtccccattgaaccgccagtagtatattcgacgcgccaccatcgtggtgattttagcagataaaaaaaagaacacgataaaattaatttccatgctcctgcggctggtctattgcagggagcatcattcctcggatacagttgctgttgccttgttgggtacagttgttgtaccacctgagttttttttcagtttgtctcgtacagtactgtgatcatattcttgtgctagacagctagagcatgactctgctgccattcattgaattctaaatagaatttgaggtcgcctgagtcactttaattggttgactctttttcataattgctaaaattataagtacaagaatctatataaatttattaaaagccaaaagttaaaattcaatactattttggattaaaatctgaaacaaattcaagccatgcaaattcatatatctttgcttccgtgcaaaaaaaaagtataaacatcatttgagaatgtaaaaatttccaaaagttttactcacttttctccattttctggctgtgttttccccccttctttccaactctccttcatcttttttcgcgctcatacttttcaaactgctaaatggttacactatttacaaaattttttttatagaaaagttgttttaaaaaatcatattaatcaatttttaagtttttaggctaatacttaattaatcatgtgttaatggaaaacaccgttttccgtgtggggagttggagactcagcctttgatggcaatccaatgattcttgtcccttgtcccttttttttcttattatataaaaggtcgaacaacatatttaaatattcaaaaattacaaaattacataaaataaataaaatttacaaaaccacatgaaaaatattcaaacttagataaaaataaagtaaagacatatataacaacaaagctatagctaaaaagaagtaaaattgtgcattgcatactactgcgattttagcctcaggaatatgcaatttcaagtgactaggaatttacaaatttcgagacacttaaaatctagcaatacctttaaaatctatctatatctatcgatcaatctatgtacacgtcttagattttggaaaagaacatgagaggtagtagtggcctttaattattcataattgctatatatatattctctccttttagtaacagggcgcgggacctgattaaccaacattagcaatttcagatgaatagtactccatccgtttcacacggtaagttattttaacattttccacattcatattgatgctaatgaagataagtcattttaccatttttcacatttatattgatgctaataaagatttattagcatcaatataaatatgaaaaatgttagaatgacttacgttgtgaaacggatgaagtagcaatgaaaccgtgatagcagcacgcgtgcttgctgtcacggagcagcgacggcgcacggggtggttgggaaggtggttagaatttttatacatgaatcggatcggatggtcctggcctgctggattttgcatggagcagccacggatgcacagaccgattcgctgtaggttagtactactatagtactacgtgcttaaaggagaaacagaaaagatacataggatcacttttaaaagcgactgtttttgtcctatttgcccgttaatcctgctcgacagagctgttgcttattttgttaattttattggatttattgttaggattagttggaactagattcttttttatgttttggtagagaaaaagcctacaaagattgaattacggttgacacggtagcatgttctacgctaaaacatgccgagcacaccgtgtgcgctccactttggtgcataaggacgtgattctacaaatatattggaaacttgtcatcaacaaaccagaacttttggtatagataggtttcgtcgaacgctcatcttggaggaacatcatcaaggcaagtgtgtgctggtgtaccctaagggcagtagcagtgcagcgcacgtatagcgtgtctctgcccacctgaagcagcgaaaacagattcagagtcacgagcttcacaacgcaagcgcgaggaaatcacgtctccgctgtgatgcgagggaaccgcgactccggagcaacgaactccacagcacacgcgcccctcaagtttctgcgttgcgtgccctcgatgcgacgaaagaactcgcggtttagataagatgcgagtggctacgcaaaggcgcgagtgaaggtgacacgtccgcatgagtctgacctggtgcggtaaggcaactcgccaggtcaacgcattgtgaagggccttaggggttgtttggttggttgccacactttagttatgccacaattttttaggtatatgtttattttactaccgtaattgtgtcgtgccatactttcttagtcatgggacccacatgccatattcttaaatttggagctaagcatgccacacttgtggacaactatttccaagccacacttgtgccaacatacctcaactaggctaaacttagttatgtcaatgttaggcatcaaccaaacatcccatcacccaataaaacttagggcatatttgggagggggtggttctcgttgttgcattttttttccaaaatactcaaaacgatctagggtgaaaaaggttataataaactagaagccaggagttatgtatcaaccaactatttattaaaatcttaactttcctaaacaagaccttaaattgttatctttcatcgtagaactgaaaacaatttaggattagaaaaaaaaaagatgagagagaaataaataggtagaagtgatatattattatgatgattgggtatgaacggtttcaatcaggtttgacccccccccaaatatttgtatgaaggatgatcttgtttctatatatttttggtgggtctaaggataaagcagactactggttgcatgagccttggcgcccgtgcatcaccatcaattatttacgtagtactcgacaacttccttctctctcctccaccttagacttttctaccgtctataggttaatagatggctttggtaactttattgcacttgtcctaactgaaaccaaatttagttttttctatataagggtattattttactcggcatgtaaatccaattgaatatatgcatttttttaaatcaacttgaaatcaacttcagttgaagagctgaagatattagatacccaaacaggatgcttgtggaatggcatatagtagttagatgagccgtgagcggtaacaaaaattggaaaaatttggaaaccagccgacgcagcggcagcttacacgttgtctttcgctgacgatgatgtgttagtagtagcactgtagcagccaagcaggagcaggcaggagtagtagtgatcacggtgactcggaaacgcgccgcacaagccatcccaaaatctcctccaatttgcttggctttggaaaaaaacccaattaaattataccattattccataatcagcagcggtgacggcttggcttagcttaactttggctttagtactcatctcctactaagctcgtggacttttccttctctcgtcaacagcagcgcacctcacctccgccgctcgcctcgcctcgcctcgcctcgccttcctcctcccatcctcaccccgttgaatttctcccacctccgatttcttcttcctcgttgaaccattccccacccttcttctcctcctcatcctcctctccgcgccccgcctctgcggcgaggtaggtgttcgatcggtcggatggacgcgtcggatggccgcccgtcgccgcggagccggcagctgcagggcccgcgcccgccgcggctggccgtcagcaaggactcccacaaggtcaggaagccgcccgtcgtgccgcagccgcgcgggggcggcggggtggtggctgggccgtcgcggccgcagcagtcagcagcagccgcgggcgccggtcatcatctacgacgcctctcctaaggttattcacaccaggcccagcgagttcatggcgctcgtccagcgcctcactggccctggctccgccgccgtggcggcggtggctgctcccgtggccgctggcttccacaccgaggcgtcgtcgtcgtcgtccgcctccgcctccgcgctgccgccgcagttccagctgccgcaggagttcatgctctccccgaccgccgcgctctcccccgccgcgaggtacgccgccatcgagaggtccgaacggccgcttccccccaccaccgcgcactactacaccgccgacgccgacgaccccatcctgctcgacgtcgacggcgacgccgccgcctttgcggcggccctcggccccgcccgcccgagcatcctctccccggtgccctccgcgctgccgcccgcggcgtcgtcggggctcttctccccgctcgaccaggcctccctctcctggctcagcgacctcagccccttcctccactccgccggcgccgccgccgcacccccgccgccgttcgcgccgagcccccgcagcctgctgctgtccacgcccaccatgccgtcgccggcgaccttctccgtcatggaattcttcagcagcaacttcccggacctgtaaactaatcccagctcacctcatttgattactccctctcgcgtccgtgtcacccccggggttaattactttaatccttaattaatcttttaccgcgtgcgccggcgaggttaaaaagtaaaaaatcacattgccgcgccggtgaggtaacttccagcgaggcgggcgggttggcgagatggcacggtcgttcgattttttaatggaggaaaaagaaaacaatattctcagatattttctcctgtgggtgaggggaagttggcttggctaagctagcattaattgttggagtaggtgaatttctcttctcatacttgcttcctctcctactgttaatgtattgataatttgatattataatcagctttaggtaggctaacctctcgttggctttatttttcttcctctttttcttcttttcgttctgctgattgtgtaacttgtaaacgaaggagatgattgattggttgatttaatgctagtttcatttgttcattctttattaccctgagcccttcagacttggtcatgtatggttgagatgatttaattgccgatgattttacgtctcggtttaccgccggtgtctacctggctttttgtctggagaattctttggtacataaacatgtgtctgatcgatgcttaaatgttgaaagccttgttttgatggtaacaggaaaaaaataagcatcatgttttagaactagattagtataagagaaaataagctagacagatttcgattactacttgcgattctctagttttgaggcaactaaaatatttgaagatatatcaatcccttcaaaggtgatgtaccacaaaactattgatttaaaaataaatttatcataaaactatgtatttaaggtggagtatcgaaaaactatagatttattaacaaaattatcacaaaactatgaattttggagtttaaatccttagcgctagtgttatatttgagttataaatatctaagttttggtattaaattgatactaaacctatacttttgtgataactttgttactaaatttataattttacgatactctactttaaatctataggtctccgagaaatttattgttaaatttataattttgtgatacatcacatcaccttaaatatatagttttgtgataatttagtcaaagtatctgtagttttctgaaatttagtcttatttgttttatagaggggaaagttcattttatattcatgaactttcataaaagtctaaaaatcattccttaccttttaaatcagacaatatttatccccgaaatttcagtacattcacttttcattctatcaccagattcaaagtgattttggatgacatgtaatacatattatcttttgcgagctatataaaaaataattggctggtggaaaaataattctatagtactccctccgtttcataatgtaagccattctagcatttcccatattcatattgatgttaatgaatctagatagatatatatgtctagattcattaatatcaatatgaatgtggaaaatgttagaatgacttacattgtgacaacggatgaaagtactgttgttagccccttttttctaaaggaaaaaaaaccatactacctctattttttaatagatgacaccattgacttttggtacacg

SEQ ID NO: 24612 - DNA, 3298 bp, Oryza sativa
aagatggagcagttttatgaaggattggatggtccacctctccgagtccttccaataggtggccttggagaaatcggcatgaattgcatgctcgtagggaactatgaccgttacatattgatagatgcaggggtcatgtttccagagtatgtattctgtttctgttgcttgctgctgcttacattactgtttgattcacatcttttttgtctgtaattttcatgtgtctatttgcaactttgcattttgtgaatagcgtttattttggcaaaacatgtatacaagtgaggactttgatagataactgctcacttattcttctacactgtggcatgatcatgatcgcttggcatttatagactttgatagagttcctgcacacattttcctgtctacgtgtatgctaatttgtttttcctgtctactgctatattttgactgaagtgaattcaatttaaacttgtgtcagctttgatgagttcggtgtgcaaaagattatcccagacacaacattcatcaagaaatggagtcacaaaatcgaagctgttattataacgcatggccatgaagatcacatcggtgcgttgccctgggtaaatgattcttctgttactcatacatcattcatcgttactgcttggctatgactgcacaacaaatgccaaaaaggcttcggtcacatgcaactaacaacctctacagctatttgagacacaaatgattgtgcagaagatggtagcagagtgccatactgtaaattttaacaacatgagtcaactgctgcaaaaaagtcagaaaaaagataactgatttgaaggatataaccttgttcttgtgtcaaagctaacattctctaaaactcaaagctctcagcatatctaagtcagtaacaagaaactttcttcatttaaacttattggggctcatgaaagatgcattcatttctctctaacaagatacgcgttcattcttatgttttccattgtatttgctgtccacaggtaatcccagcgctggattcaagcacaccgattttcgcatcatcttttaccatggaggtaacagtcagttcttttgactatgcatgttctgcattgttggccgttattattacatataatttgtttcgttaatcttcagcagtactaagatgtagtttttcatatttggcagctaataaagaggcgtttgaaggagtttggaatttttctctcgtccaggcttaaggtttttagagtaaggaagagatttcaggctgggccatttgaggtggagcccctccgtgtaactcattcaattccggactgctgtggcttagtgcttcgttgtgctgatggcataattttccatactggtgactggaaagtaagttatataaggaatgattgcatactcaatttctttaattttggtgccccttttaactaatttttcaataaaagattgacgaatcaccagtggatggaaaaatatttgatcggcaagcattggaagagctctccaaagaaggcgttacacttgtaagtttatacaatatcagccatgcatccggaccagtacttttcaatggtttaagttattgtcctacgttgcaccttatactccccccatccatgaatgttgtcactcacttttgttcacaaaatacttgatatttcatgtttcccagtgcatgtttttccgttttctatttttttttctctctttttcgttgtcctttatcacatatttggtgggtccataatttattggttagtttggaagggcattatgggcatatcatataaattcaaatggtttcctatgtgtgccatggtcagaagtgacaaataaacgtggacgaagagagtaccatgtaggacggaaagaaatgatgatgcagtgtcacatattaaaagaaactattgtcagatcacttctgtactggcacgccgagctatttgttgatatgttgctaacattatttctcttctctttctggttatttttgatgcaagatgatgagtgattctacaaatgttctatcccctggaaggtccatcagcgaatctgttgttgctggttcattgttgcgacatatttcagaagcaaaaggaagagtaattaccacacagtttgcttccaatatacatcgtattgggagcatcaaagctgctgcagacttaactggtcgaaagctggtagaaattgcttcaacatatagtgcaactctaccttgtcttgtttgacttggatgatgtttttaatagtttgtacttttgataaactggaacaggtatttgttggaatgtcactcaggacttaccttgatgctgctttcagggatggaaagtcaccgattgatccatcaaccttggtatgcaataatattattagagttattcaatagtctttgtgtggaattgctacactattttgttgtaattggaacttaatgatgcaatatatggaacaatgtcttttactgtcctggtgatctatgcaattggcatcgagataagcacatccttaacaatttgtttccattaccatttttatagctatcgacattgcatctcaacatctttatagcttctaaatattaacttgtttggctctcctgggtgctacttgcagcagttctgacaaaccgtagagtaatttgatgcttgattgtattcttcccggttaattgccacatgtatgccttgacctatactttttcgtatctcttaataaatttatctggtggttctgatatatttgtcttggacaaggtgcacttaatagaatctaggttcttgctgaaggtacttgagcttatggaaacagtaatatatggtgaaacagctataatatcagaaaatgctctgagtcttctttagatgtcttaactcttaatgattgtgagtagtgctgtaatgcactagtttgagagttgagttatttttccgtatcactctgttggtatgacgtgtgatgatatcacggaatgtagtcctccttatttcatagtagtcgttctgcaggttaaggtagaggacatggatgcctatgccccaaatgatcttctagttgttactacaggttcacaagtaagtcttacagcctaagagatctacaattttcagtagcccatgcaccaccttataattctttcaaatattttcaggcagagccacgtgcagctctaaatcttgcatcttttggaggaagtcatgcccttaactatccaaagaggatgtccttctgtattctgctaaggtacttcatcattgtcattgtcatcatctcttcacttctattgaccttgatacat

SEQ ID NO: 24613 - DNA, 38247 bp, Oryza sativa
cttctactatcctgaatctccttgttaaatactctctagctctcgcctgacatgagctgacatggcatgccattttttcactatttccaggaggaagtcctacagattgtcaaaccacagcatttcttgcctgttcatggagaactcctgtttcttaaagaacatgaattacttggaagatctactggcataaggcacaccactgtaagtactctcttagcgatggtttagatatcatgggcaatggatttctgtaataagggggagactacttatcagtttaagtctttgaaggttatggtattttgaacaaacaaaatttatgtagtgtttgcttttcctccatgccccttgtaatcttaaattacttgcgtaaacaaaaggatttaattattattcactttaaactgtaaactggttggagctccgtttctctactctttgagcttcttacaatatttgttcatgcatctatctgcaaatgaattagcacttaactactgaagtatctatctgcaaatgaatttgttttttccttagttatttgtaaacatttgtgctcgggtcaggattccaagtatcagcattccatcatatgtattttttagccaaatgtaaaaactatttggtacttgttattgttcttagattgcttgcttcaatctcaggtaattaaaaatggagagatgcttggcgtgtcacatttaagaaacagaagagttttgtctaatgggtttgttgcattagggaaggaagatttgcgggtgaggatctattttgtccattccctttttcttttcttttttttggcttcacctactctaaatctaacatgatgcactgtatattgtagctaatgtatagtgatggcgataaagcttttggaacatccactgatctctgcattgatgagagattaaggattgcatctgatggcgttatttttgtcaggtaatattaaacaattttggtgcatttgctatggtgtttatcttcagtaaaaatctcctctgggatcaaatgagagaacaaattatattaacatgctgctcttgtgaaaacggcaaaatcatatatggtgattgttaacacttatcttgtttcttgcagcatggaaatcttccgacctcagaaggaacttgcttcatcacagtcaggattgaaagggaagttcaaaataacaacaagatgcctatggcttgataatggaagactattagatgcactttacaaagctgcatatgctgcattatcaagttgtccagtgaattgtccacttagtcacatggagaggatggtatctgaaatcttgaggaaaatggtaaggaagtatagtgggaagaggcctgatgtcattgcggttgctacagagaacacaacagtgagttttgtagaagactcagaaactaaatcatctggaaagtttggatctttctcagctcctaggcattcgagcaggagttcaggtaggagtcttgaagaaagtgataaatcatgcccagagaatacagagggagaggctaaaggtactattcgcaaagtatcttaatcttacctttgaaaatgtggcggtctaaccctatattattatctgtattaagtgtcccatcatactgattttcttgttcactgttcagattcatgaaattctgtgcatttgattccatgccttttgtgctgtctaagatgtatcgacactgtcgttactttgttacacagaaaatcttcctgatgtcctgagaacaacacgtgatgatgcaaccacaagctccaatggcgaagcatttttctcctcagatttgcataagcctaaaacactagagcatttttgggactcattcaaatcccctacagctgtaaaaattgcaagaattgtcaatggttcagctcaagggagtaaatcaaagattggcaagatcagcatagtgggtaaggactctagcgatccttcttctgctccagttaaatcttcaaaaaagaacaagtggaagcctgaggaaattaagagcttaattcagatgcgtggcgaaatgaatgagcaatttcagactgtgaaagggagaatggttctgtgggaagagatatcttctagcatgttgagccaggggataagtcgtacaccagcacagtgcaagtctctatggacatcattggttcagaaatatgaggtagatcattgacgtccttacagttttggcataaattcagtttatcttttttattgcgaggaaataattaagtttgacttgttttcccatcttgtggtatagcttcccaaatgcagatataataccacatatataagctatatgatgcataaggaaaaatagtcaaattatgtaatttctatagcttatctggttatatgtgcatcatatagcttatatatgtggtattatatctgcatcatgtactgcacaaacgtagcagctgacattgcatttgttagtcagaagcagcataataggataagcttaacccttcagtttttatttgtttggcaggagagcaagaaagatgaggaaagcgtaaagacgtggccgtatttcttggacatggacagggttttatcaagccaaggggaaatggcaacccaatgatcccaaggccgtagtttagtggttgtaattttggagagtgatggcataatcaatcaagtggcaggatgagatggctgcagcgtgttcttctccagagaatatacatgccataattcattccacgaaaagggaggcaggcacttggaatgactaagctgctacgtattcaccatgagtgtgctacagggctagggatagctgatattatttgatcaactatactagattaagtaattgaatagctaagttttgttgtgctattatttttggtgtaagaagacaccaaatgctaatccgaaggctttcaattgagctacccacatgcctatgcgtgtaaattaacatgtttgattgtgggacgtgatagggtggttagagcgaacgcatttatcaggtgttgtagtttgagggtaagtgggatgagattattctttaaaaaggaatattcatttaagatctaggttagctctataccttaaaaattaaggcccttttgattcaaagaaaaatcatagcaatttttaagaatttcattcctatagtatttttttttctatatagccctttgaataaaaaaatgaatcatatgaaatttctatggaatatcttattctatgcaagttttggaggaaatttaatacgaggtagaacatcatgggaagtttcctttgagtttttatctccttaatttttgtgtttttctcgtggtccaatcaaacagtcgtttctatgtttttcttatgttttgcaattctatattttagacttgcattcatattagaatcctatattttttttctatttcttcgtatttctattcctatgatttaaagggagcccaatggactaatccaatcgctccgatattgatatgtgggctatgtcatcctctaaaaaagcatatcatctctcacgtcaaatctatctttctaaagttggttcgtctcaagctatcttattgggtcatatggtaatgttaaatttttagataaatctaaggaaattatgcataaggaaaaatagtcaaattatgtaatttctatagacttctcaattatctgtcttcagacaaatctagagaatatccataaaaaaaataccgagaagcaaacaaaatgcacatcatccagattctggaggcttcccaatatccctttgcaatctatctatctatctcatgttgttggttggttttatgctagatgattagttgccctcaccatcctttagttgaccttgtcttcagataaatctagagaatatccataaaaaaagaaataccgagaagcaaacaaaatacacatcatccagattctagaggcttcccaatatccctttgcaatctatctatctatctcatgttggttggctcccaatatccctttgcaatctatctatctatctcatgttggttgggtttatgctagatgattagttgccctcgccatcctttagttgaccgacacatggtaagatataagcggcagaaagagcgttgggtaagaaaccatcactataaaactggcaagcacacaagttatgatggtgaattaaaaaaaagaagagtcactccatgtgcgtagctaggccacgcaacaccacaatccaacagtgcgtgatcgaactaagtgcaaacacgtaaaagaggggaaaaaggaaaaaaagatgaagcaaaacttttttgtaaaattatttgtaaattattcggggcaagtatcatgaccacatatcctatatttcgagaaattaaaaagataaatagaaaaataaatgacagaaactttttaatcccgataacctaaccattttctaaatatatatattttctgcttatactataaaataaataatatgcaaatcttttaacttttagaaaaagttataattccaataaaacaaacaatatcggtgttgatccatatctagagtcttaaaagtcatacacataggttaattagcggaagcgccaggcgttgcgttgattttcagttattcaaaaccacgcacattttactgcatctcacttcaaaatttttcgaaaaaaatccactcggcctgttataagcgtctgcattagccatatgtgtctctaaatcaaaaagaaaaataatttataccaatatattaagaagctcctccaataaataagaaatgactaaatcgatttctgataatcccaatattctttcctcttcatgggcatcctgcgaagaaaaatgtttagttttagacataattagttttatgggactagatgtcaaagttttgtagttagaattggaagaagcattgttaaggtaaactgaaccgacttatgctaaataacatttagctagctaattaactaagcaaaaatacttaaataatttaacaagcaaatttgagatgtacacttactcgtgaacccgtggactcatgctgctttatatgccttgaaaaaaaattagcaatcacggtttggttcaaaaggaagtccctcaccagtgttgatagctccaccctcattactcattataagaatccacatcattgttcacccaaacaacttatttaagaccgggaggtcggacataacattcacccaaacaacttatttaagaacaagaggtcggacaaagcatgcatcgcatgttcatcacaatttgcatgcttaacctctgcagtaatggaataagtgttgcactgttggtcttcttatgctgcagatggaataagtgttgcactgttggtcttcttgtgctgattggtctttgtatttttttccttttcagcttctaggacaggactattttgggatgattatgggacatcatctcctttcagtttgggatacttacatgacaacatctcctttcagtttgggataggacatcatctccttttattgtaggatgcgctaggacatccttgggaagaagggatgggttgcaaggggtagtgctggagatgctgtgaagttagaggatggggaaacagatgttaaggtctatggttgggttgcccgagaaggggactataatgccgggaatgtggtgggcaggtacttgaggaagcataccaacctgacaaccatatatgaggtctccaagagtcaatcagagaagtcggggaagatggtagcgaaacatctcctttttcactttttggactagcaacacacctataaatatgtatcctatcccgggtttgggatatttgtaggacatcatctccttttagttctaagatgtgctaggacagcatctccatttttactttttggactagcaacacagctataaatatgtatcctatccctcgggatggtatgatattcgtgagaaaataaatagaaaatgccgcaacactcccaatgtcatcctctcgataagagtaaggattctgctactaacaagtggtatttgagccgttctatactgtagcctgatatctcctgctcatatccttcccaagctcccctctattctcagccggcagtaggaacaccagctgttcctgctcatccctctttccctgcgttgacgagttgtgctcgtcagaggcagtctcttccccacgcagtagccccccagtggcgtgccatgtccgcaggacagtctcagcgctcggttgtctcgagcgcgcggctccggcaggatgccgagctcaccgcggcagaggaacgcgagcgagtggcggcaaagaccgctgcgatgacagcgagggcatcaaggctggcggcggcggaattggcagtggcaagggcggaagtggaagcagcagcggcaacggatgcagcgcgtgcagcggcggcggagctcaaggctctacgcggcagtagcaccagcagctctgtctccgcctacggcagcaccgatgatgagctgatgagggaggcagctcgtgagcaggcagagcagtgggctgccgcgcaaccccacgcgcgtggcggcagcagcccagataggcgcggacacgccggcggcgctcctggcggggggcacgcggcagcggcagcctcttcccagtcttagcgctcggtcacctcgagcgcgcggtttcggcaggaggccgagcttgccatggcagaggaacgcgagcgagcggcggcagagaccgctgcgacggcagcgagggcgccaaggctggtggcggcggaattggcagtggcaagggcggaagtggaagcaacaacggcgatggatgcaacacgtgtagcggcggcagagctcaaggctctacgtgacagtagcaccagcagctctatcaccgtctaaagcaacaccgatgatgagctgacaagggaggcagctcgtgagcgggcggagcgtgcaaccccatgcgcgcggtggcgacagcatagacaggcatggacgcgccaacggaccccctggcgggggcgcgcataatggcgacgctcctggtggcaacggctgggtcgatggagatcgtggctgttgcaggcggcgcgactctctctcacgggatccaggccgtcaacagggacgtcagtcccggcagtgggtggcctactctcaccaagaccaactacgtcaagtgggctgcggtgatgaggataaggatccaggtgcggcacacgtgggaggcagttcggtacaacgacatcgactacgacgaggattggcgagcgctggatgccctcatcgctgcagtcccgctcgagatgtagttctcgctttccaggaagcggactgccaaggaggcctgggacgccatcgctgcggcacacatcggcagcgaccgcgctcgcaagtccacactacaggcgcttcgcaaggagtgggagaacctggccttcaagccaggtgaggacgctgatgacttttccctccgtctcaatactctgctgcagaagatggtgcagtacgacggcgacaactacgacgaggagagagtagtcgagaatattttccgttgcgtcctagagaagtacaagtagatcgctcgctcgatcgagtctttgctggacctctccacgatgtcgatcgaggaggcgataggtcgcctcaagttcgtcgacagcgatgagccacaacctttctcggggcataccaccattggcgggaagctccatctcactcaggagcagtgggaggcctgtcaggatgacgagaggaagggggagtcctcttcctcgacaggcggccgtaagcagcgcaaggcgcacggaggtgtccagctgcagtgggcgcgaagacgcgtcgagggtggcgcttgcagaggcgcccagggcggcgccgctggcaaccacaagctggcacgagacgacgcctgccgcaactgtggcaagcttggccattgggccaaatactgtcgacagccgacgcggccaggcccacgttgcacaggtggaagaggaagagccggctctactcttggcacacgcaagcatcgagctacctccagcggcatcggccgcagcggctctcctccaccttgatgagccgaaggcacatgccttcctcggagatggctctagcaacgacaagactgatgggtggtacctcgacaccggcgccacccatcacatgactggcctacaagagttcttcaccaagtttgactccagcgtccgaggctccgtcaagtttagggatgcctctggcgtggagatcaagggtgtcggttccgtcaccttcaccgccaagtccggtgagcacaggctgctcactggagtctactacttccccccattaaagaactcaatcatcagcgtgggacagctggatgagaatggttcacgcgtgttggtcgagcatggagtcatgagtatttgggatcgccgccgttgtcttcttgccaaggtaatcagaggcaccaatagattctacatcctcagcgtgtaggtggcacaaccggtttgccaagccacccattgggacgacgaggagtggcagtggcacgagcgcttcgggcagctccacttcgaggctctgaagcagctcagtgccaaggagatggtacacgcatggacgacgacgttactacctgctgctcgtcgacgacctctcccactacatgtggttgatggttctcgtggcagcaagggagaggctgcggacgccatcaggcgcgcacaggctgctacggaggcggagtgcggccgcaagttgcgcgtgttgcgcatcgacaatggcagtgaattcacggcggctgaattcgcgtcgtactgcgctgatgagggcattcaacgccactactccgcgccgtacagcctgcagtagaacggcgtcgtcgagcggcacaaccagacggttgtggggatggctcgggctctcctcaagcagagagagatgctggccgtcttctggaagaggtggtggtgatggctgtctacatcctcaaccgctcgcataccaaggccctcaacgacaggacacgtacgaggcttcgcattgtcgcaagccggcagtctcccacctgcgggtcttcggctgcctcatgtttgccaaggagcacgaccacatcggcaagctcgatgacaggagcaccccaggggtgttcatcggctatgcggagggctcgaaggcctaccgcattctcgacccggagacacagcgtgtgcgcacggcgtagtgttcgactaagggcgagggtgggcatgggacaaggcggtggacgatggctcgactctgacgtacgacgatttcactgtcgagtacgtccacttcgagggagctggggagtaggcagctgttcctcctcaccaagcatacctaccccagtccccgagtttccaccgactccggcagcaacacactctcaagctacgacttcagttgcgacgagttcttcaccgacaccaccacaatcagctaccccacgcactccagcaccaacaaccaccctaatgggcacgtccactcccatgccagctcgtgttgagcatagcccggtagagttcactacttcgctcttccacaacaaggagcaaatcgacacgtaccacgatggcgagccgctgcggtaccgtacgatggaggaccttctcggcgaccagccggtgccgggactggtgcctcgtgacctagaggcgcaattgcaccttgtgtgcaatgatagtgagcctcggtcattcgtagaggccttgagacacgcggcatggtgtgccgcgatgcagtcggagatggacgcgattgaggagaaccgcacctgggagctttctgacctctctcgtggtcaccgcgcgatcacccttaattgggtgttcaagctgaagagggatgaagccggagccattgtcaagcacaaggctcacttggtggcacgcggtttcgtgtagcgggaggggatcgacttcgacaatgccttcgcccttgtggcacggatggaatccgtgtgactcctccttgcgctggctgctcaggaaggccggtgtgttcatcacatggacgtcaagtcggcgtttctaaatggcgatttgaaggaggaggtctacgtgcaccagccgctgggatttgcgatccccagcaaggagggcaaggtgctacgcctgcacaaggccctctatggcttgcggcaggcaccgagggtgtggaatgccaagctggattccatgctcaaggggatgggcttcgagcaaagcccgcacgaggcggccatctaccgatggggcaatggtggaaatgccctgctggtgggtgtctatgtcgacgacgtggtgatcaccggcaccaaggatgcgtaggtggcgttgttcaaggaagagatcaaggccaccttccagatgagtgacctagggcctctctccttctacctagggatcgaggtgcaccaggacgactccgggatcatgcttcgacagaccgtctacgccaagcgcgtcgttgagctggctgggctcaccgattgcaacccagctctcactctgatggaggagagactgtagctgagccgcgacagcacgacggaggaggtggacgctacgaagtaccgacgtcttgtgtggatccttcgttacctcacccacatacggccagacttggcattctccgtcggctatgttagtcagttcatgcaacgaccgacaacgaagcaccagcaggctatgaaaaggatcatctgctacgttgtggggactctcgaccacagtctctactacccgaaatgtcctggaaaggcacacttcgtcgggtacagcgacaatgaccacgccggcgatatcgacactagcaagagcacgaataggatgctctttttcctcagcgagtgcctcgttagttggcagtcagtcaagcagcaggtggtggccttgtccagctgcgaagccgagtacatagaggcctccaccgcttcaacctaggtgctctagcttgcttgactgcttggtgatctccttggcagagagactagagcggtggagctcagggtggacagcaagtctgctctggccctggcaaggaaccccgtttttcacgaacggagcaagcacatctgggtgaggtaccacttcatccgaggctgcttggaggaagggagcatcaaggcgagctacatcaacaccaaagaccagcttgcggacctgcgcaccaagccccttgggaggatcaagttcctcgagctttgctccaggattaggatggcccaactttcctacaagacgatgcataagacttagggggagaatggtagaataagtcttgtgcggttggtcttcttgtgctgattggtctttgtgttcttttggtttttagcttttaggataggactagcatatttcagtttgggatgcttgtaggacaatatctcctttcagtttaggatgtttttaggatagcatctcctttcagttttaggatgcctaggacaacatctcctttttcaccttttaactagcaagaaatatgtatcatatccccttgggatagtatagcattcgtgaaaaaataaacagaaaattgctccagctcttccagtgccatcctctcgatgagagttctcttccagcgccatcctctcgatgagagtaaggattctgctactaacatgcatgaacattggtctgccccatgtcaccagtactggtttccttactttttcccttggtcaattttatccttgatgtttttcctaccattttttgtatcgttttgccttctcttttttctccgttgtgcttgctgttgcaagtacatgattgtcctgtctagattgcaagatacaacgtaaaatgaaagccgcatatttccccaaggttttcaggatttgatggagattatctaaaactgcagagcggatcaacggatgttttaaagcaaagtaagcaatcaacaacttctgaaacttctttactgttaaatattatatcccaacaatcagcgtcccatgagagaatcgccctgatgcttaaagaaggctgggaacatcccatcacacttaaacattggtagaatattcttcgagaccactacaagatccttcaacaaaatcttgacgctgcattttggataaaatggccttattatttcaacaatataatttttagaacataccgtaacatgtacgctagtatatgatgaaatgggataaatcttctttgcagtactgccctccgacttggtcaaacagtagtgtagtgtgtagaggatttgtttatgatggaaccatcttatactaaaaaaattaggatgagccttaaccaatctcacctcatctccaaatcacagccaattgatattgcctaaacgaagaaaacgattaaacccgataaccttacgagcgaaacattttgactttatcatatatatctatctacctattatattattaaaacaactttgaaaggagacaccacgttcgctgcgggaactataaattctcacattaatcagaaaaaagaaaaaatattaaccgttagatcctaataagtctagattttaatggttgagattcaatatgagtccgtacaaaagttctgaaaaattgcagtccgtttagctaaagcacaaggaaaaagttgcagtccttcaaccatcggtgcattacagctggactatgcatcagatatggattgaagtatgtatggcatcaacaacaccatgaatgagatcctatttgcaaactgacacaaatcaaaatcagaatagcaccatgggagacaccaataaatactacccacatatgattctgtcactcggttggtgactaataataattcaattcggaatacaatattcaaaataaaaataaggccagctgaaaaaaaaatacaccatgtagaatataacacgaggttaattaaaacttagaataaaaataaaataaattctaaaattaaatttcaatactaattccaaagaaacttaaaaaatcattaaaatacgaaataaaattataataaaaactcaatctagatgctataaattcccatactcatcggagaaaaaaataaaaagaattcatgtaggtatacaattatcaataattaaaatccaaaataaaataataataataataatttgaaagaagagaccatctagaatataaacgatgttacttaaaatttagaataaaaaataaagtaaattccaaagttatttctcaatatgattttcagataaacttaaaaatatcattaaaatttgaaacaaaaatagactataaaattaaataagtaaaaaccacatgcaagaagagtccatagaaaaatacagcctataaatatccaaaagtaagagtaattaaaattcagaaaaaaatataataaattcctaaattaattttcaatactaaatcggtataaactttaaaaatatcatgaaaaatcggataaagtaggaatataatttcgaagtaaccaaagttggcaatacaatgttgttgcaatatgatatatgtgccctaaatgaaaccaccaaattttattttggatatctagaaaataccacatttacttatcgtaccattcaagccttttttcatgcttttcccgaaggtctggagaaagtagtaatcaataggacttcccttatcctcccttcctaaaaggaagaacttgaaattcttttttcctttccgcagggaccgggaggttggatctatccataagaggaatgcttggtataaataagacacttcttggtctttgacccccctaagtcactacgagcgccctagatgagtgcaatgggatgtggctatttatctatctcttgagtcaaaatggaagcagggcaggattaaaaaggatcttagagtgtctagggttgggccaggagggtctcttaacgcctggtaactttaaaaatatcatgaaaagtcggataaagtaggaatataatctcgaagtaaccaaagttggaaatacaatgttgttgcaatatgatatatgggtcctaaatgaaaccaccaatttttattttggatatatagaaaataccacatttattgaaggaaaaaaatgaaaaggctacaccatctgactgtagattaagaaaagaaaacaaatgaagaattatagaagaacttctagatgtatatatgttcaatttttattacaaaataaaaaaatataggattgacatttaaaaagggcatctcgactttagaaacgttttctgtaaggctgctggatggcaagctgctcaagtgaccaataatgagagctacgagagccagagagctacgagtaaggcaagggatacggtggtggcaatagttgtgggacttctaacgtaatcacatcgacgataagttccaatcttctttggcgccgacgacaaggaagaagagagattgcatgtgctaacgagtggataggcgataaagggacagtgaggtggttattgctatgggagagcgagccgagaggcaacaaataagtaaaatggtagtggtggcatctaaaaagaataaaaatgagcccgatgatgataaaattcaatgttataaagtgttgatgacaacaaagttgacggggcaaaatggcgggccacaatggaacaaggaaacaacggttgttgtgggagagcgaaccaaggggtgacagatgacaataaagaagggggcaacaggcaggccgtaaagaagtagggtggcagcagctgataagacatctaaaaagtataaaatagaaactcaaagatagatatgtttgatttttagaatcccaataataataaagagttggggcagcggacataccataaagtagtagggtcgcagcgattgataggaattctagaaagtgaaaaagagcacaacaatagtcaagttcgatttttaaaatcctaatgacaataaagagtagagacgacaacggataggttggaaaggagggtggcggcatttcacggaacttctaaaacttattaaaatggaatccggcgagacaacaaaatctaaaaagaataagatccaatttttaaaggcatcaaggatgatgaatagaaattatgacgggtcgagcaagtaagtaaaagcgtggcaaatgactaaagagggtgacagttggtatgacttttaaaaactataaaattgaaaacatgagaataataaggtttaattttaattttaagaatcccaatgtcgataaagagtaagtgtggtgggtaggtcataaaggtataggttcatagtggttgactagactactatgataataaagaggggaggggcaataagcggacagtaaaggagcatggtgacgacatttaattggacttttaaaaattataaatacaaaacctggcaagacaacaaaaactcgttgattatggggttcaacttttataaagtcctcagacaatgatattattatttaatagttcttaaagaaaattatgtgtaaaaagattaaaaaattttatctagatactagccgcgtaattgcgcgggccaccctcctgctagttcctttaacaagaaacaaccattctccctttctttcttccctcactttggcgaaatatttctaactttatggagtaccatattcctttccttcttacagttcatactagtctcttcttccctgctaccaatctacctattccgctttggcactttgccaaaattactattctccacgcacgcatgcatgcagctcgatagctcatcactagccaagcaagcttgccagctgccagcagcagctgagagtcaatggcgacatctcgccggcttacaggctacagcctgaccggcaggccgtagttgtggaaggccctgatggcgccgccgcggctgccggtcaccaccaccatgttccacgccgccggaacctgggaccggcagtcgtccatcccggcgcagttcacgtacctcagcgacggcagcagcctctcctccggccacgtcgtagccgccgccgccgccgccccgtcgggcacgacgaaccacgtgccgaacgagcaccgctcccggtcgtagcacagcgtcggcgcgtccgctccgccgccgccgccgcccatcgccctcgcccacggcgccaccgccgtgacgccctcggagaagaagagctcgcgcgagctcaccaccctccgccgcctgccgccgccgtcgaagttccagatgcggatcttggagtccctccccgccgatatcaggtacctgccgtcgggcgtcagcgacggaggcaccaacaccttggacctccattgtcctggaaatataataaatgcttgattttttgaatattccaaaacatgatgacatatactctccctgttctagattataagtcactttgattttgctcaaggttaaactgccccaagtttgattaagtttgtagaaaaaatagtaatactttcaaccaaacgtaaaaatatattatgaaaatatattcaattatagatttagtgaaactaatttggtgttgtaaatattattattatatttgtctctaaactaggacaaacttaaagtaatttgactttgaccaaaatcaaaacgacttataatctgaaactcaaacggatggagtactatggccctgtttgggggagcttctcccagctgcttctgctataagctgccctaaacagtccacagcttctgagaatttgtagttacagattctaaaaaatgaactaagaagccagaagctggagaagctgggtttcagagcttttccagattctcataagctggctaccaaacagctgcttctcaaaatttaaagctccctcaaacagggcctatatatatcaagtgaaaaccgcttatgaaattttgaggagatttgttttcatacaatagaatggtgaaagagactgaaatgaagtcttttataccttgaaacttttgggtgatcttatgaccttcagagactcggattttgtgatctttcgatgtgattatcatcctagatggatggccctgagagaactgcatgagagatgacaataataatcaattggccggtattcgtgtagcaggctaaaatcataaactatatatatatgcatgggatgaaaaaaaaatttaagcaactaacctgaatattggtaatcttgttggcagcacaccgtctccgctttatgcgcatcagtttgttcctttcaatgtttcgacctaatgggaaaagacctattgggaaagaaaaataataatgtacaatgcttagttaataacaacattattccctccttgtccttaaaatgagaaatatctgaaggatcagaaaaataaaaataaaatgcagtcatatataccagattgatcatagaagcggcatctccctttgacagaaccgacaacgaaaccctgacaagggtaaaatgcaagaatcagcagctagttactgggaaataaaattcaatgacattttgataatcaatttttgaaaaaaatagcattttgataaagcatgaacctttccatctggtcggtgacttatagctgttatgatgtattttgtgtcatcccaatcaactactcgcttgtctgaaacatcccaaacacgaactttgccatctattgagccactgatgaagtacctttcatcaactggattgaattgaacacatgtaactgttgacaagaaaagaatatcaggtcaacatcattaagttgaatctactacataaggaaagaaaaattaggaaaaaatattttgtgggcaattaacttttttaggaaaaggaatatatttattccggcctcttcataagccatggactaaaccattcattattacaaagaagtatttccagtttaaaataaagaatgctagcaaaataacacgttcccagaatttgagctttgaataaaaacgcttaagcacaaagcctgtttgatatttccatcaccatagttaactgctatgggatgtttgcacataccataatctccatgtctgaatactgcaaggcagtcataacagccaactttccacatgcgtattgtcgtgtctttcgatgaactcaagagaaactgcaggaggtatatactactagatcagttcataccaaatttaacattacacttctcacaaaaaaaatacacttcaatcatttaaatatccaaactacatgagacagaagacttacatctgactttgaccatgccaaatccaggacatcacttgtatggccttgaaactcatgcagaggtgtctctgtgatactgaaaaccttctttggtatgatcgcgaggggcttaattttcacgtccttcttcttgttcatgtcttcaggaacatctctgccgtacaaatcaggcgaagattcaacctctgtgatctgccaaacgcgcacgacgcaatcctcgccgccactggctagatgccacccggatgaactgaacttcatcaccctgatcaatccctcgtgtgcctggatctcctggcacatgtagacggcagtgaagtccatccacttcttgttctgctgatgaacttttgtcctgtacaatgtgcctgagttcaatcctcttggttggacatgtacatcatccatggaaagtactctatctgaaaccttcttcctcatgaagatttcccacaagctcttgaattcgtttctcttagggccgtgaccgaagcgaatgcgcagtagttttcgcattagtttagagaatccaggcacaatctcaggcgcatttggagtcaccatttcatcagatgatgttccagcctcctcaacaatctccgagaggacatcgtgctggccttgatcatgagatgttgtgcttctccttccactactgttataatccacatcccttgtgcagttatcagcactatcattagtattgtctgttgctgccaaaatactgtcagagaagcaagaacggaaggaagagcagatgctactgatcctctcctcgaaatcgtgaaatgagcagcaatccgttgttgcgatttctgccagccactgggggaaggccgtcccggtaggaccgggctcaagaaaccccattcctttcaggaatctgtgtctcctttctctgacactcatcggctcacctgcccacagctcgtacccagcttcacttgtactaatctccgttgagcttctgttcttatcgtcgtcgtcgtcgtcgtcatcgtcaaacgcgtcgaagaagacgtcgtcttctccatcatcggaatagtctgatcttggcatgttcatcagctactttcaaaccaagcagaactgccaaacaaggccgtagatcgtaggatggacgtccttaattactcagtcagtaggaacaagtacattttggtatcttcaagaattcccaactgatgatccgacgtaagtgccaacaaagtattagacaaggaaaaacattagaacatgatcgacgggaaactattttaacagctcgagtggatgtctacccgtttattgcatgtcatctaaatggttatgaaaaaaattaaaaaaatatgaataagatagatcaatatctaatgtatcaatccacaaacatgcaagttaaaattcaacttctacagattgtaacaaaaataacaaataaaactcaaattactatatgtatatttacagttaaatttgttagttttgttacaacttgtagaagttgaattttaatttgcatgtttgtggagtgatatattacatattgatctatcttgttaatttttttgaaaatttttcgtaatcatctaattgacatgcaataaacgggtggacatccactcgagctattagaatccatcccccatgatcgactgaactactacaaatgaaatacatatacacgcacagactagagtaagtagtgaaggaaaataacgaagaacggaataggcgaatagcccatcaacacttcgaacatgtatcgaattatacatagagatcgttatgtcttgaaccaaatggagaacactttgattaaagagaagagaaaattccaatccagatgagacgagaaaagctagcacagagtgatgccagtttctgaagcccggagttgctgctgcactgcactgcacagatcgtgccgtgctgtactgctcatctccagccgttgtcagcctcacgctggcagtagcaggattcatcaagggaagcaaaacaagagtttcacaatgtgcagccgctgctaactgacaaaaaaaaagatacaagagaaacaaaacacaaaaagattgcactagaattcttccttttcattgtgatggtatactactgtatttcactagaagcgcagatacgtactgtgccatctccagcaataaagcgcgtgaatccaatcatcccatatcatggatggttgacagtgagagttagatgatcagaggacaaaagaaaaaaaaaagaaaagaaaaagaaaggaacaaaagcaaccctgccaacaagacaacaccaataaataatcccaaccactaaccactgcaaagaaaaatcttttttttgagaatgtgcagagacaaactaaaagcactaaagcagcaatgtactcggatccttttcttggacctcatcagtttccgatgatggattgatcgatcgatggcatccgatccttctgcaaacatgcaacttttctttctttgcagttcttgccggcaaccagggcgtcacgtcgggaaaccgggaatccgacgacaggaacacacacgcccatgccacgcgcgggtcccaagaaattacgacagctgcagaggccagcaggtgatcatccatggtagtacaagaagacgagagagagacggctgcacggtgcagagctcgtcggcggctgacgcgtgtgccgccgccgccgcaagatctcattattctcaccgcgacggttaccgttgatgtggcgtgcaggtacagcggccgtactggcagtaaaaacaaaaagacgcgatcttttttttttatctgttggtacggcgctggagggaggaaattaaattaacctccattaatgcaagcgacagagaatcaagcatagataagcttgaggaattcacttagttttctaccgcaagatagagagtcgcagacagcaagcataagaagcagaaattcttatcaaagagactgaattgttcagagagtactactactgttccattcgaacgaccaaaaatgcaacgatcatctcacaactctatccatcgctaagcacatcaagaagcgagaggagaaccaaaaaaaaaaaaagaaagaaagaaaacaaaacaaattcagacagaaatgatgcagaagaagaactaacaccacagcttattagctcaaagtctcaaaccaacagcagatcgctcacctgaggcattcatgatcgttctcttccggagccaagaaacagcagctagaagaagaagaagaattctcaggtcggtttcccggtggtcgggagggttcttggcgtcgatcagcgaactgaactgaactctgaactctgaaatggtgtggactctgaagaagaagaaggagaccgacgaatccgacgcttaaatacgtcgtgtccggtgcccctctcgccccccacgcacgcccggtattgcatatcctgtgggccaattccgccatggttttgccgccgctgacaggtggcactcgcctcctccctccacgtggacgtgcacgccccggtatcccccttccaccaggtggtctttttctggactttcccatgcataagcatgcaaactgaccgtatgctttgctgctgtacatgtgatgtgatgggggatgttgtttgcaatttttttttttgcactgttcgccgctggcatgtgggcccggcttttcgtatggctggagccctccacacgcgatgcacaataatcatcggcaaagcaaagaatttcgtaaacgatccaaaaagctagctagctagccactatatttcttgttccaggaagcaaaccaatctatcaaaacgtacctgtacgtagtgattccgaggaataatggtcgttctcgatcgtcggttcaccaaaaatttgccttcaaaatgtgtattggaatttcaaatctaattaagcatcagatttggagatgtggaacgggaaaaaccggttggaaaattttcagagcaaacacattgaaataggttgacaccgatatatgcagaaactaaagaatagacaatgaaattattcatcgaaatttcttaccgtacaatcacgttgtagtcgtagcattcaattctaaattgatagtctgaggatgatcaccatacttctagtttcattgttttgcaataattttggtgcaaaaacagttctctgtgtactagccatataaagttgccatttcaaaaaagcgcgggagcaaattaataggtgtctagaaagggctgagcgaagcattgcggatatatgccacaaaatttaaaaaagctaatttgagtaggtctaagcttagcacgatgacggatgcacaattaaatagaagcttcgatagaagcgagcaaagcataacggatactagaaaattaaataggagcatggctatagttgagcgaaggacaagacttgtacgacatcttgatactaaagattggtgggccataatttaccaatacatctggacggacaacaaattaaggcaacctgggctatcgttttaagaattgtttaattgggccataatatgattacggcatataatatttatttttatatatgtccgttttgttttttaatctgaaacggatagatctataaagtttcactcaacatcatggttagtaacctcgaaatatttaaggcttagtttagaaagtctgaaattcccacaacttcaaaaaagaaccgccaacaaaccaaacaaaaagtggcaaaaattaagaaagaagctaggatctattttgtttccaacacaaatatttttctccacctcttgttcttctaacttttattcctatttatcaatacaattgttagatatcattccatatcttataaataaaggacaataaaaggaaacagccaaatatgatttcactctacgtaccaccaagagtgcaagacaatattcttaccatctccaatagatataacaataaattttcatgttataacgggaaacaagcgagttaaccgctaacataataatgtttttcgttaaataattagtatatattccctctattcttttatatgtgacattggtttggttcaaaatattgtactaaccaacactatatagaaaaatggagggggcacacacaatagcatatataatgtgaagctcagatcatttgatggcctaaaacataggacgatggtcagagttatatttttcatgtatacagtactccctccgtcccgttatatttgacgtttccgaccagatcgtgaaaattaaggaacgtgtgaaattacatatttgccctgggccttctcctctcaacgcgtgagtcgccgccgcgagcccgcgacggaagaaagaggcggaaacgccgccacccccaacgccggaaacgccggccgctacgcccagccgccggggctcacctccaagatgccgccgccacccgtactcgctggaaccgtcgccgccacccctctttgccggagccgccggcgctctctcccgacgccgctactcataattgggcaccccaggcctgagacccagcagaatctttggacaaaattttacaacacttgtagtaagatctcatgccctccttttcacctacaacggcatcgatcgatcacctgagccatttgccatttgccactgatctatgaacactgtaaaaccttatcatttatcaggttcaggcacgctgcaactgctgcatctgccaaattgtgcttatcctgtgcaagaaatagctatagattgactcggccgggcaggtgagcagtagaacattcaaatctccttttctaaagatgaataaggaagaatgaatcagttgtgtttacaatattcagattttactttaaaagtttgtgtttttacagtattttcagagctgctcttggattgccagtttttcggctgaaatttcatagcagttctgatgatttactcccttcattgcccactcagaaaaactctcttttgcagtagtacactagtttatcaaatttcaacgtccaatcttctgggaaaagaagattcagaccatcatctgccagaagaagtgcattcatcatctaatgcaacaggacagtaactcctgagctatgcaaacaagtgagttatataatgctcagacagacaaagatcatcttatgttgaatttggctcagtaattttcagtgggcagatatgctcggacagacaaagaaaggctgacagtgtcttcagacttgttcagttgcagttcaactggaagagtatgtattgagtgtactcagttcttgagtttcattttatttacaaaatctgaattaatccttcagtagaaaccatgtttgccgctgggctgcttgaaccttcctggcttcatctcctagtagagcaatattttgtgcgtcattgctgtgaggtgataataggactaaaaagtgacaatatggtcagattttgtgaggtgataataggcctgaaaagtgacaatatggtcagattttgtgcatgttgaaattcagattttgtgataatgttggagaggaagaatccaagagcaattaggatgtgactttcagacctacattcagattttgtaatagtactgttcatttttaaatcttgaatttacttcagtttttttgtccccttagcagaatttatgacagttcttatgaattcagcatttcactgtgaattcgcaggacagtagtagcactccttgctgaaaccttaggttacagcttcatcaaagcagacaactaccattctcaggcaaacaaaggtctgaagaactcatcatctcacaaccaacctacatttccctttttcatttctgaacttctcagttcctccctgtccctgacaacagcaaagatgagcaagggcatccactgtgtgctggatgaatcatgccaaaaaccttatttataagccacagacaagtgcagcagctaagctagctcaccttcctcttcaccaccaagaacgcaagaacgcagcgagagaggaggagattcaagaaccggaggaattgatgtcgtcttcggctgtgattccgccgccgtcgccggagaggagggtgccgatggtggccgacgacggaggtggaggacatgggacgagatggtggcgtccgtctccatccactacttcatctgccacatgtgccgccacgccgccgcccggggctcgtcggccttctccgccgcgtcgtcggcgtcttcctctgctgcgccggtgcttcccgtcgtggtgcgtcccgcgttggtggagcacgcggcggacatggagcggctcatctcgcagctgccactcttcacgctagcgtcgtcgttggcggcgctcccgaagtcgtcccgcgcctgctgccgccatcccctgcttctccacgccgtctccggcgaggaaggtgactgtcgccgtcgaacagaggggtaaagatggaaacggtttttctgattgtactgcagcgtcaaacatttagactccttttaaaatgaactacaacgtcaaacaaaacgggacggagggagtaacggatttaaagtgtataaaagaattggaatggacgacatgtacgacaccaacagtgacctcctcatatctgcatggacggttacttgttgactccaataataaaagaagcccagtccaaataataataataataataataataataataataataataataatctttacctattataaaaattgaggatgattccatactcaccttagctttcgtccgtcatccgagttaaacacatataaaacccggatcggactaaaaaaaccatatagtagcgatacgactgttggaccggaaaaaaactgtctaccggcaagaaaaagactgggaaaaccatctaccggtgacgtggactatatactatgcaaaaatcagggatacatgcatgtgtgtgtgggattcaaactccggtctcctagggtacatactacatgctgcgctcatctagccaccagagcaatgtggttattgttttcttaagaaacttttctctatttggccggtttttaactcatcaatctccatcctcaatcttgttcacaggtccatgttacatcgcttctatgtcatctcagcttctcatgtgttattgcgaattctcacatgcttatcaagggtctaattggggaaaatttatacatcttttgggaacgcagtggaaaaattccatgcccgtattagggtagaatatggctcgagcagagggggctgccgcaagcgctttactggcatatcaaggcaaagcgtcgtccgagtccgagtcgtctgactcaataaagcgacgtgtcgttcgtgcatgataatgtagccatccgattctgactcggtaatacgtcgtgcatgcatgagaacgcagctggtgcgcttaggacatgtttttttctcatctgcatcgcttccccatgcagaagcaccatattcaatcaatatgtatcaatataattatgatttgagccagatatatatgatctaacaatctaacattgaaacttgaaagtcattataattggagtatgtaaattatttttatccgttgcaacgcactggtatttttgctatttattataaaatttaaagatgcatgcatgtttcataagcaagaaaacttctggctggcatgacatacggagcgtatacgtacgtgatggcgaccaaagtgatcgaggtttattttcccagaaaaaataataaaaaagtgagtcatatattttgtttcatgtctgccacggtgacagcctctggcctaagctagatcactccaaaacgccatctccagtgacgcacgctgtatactatagctactagcaaagagttatgccgtgtaaagtcgtacatacatacgatgtaccgttgattgatctgagaatttattatggtaatagttgacagttgttatacagtttcagggtcgtgttggacgtacggttaattcgcacggtaaatttgaagtgcacaatggatggatgcacaggatcttgcaaatgccaaattcttttccttatttgaggctacttcgtctcgatctctcttttcattttgtcaaacaagattatgtgtgcatgcaacaaaagaacgactagcttggaatattaacttgtacaaacacatgtttcgttccggcaacaaatataactaattaattgcaatagttaatatagagtacctccaaccttatcacaaacctatatcaagagaaatatgtgttccatgctccatctaatatgcagccttatctttttcttatacttatcagccaaaatttaaatttttcaaccttaaatttgaagctgattttgagtttttttttcatcgaaatttatgtttcagcctttgcttttagatcgctaagaacacatatataaaaattttattcacaaattacttttcatttgcaaatatgcctttctcttattccgcgaaatataccttaaacgatggctctgatgctaagtgcaccatgcatgtcggaattatcaacctaggatcttacatgaagaactaaaacgtcataataaatccaccttataagttagttaagatgcgaaagcgtgccaaaatctgtagccataatcatgagttgaataacaccaaaacattaggcacacctaatttcttaaactattgacgaggcatagtggattggtgcgtgtgccccaataagttgctggatttctattctaacacatcacataataggaaaccaatatccggtctctacacatatataaaagtacgcttccatataattaattagatgcttagatctcaatacaactctagttgatcgctttgtttttaggtcaactagtcataatagccataatatgttaatgccccccatagaaatttattctaacaataaatgcattaagcatctacttcagtgaatggaccaattaatagtagccaaacaacatggattgcagaagaagtacaattaaatagtagggaatacattctgcacacagttttggaaaaagaattttctgaagacactcttgattccatatatatatgtacacgtttgtttccttgaaaaacagatcaattgttctggcttcacttttctaaccacaaggggtagtaacatatttaaatcagattttgctaattggcatttgataaaaaaaattagagcaatattgtaatttatggagcatgggatcttctccatccactcattagcttccggggttagggttggggttggggccaagggggaaagatcccaatgatagtggtgaatacgggttggggggagggggtgtcgttagcaagccagcggtggtgccgccaaagcagcatagtcggtggaggatggtgcaagcagtagaggcatcttggccaactggttagatggtagtaagagagctgctggaggtaggagagatcgacgatgttggggaaccttactagagagctgcttcatgaccgtggttgtggagaagggtggttgattacagagaagaggataccggcaccagggagcgacaaaaggttttggtgggtggcggtagtgacggtttggggagcccggcatcgccggcgttggctatcggtgttgaggaaggaggcgcatagaaggggctgggcagcggggattggggtgatgtgactggaatgtgggaaaacaagaggattaggttttctctctttatatatgtgtatcagtgtttgagagttgatctagcccgttgaataatctttatttgagggatgataaaatagattgagatgggagaggattttcttgctaaagttgtataggccgtccccatttaattgtcacagttaaattgtacataattggctatttatggaaaatgcttggttgccacatcgtcgcatgcagtatattttcagcaccatggcctacaaaatcgttattttaccaagatgttctttattatttgcataacaaccccccccccccccacacacacacaaaatgaagatgccagtgcttgaatgcttattgtgacacaaaatttaaataacaaaaattcttatattttagaacgaagtgagtaattgacaaagaataaacttaattaattagttagttaaatatccgtaatctttatgcctttagcccttttgttagtttgtcttcacatcacagcagagaagatgggtggcagcagctagcagacacacttcatcccttccattccagccattccaaaagcatatgcccccaaaatctcagcatccctaccactccagggagaaaaacgaacaatctaggaccaatttaacatgtactagtacaattgttcctatctactactactctacacactgcaatttcttctcccctatctaaatgcagcactagctagcaatctgaaaccctatcaagcttccaaaaagccaattcggtcagcctaaaaacgaaaacggccgtctttgtggttgtggcaaaggcaaaaaggagtacagaagctttgtttcttcttggtctactagtaattcagttggtcccatgcatggcatgctactacttaggtcccttctagaacaaaacagaaaaacataaaagttgtagaggatttaaatcctatatatgggaaataattatgaagcattttaaaacaaaggattgattgtgtcaatgttctagatatgagataccttatacttatgtattatggctaggcgggctcaccatatacaaagtcctatatagaatattgatggttgttcatgtattcatctttatttcagggatctgaggcatcattttgggggatatgatatcttaaggacatgagggttcaacgaatcgactcaattcgagctggttgagagtcggccttttttaaggctcctggaacataaaggtgctgattctaaatttatcattggtgccagtacgcattgttgaattagtgttgcatgaaaaaccggcacctatgaccctttacaagctggcaccaaaggcgttcatttctcagccctcgtttctcattctcttctatttcaacatacaatctatatttatacctaatttaacaccataataattcaaatgtaagaatttaaccatatccgaatatacaattactcaaatataagaatttaaccatatccaaatatacaattacattgtacttctgcttagaatgtgtagttacagtgtaactacgatgttacatcctagttacatcgacagttttttagcgttttttagttaacaatttatagaacgacacccatataggtagtcccttaatttaatttaaaccgtgtgggtcgacggaaaacatggaaggtgtgagctggtcaattggaactgaagcccaaaattttttttcttttaaggaataagttcacctgcggttcctaaactttacatcgagtttgtttgtcatcccttatttccaataccataaatcttcatcgtaaactatacaaaaccgtacaatctaggtgctatagcaatatatatgtctggtttcgttgatgtggcatcctagttagcaaaagaaattaaaacaatgtgaggctcacatgtcagcgcccttttctttattctcttttcttccaaagcctcgagggagagggcggtagccggcgggagaggggcagccggcaagcctaccttggacttaggtcgggctccaaggtcagcaccggcgcgaccagacccttgctgcggctggttttggtactcttccaaccagcagcatggtggaggacaggtttgcgcaggatgaggggcactacatcgacaacagccaccgccacatccccagcagcggccaagaggagggatcctgcagccacgacgtcgtcgtccccaacaaccacgatggtgaggaggactatcacgatgacctcgacctcgacattctcttcgattgcgtagtcgtacctgtcccaggtggccacctcaactcaaatgccgccgtcttcatccccatcaccggtgggagccaggacctctactttgccaacaccaccgcttatcgccacctacatcaccttgtatgtgctcgtagcagccggtcacggtggaagaggtggaggtggaggcggccttggggcggacagatccagctcccccgccctcgcgagcggcagcggcttagggggcgggtgctgccggtgtgcggattcagcgacccccgctcttgggagtagaggaggcgccgccggccgtagatccagcacaccgcctgcagcagtagcccatgcgatggcccatcgccaatgtcacgccgaccgcctctcccctcgcccatctcccgtcggttgcctctcccaccctctccggctggccgtgtggcttgggaagaaaagagaagaaagaagagggccgctgtcatgtgggcacacatatttttttctattctttttgttgactagaatgccacgtcagcgaaaccagacatctataataccatgggacataaatttcacggttttatatagtttaggggtgaagatttctgatactgaggattagggatgtcacacaaactcaacgtaaagttgagggatgctggtgaacttattcctccttttaacaatgatgcactagctcggcccgactagttaaaggccatcaaggtacaaaatgggcttaaaacgcaacaacatggcgacgaaacccatgaacttgtgcatgtgggcctcaaaaggcaacacttgctagtacctgccctatctgccgctgatcggcttatttctgcgtgtgtgtcggtgtgtgtgtttatccggaataagttcacttcgtaaccctcaaatgtgatcgaaatccatgaccctaaactacaaaaccagatatctcgacccccaaactcctaagaccggtgcaatttgactccctcgatggttttggagggtggttttgctgacgtggcgatattgaccgagtcttcgttccacgtgacgttgacgtggcatttacgtggcagcagaattaaaaaaatatttatgggacccattagtcattcataaaaaagaaatatggggtccacatgtcaatcatcttccttcttcctcctccctctctcccttctctctctccccttcttcccctttggcctgcggcgggcgatgagaacgagcagcggcggcctccgcgcgtccgcgcgtgccgctcctccccccgcgcggatggccgacgtctacctccctagcatgcagacggccggcaacctcctcctcgcgcgcggcgctgccgtccggctggcgagctcctcatctgggatgggaccccaacgccgcctggccgcacatctcctgcaaccgcaccaaccacatcaacaacaccgacctccccggcgtacgttgccgccgcgcaacagatgcagagcctcagcctccaggacgaggcaacgtttgatggcaatgaggtagacatgtagagctcgtctccaagggtctgcaaggccaccatgatggcttcagcttgatgtatcagccatcgacccatcatggccgccgacgcaggccgccgtcgatgttgtctggttgatggtgacagctgcggtggcagaggaggaggagctgaccggatgcggcttgggcagtagttgctggtcgcctgcgctgaggcagtggcgtgtcgcgaccgtgcgcaagcggtggcgccgttgtgtgagctacagggcggagcgcctatgcatagcatgggagagaaggggagagaaagagagagaagggagagaaggaggaagaaggaagaggactgctatgtggcccccacatgtcagtgggcccacattttttttttttgtgtgaatgactaatgggtcccacacatattttttaattctgctgccacgtaagtgccacgtggaacgaagactcggtcaatatcgccatgtaagcgccacgtggcgccatgtcagcaaaaccatcctccaaaaccactgagggagtcaaattgcaccggttttagaagtttggaggtcgagatatccggttttgtagtttagggtcatggattagatttcgatcacatttaaggatcacgaagcgaacttattccgtgtttatcctctccctctttggtgcttccgatatatagtagcactctcatgattttaagagaaaaaatataatagtactctctacgtttccatttacgaagttttagcatataaaaattagaattattattaaaatattcattgtgatattcaaaatatttttagagacgtctttcctttcttcattgagtactattcctttgaaggaattgtactactacctccatttcaggtttcaggttataagattttttaacattgtccacatttatatagatgttaataaatctagacgcacatatatatttatattcattaacataatatgaaacagaggaagtacctgttttgagaacgattattatgatgcaattgataagagtagcaatgtaatttatgagttatatgacactttcttgtgagatttgatagagccatatatccgtatgtgttatggtgtctggatgtgaatttctctctgttattctatatgtcatattggttatttcgaacctcatatattaaaaatggcggtagtagtttgatgaattttaaattttcacatgcgcctccgtctcctctcaggttctgagattcagaagcttcagcgtgcatgtatggtgattaatttttcttagaaatattgtagtacaaacacactcactcataatataaatatatgtatgctcatcttttttaatacacacgtatattctacctttattatttccagtaaatcgaaccattattttaattagtctcgtgcatgatgcagagaccctggaaagggcgatcgagaattctctatcaagtgtcaactcactggcactgcacgtacatccatcgtagacaacagtttcacaaggctctcgcaaatgcacgagcatatatatacgtatgatttgtccctcgtccatcgatttaattagctagcttttggtttgtgttgtcgcacacaagagaatgatcaatcatgttgtccacagctgccaatcgatcgatcgagctttatttcgcctttaagcaacatagtagcatcgattgatggcaatatagaccactcccttcctcctcctgctagctatagccccgttcgacaataacataacggatgaagattaagtgttgacatacacaaaacgagaaaaaacacatggttaataatgtaaaatcaaatgtgtttttgattattattctgtgatgaacaattggcatcggagattattggttttgatatttggaatttattcacgaagtggttttggagatgattggatttcacaggtgaatctacaggtactgctggaattgggtctggtcagaccgagcaggtgttgccggtcagaccggcgtgtatcgcgcggtcagaccggcgcagcccgcggtctgaccggccgacgctgtgtcggtttcggtttcgggttgtttgtttggatatccgtgattatttcatgattatggcttttagatggatactatacgtatgtaatactgttgtttgctactaatgagtcaagttggagatagcttggtctcggaatatggtttctttgtttatttcatgtgtaggtgactcgatgcctcgggagagtatttgcggtgatggaccgggagtcggctcggggataagacgacgtccgtggtggtcagagatcatgcgggatacttaggctagagttgatgcacgtggttgatggagattccatatggcatacgatggaggtattgtgtgcgtatgggatgcgaagtcgaatttgcaaggagtccaaatttagtatgattggttatgtaaagtttgtttcttgtactagagggtttcctagcttgccgccggtcttaccatcggtgagtcgttggttagaccgctaaagcccggtaaaacataaatcgaagaactcttagagtagtagatgacgactttattgattctctctgtgtttacaaagtgcaccaacaacactccttacaaaaatttcgactaaactcgaaaccctaacttaaaactcaactcaattgctctccaaagcgataccgggaagcctcatgctccccctctatttatacccgaggtaggcagcctaaagtcacgaaccaaactcatactaaaagttctaaacaccttacaaggcgacggtcagaccggcgggagcgaggcggtcagaccggcgacggcaacaggcgcggcaggagacttcggcgatcggaccgattgatctatatcggtcagaccgacggcatccacacggtcagaccggcagatcaatctcggtcagaccgatctccgtcgaatttgagggtaagttttatttccgctaaaagtttttggtttttgggtataccaaccattcacccctctctggttggcttagttattgtgattcgatcctacaaataagacgtgaatgttaggaaaaaacctaatatcaataattagaaggggtgaggcttcgaacccaggtcgcctagcctaccactttgtggagttagccggaacacccctggtgtttctccatggtttattaaactttaattatttcaaactctaaaaattagatttacttcatattttagagtaaacttcacaaaactacagatactttgaccaaattatcacaaactacagatttagggtgatatatcacaaaactacagatttaacactaaatttctcacaaaactacaaatttaaggtagaatatcgtaaaactatatacttagtaataaaattatcacaaaactataggtttagtgataatttaatcacaaaacttgcacgtttataactcaaacataacactaatgctaaggatttaaactctaaaatctgtaattttgttattaaatttgtagttttgcgatactccatcttaaatctgtagttttgtgataaatttagtgctaaatctgtagttttatgatacatcactttacatctgtagttttgtgataatttgatcagaatatatgtagttttgtgaaatttactctatattttataacatcttctatattaaaatatatgtacgaaatataccggttagctgtttaaaaaatgtgataataaaaatgaggtaaaaatttatatcttaattaatcagaaaagaattaggtcctcgacctagctagctctcttattctgcatatagtagagtagttcatgttgaaacgttattcctgctcggttttctgtagagaggaggacgatgcctaatcatggagctcatgaatgttcatggaagctaattaatcagtgcacatatcgatatataatatcagaccgtaaatcttggctgtcaccgcggtgctggtcgtcggacaaactgatcgtgatagatgccggtgaagatgtcgctaatttgctggcacaaacgtttgaaatgttccgacaacgacatggaagtggaatgtcaccaagttgcctccttgccggcataacgagttgatgggggtggattttcagttatacacccttattgtttgggatgccctaactctcttaaaattcataacactacgccggattagatcacctttgacggactcgcgcaccatcatctttgatgggtttgaccctgattagagatgaattgttactgatgactacactcaccccgttaatggcgacagacacctctaatgggcccgtatatttttggctcgtcaaaagtgaggatctccacaaatcaatatgtggttgtaacccgttagagctgagacacctgtgatgggtgcaaaattcacggcccgttagagatgaccccatctctgacgaatctactttggcgcctgtcacaagttacccacctctaacggagtgatataccaaaaccgtcacaaccgaggttacttgtgacggtctttatttacgacctttagtgatgaggtaatttcggaaaaaaaataatttctaaatatttgctagcctcagtatttggtaggcatgctctctaaaaaacagtacattacagatattccaaccacacccaatatcacatatttttacaatttatcacagatgcatcccaaaattaacattctacacatgcattctaaaatcccataaaaattacatagacagtcacatattcccaatgcacattcttacctcacatttcttttgagcttgtgaagccacaaacttacccaatttcttgcattgcacatgaagctgtaaacttacccaaattacttgtagcatatgccttttaaagaagaacgatgagctgccatttaaaaaagggataaaacaattgaaagatacaaagtagcaattattgagtagatgcaaggcgtagtaaccaatttttatgatatgttgttcaaaactgccttaagttataaaaaaacgatagaatacgagatgctaggggtcccaaagtgttttaaacgggccgcggccggtggcctcacctgatacggtctcccgatgaacctatcaaaggtaaggctatccttgatgagtactttggcccatcactgctgggctgtcagaggtgaatagttctgacgtagtgtaaacatgtacattaattttgaaatcaggtttttgaagctccagaaatgggcatggacggaatagcacaaagcacataattaggtttcaagtggaagaaatgatttatgtaaattgcactgtcaatgaatgaactttgtgcaatttaggacatcaacttataaatcttgtgggaacagatgttgtccacgagcccatgttgccctagcagcagttcattatcaggatagatgtcgtatactccaaagagagacaccccagtataggagacaccccagttcggtgtcacccgttggataggtgacaccccagtagtttattccgacaaaatgctagaaaaggaggttaattacgagatgacaaagctttctgtagtgttttattcttacatttattagtggaagtcgccaagctgccggcctaactagcggtggtggaggtgatggattttcagttatcaaatcatatgcattgcgtgggatggctaattacctatcaaaatattcataaacatgtaggtatagttttgaaatactcactccgtttcacaatgtaagtcattctagcatttctcatattcatattgatgttaatgaatctaaacatatatatctatctagatttattagcattaatataaatatgggaaatgctagaatgacttacattg

SEQ ID NO: 24614 - DNA, 3662 bp, Oryza sativa
atagtcagctttgtcggagtaaaataattgccaaattaccactgcgataacaatataatgagttacccgtagtgattattactcactccgtctcaaattataatgcctatatatttttttacacggtgttattgattttgactttaatttatttcatattatgttcttaaaaatttaaaattagcatcatacttagtatatatatagtatgaatcaagggatataatatgcataatacttagtatatatacatagttagtatgattattagttaaaagttaccaagtttaattttttttaaaaaagagatgccctataacttgagacagagggagtagtacatagtacaatactaggctactgcagccacgatgtgctgttttattctgggttgtaggaacattgtagcacatttatttagaccattcattttagatcaagcgatagaaaacgctactagctaatgcgcaatatttttttttgaaactaactacaccagatgatgtgagattttatattaatatagaaaaaactataaaattacagcctagaaaactataatcaggaaaagtgaaaaaatcgcacctccacaccctgacgactcctacacacctattagaggacataaactaacatcgagccaaccgttatacatgactgttcgccatcaactctataacggggttaaggcactccacactataaatttagttaaacttagaaaaatttaagtagaaaaaaaatcaaaacatcttataatataaaaagaaggaactactagctaatacacaatgacgttcaacgctactgtataacgagcagcaacggtagaggatcacaatcttcattggatatatatggtttgagaatagagctgagatagattcgaggcagaaaattaacgaagagaaacagctgaaccgggaaaggaaggtagaattgggagagagtaaatttgtttagtttattgtttttctcctcttttttgtttttctttttatgcacgtgcggccgtcctcatttcgtaccgatcgtgtggaaggcccaactgcagtgttcgtgcttggtaggcagcctttcatttttgacaggaactgacggctcctttgcaacacatgatttcaaaaaacataagcacaagaaacgtaggtttaatatatcatatcttgtgaatttctcgggaaattagaaacatgggaatgttcttaaaaatagtcatttgggtgatacacagggaaaacgaagtaattgtagacacgagaatagaataccaccaagaggtaggagtaggacctcatgtatgttttccttcaaatctctatataaattagttcatttcgtaggattttcatgcatcagtcctctcttccaaatgatttcagaggaatttcatcctaagaattcaaatccttttcctttgttagtcgagcgatgctcctaacaatttgttaaacgatggaaaaaacatttgttgctactaactaaaactctatttctttttatatactgacgttcaatcagggttggatatacagtgtaacggctggaatcaggtgacactgacgagttttggcaaaacctatagttaaactacttattcatatattatagcaccatgatctaagcataattagcatactatgacactagtagatacattatgacaccaacgaatcaattttctagatacgccactgcgttcaatctttatgtgtgttcgtgaaaaaacattcgctgctggtaacagatggagtccttgctagattttggcagcaggcaggcagggtgctgcaattacgatctgtcggattcgatcgagcagggatcgatcgtactcgtgtgtcggccttttcgcctgcatcttgtcgccttcttgctcatagctgcttactcctactacttgtactatttacaagtgcgtatatacagtaccagaatttctgcaacggtttggctaggtagaaaaaatagacctgaacatttttttttaataatgaaaatggattacatctctggctttctgtcataagacacacagccataagtacagccataagtttaatagtaataaaaaggtaaggtaaaagtaaatcaaaatgagaaataaggtgatgggacaaatctccaactcccctttattattgactagcgttaaaccacataaaatttttttagctagcaattctaatagaactacgccacccatagtggaacaagagacccttagctaccgattccaagagtatagcaccattgcgcatagtatcctgctcttcctgtggtagcatcgtaaaccaaaagtggagctagtaggaagatatgaagataacctgtataaggttagataattgtttaccattaaaaactttatcattacgacaacaccaaattaaccaacatatagcactagctccaattagaatcatctttttaatggacctagatatccctctaagccaattaccgaaaatgtttttggcgttacggggtgggggatattaaaagcaaaaaacacacatctccaaacaaactgagtgacatgacactcaaagaaaagatgttggattgtctcttgtgcatagcagaaagaacaatgtttgtccccctccccctctccccaaattttcttttagccaggttattatctttcgttagaattactttcttatgaagaaaccacataaagaccttgatctttagtggaattttcaagtcccacagaattctctttttgatccgaacattacagttcatgatcgtggcatacatagatttgatggaaaattgaccattcttatggagcgaccatacaaagctattcttttcatttgacagagttatattagcccgaggatcaaatcgttccactcgattagcttttggccaacaatagctctcctaaaagatatatttagcggcgttgtgtgtaaaatcaaaggtgctttttattattattctgtgatgaacaattggcatcggagattattggttttgatatttggaatttattcacgaagtggttttggagatgattggatttacaggtaaattacaggtgctgttattttatgtgaccggtcagaccgggcagtcgttgccggtcagaccggcgtgtatcgcgcggttagaccggtgcagcccacggtctgactggccgactctgtgtcggttttggtttcgggttgtttgtttggatatccgtgattgtttcatgattatggcttctagatggatactatacgtatgtaatattgttgtttgctactaatgagtcaagttggagatagcttggtctcggaatatggtttccttgtttatttcatgtgtaggtgactcgatgcctcgggagagtatttacggtgatggaccgggagtcggcttggggataagacgacgtccgtggtggtcagagatcatgcgggatacttaggctagagttgatgcatgtggttggtgaagattccatatatggcatacgatggaggtattgtgtgcgtatgggatgcggagtcgaatttggaaggagtacaaatttggtattattagttttgtaaagtttgtttcttgtactagagggtttcctaaggtgtttaggacttctaatatgagtttggttcgtggctttaggctgcctacctcgggtataaatagagggggagcgt

SEQ ID NO: 24615 - DNA, 8049 bp, Oryza sativa
atgatttctttagaaaaacagttcaacacctggaatggcttgctattcttctcgagattatgagcaacttgggatatctggcagcaagacatgacaggctgatgaactgatgacatgttgcaaacctaacaagcagtacagtgaagtttgtttgtactagtagacttactaaaactattacctgccctcgaggacatatataaatctaaatcaaaccattattaattactgaaatcgaaacaatttaaaagtacagctggagtcgtgtcgtatgaatataagcagatcagctctgctaaatctcctttcagtggcggtcaatgaccgcagcaaacgcttactgcacgtgtatgtacaatctgaagactcgtttatcacttatcacttcatcagtccattttttttctacaccaaccatagaattgaaggaggtggcataactatttgaaactttaatgactcagagcgcagtaaattaattacaccgttgatggatcgatcgatcgactgctcgatcatcagattcgtcaaacttcccaggagtagaggtaacgatcgctcgttcctcccggcctgtacttgcacgccaccggcaatctctgtcagctgttcaaccatttttatgtgacagctagttcaagtacacgagattacgagctgaacaattgtaaattgtgcggattttcgcttaactgaatcggaaactgccgtggaaatcgactgctgccgatgacccatcatcacacgcagcagtggtccagtccgccgagagccggatcagctgacagcaacaagcaggcaggagctagccaaaagtggtccactggcttggctcgcagtcgcagcctcacagtgcaaatgcgtgcagaagctggcctgcatggatagccgcagcctgcagggttgccgtctcgcgcgaagactttcttccccttgccgagttgcctgcaggagctagccaaaaaaaccgtcgcgctcgatcgccctcggcgctgtgcgcgttcccggtacatggccgccgttgctccagcgatcaaacgcgactactctgctacgctctcccggggctctcggtgcaggatgcacacgtcgccgtctccacagcaagaggggcattgattgattgatcaactagggggactcgctcgtttttctttttctacgaaggcttttgaccgttcggcccgatggtgatcacgcgcacactgccgcgcccggccggcgtcccgtacgtctcgtcttcctccgccgaccgcgcgctgccgtacgcgtcgcgctgcagtggtgaggtgatactctctcgcgcgcacacgtatatatacacatgtgccgagtttacttctaaactatttcttcgaacttctaactttttcatcacattaaaatttttctacacacataaatttttaattttttcatcacatcgtttcaattttacccaaacttctaattttagctgagctaaacacacgcatggtggattggtgatacgtacgtcgttttgatgggagaaacgccaagaaatctctccctgtcgcggcagatcggcgaatcaaaactagcagctcactgctgctgccgtgttctgactttcgaccgggagattcaacgggggagggagtcgctgggtcgacatgcacacagacgcaacgcacgcctgacacgcccggtgacccgagtgacaagtctacggcatgggctgtctgtgcaaggactgcatttcaccactcagactttggagtcgattgcaacagaagtaaccatatatacgcccataccgaaatgctgtatagtatctctacaacaacatactaatagagtaatagtaagtatccccattacgcgacagataccgtattgcgtgcatactgtgacgaaattgtcggcaagcgacaatatatatatactactgcatgatcgtggctgcaacaacaagagtacacgtacgatacgcatgcgggcaggcatacgtacaaaagaaactgttgaactgctcgaccggctttactgatgcgtgcattacgtcggctatacaatacagcatcaaataggtcccatgttactttcatgtgcaaaattaattcgtccgtagtttgattgagcgaatctacaacttgtttagaaaaatatcgttttcaactgctacagtggtctagctacgtgttgtgttaagtcaacaagtcaacccaaaagggctactattaaacgtgtaaactgattgataagatgatgcggctgtggatggaacaccgttgtgatggactgatagcattgccatgtactcaaccatggaacgaaatggaaatattatttcaggccgcaaaagaaagcatttcaattttcctgcttatttggagctcaggtatccaataacttttttttaaaaaaaataatttttttgtgtatgttatcagatgccgagtagattaattctgatgcgggactcagcatataacccatttttctcatgtagcagtccttttcatcctctttcgctctctgtaaatatgatcttctaagatgcctgaatatgaagaagaacaccgcggtactcaagccaatccaacagtgacacacaccatgtcgtaagtgtagtggcactaaccagtagtcaagattcaccgtggaaaactgaaggcatcggggtccctgaaagaaacgagccagggctaacccactgtgtgctcgaatggccagtcaggcaatgggccaatgacctcgggggcacaggtcaaaaaagatgctccaatcaagctagtattgctattattccctctattataaaatatgtatgacataactataactatatttcataatataaggtgtgcatgcatatatgcaattgactagcatctcttctccactatattattgtttttcttaactatgcatatcactctcaaatatataattttattatgtgcacttattgtatttattaggatgattcaaacaataatatgataataattattttttgatccttaaattaagaataattatgccttatattttaaaatgcagatagtaatacttttggcctgtcgctagggcaaaggagagagtacggctcaagctggcttgttcgcgagtcaaaggcacgcgctggacaaaataatacgtttagcaggcccaatgttcagttggtttcccactcgatcgagacctcgtactgaactgctcaaggctctcaagcatgggtgcttggatgatccgaataatcttgattctgtaaatttcacaactacagataatactttgataaaaactatcacaactctacagatttagcatcaattttataccatcaaaatatagatttaaaatcagatcataaaaaaactacatatttatgaatttatccttctagctaggccgaccttgctccttcacgtggctgctcacttcaatacttgtggccgacttcaaggacctgtcttcctgagcctcttcgcaagggcttcgtcttcttaatcctcctggtctcctagcaattgtggaagaagcggaactttagggtgttcgattccactctctcgttggtttttgtggtcctgagagcccattcttcaggaaggtcatccgtggtcaagtgctggcaccacggtttttaggggtatgttgggagtttaggggggggttcgcctccccctccctcatttttagagttttattttttccttagcagtcttttcttctttattttcctttgacccctgacaatagccttctggctggttgcgtcgtgtaactgaaattttgttttcttccaatatattaacgtgcaatccttttgtatgttcgcaataaataattattgaatttgtcataaaactatagaatttgtgttcaaatccttaaaatatatgatttgtgatgatctagttaaagcatgcgtagttttgttatttctgattaagatatggattttacattggtttccgctaaacacgtttttcaaactactaaacagtatatttcatgcggaaactttatataaaagttgttttaaatatcaaataaagttattttttaaattaaaaataattaaaactcaatcaatcatttgctaatgtctttcttgttatatatgctcttgcttaatcttgatttgctatgttctcgactggggccttactcttcttttctttttggaggaaaagattgcaaaatacgttgatctgcatgtttgaccaaattcatatataaaaatagaataacatttcaaacccaaaacaaatatactatagaactatattttatggtggattaatttggtgttatagattatgttgctacgttttcttataaacttaatcattcaaaacgtcttttaatatggaacaatatatggaacggagaaagcaaccgcttttacgaagaacagatactatagcatgagacaagcaagtcaccgtttgctcaaccactgctttgtaaattagtgatgtgattgcaagagatgaaaaatcggtcgcattcctaattcacctgtgatagtctgatgccgagggtgttgaatttttcgtcacatcttgtccaacagacgagttaaaatggctatgctatctgaggacagatccgttccttaataaatcaacgtctcactactaataatttataagtaacaacatgttctaaccaaaacgtgcgagaggaagctaataattgtggaatacatggcataatctacacataaggttcgtttcaagcaattcaaaatttaagttcggttgaagacagtgacaaaaacaaggacccgaacccagaaatgacggtcaaaataaatcctatgtatgaaccgtacaaaattgactgcccaaatgccaatcagggtagtaaatgaaatcaccactcaccagcaaatgagaaaacctgaatacctgataatgacatgctcgatcagtttgtacttaactagtacgtagcttaattaatacgtccatttcagatcatgaaatttatatcctacacggctgcgccagcgctagatgttaaagttgacgtatgtgtgcgacaatttagacatcaaacgatacagtgacggccgcagctttaaaatttagatgggatgaagattaaaatttagatgggatgaagatcagagatgttcacttgataagagcaatcgaacaaaacacgtatcatatttatagtttaatagcatagccgcctcgaccattatttgcggcgtgctcgcgcggcgaagagatggaataatttgtttgacgttacaccttgttatacctaattttgatggcctatgactattttaaggaggcatgggagtcttagaagtgtggggcgacactggtcgtagctaggtcaatcaatccaccctgcctaatgggtagatccgcccttgaaacggtaaccatatgtgaacaaagaattggtgaaataataatgtgtatagagtttgtgtcggatatgtgtaaatcggttataattttagggattggagttgaactaggtgttaggaatagtgtaagagccgaactctatcctagactctcttaaatagagggacgaacctattgtaatagtatggcaacttagcatagcgagagggagcggctgttggcggtgtaactttgatacccgcactataatatgctggatcggggaggagcgcctgtaatcagtgtccggctaagggttgttgtaattctgatacgctgtaatacgctagatcggggtgaggagcgtctattaacaagggacaattgcattcgtgcccctactttcaactgcaattatgatttttcccttactttttagggtttgcaattttacccctatttttttgaaagcgaagcaacatgttacccttggtttggatggtcagtttgacggtgttaaatcagtggtgaaatgacatatatacccttgtttggtattgcatatttgccctacgtctctatattgaaatgtgtatctccccctgtttggataagatggagtttgacatgaaatttgcccccgttttgtactgatatttgacgaacttctagcaaccttgataatatgacaaagacaaaatggcacaaatattcatgcaaaagaagcctcacaaaatgccacaaagtaaaagcagcattcggaattaatgttttcatcaagaagctaaacaagcattccaaatttgttgctgagcactaacagtgctgccctgcttgccttcatcggctcgccacgcggagccgccggtgcctcctgcagtcctgcctcgctacgcaggctcaaaggagtcgccacctcccgtttccctcgcggagccacgccgctaccggtgctacctgctcgccttgcaactggttgctccggcgtgcccgcctgctcgcctcaccttgcctgcttgcccaaccgccttttcgccctgcaggttgcagctagctgctcccattgccaccggctcgccacgaggacttgccccgccgccgcccgtttgcctcgccgcactggcttgctagagcctccgccgctgccgcctgtcatggattggggaatggggaatggatagggaacggtagagctttaggtcagttcatgcttccaagggtaaaccggtaatctaatatatcaaaaatcatttttttttcttttcatttctaattctttacctcacaattgtgggtcccatataactgccatccattctaggggcaaacggcgatttcgttttaaaaaaataggggtaaaattgtaaaccctaaaaagtgagggcaaaatcataattacaattgaaagtaggggtacgaacgcaattgcccctaacaaatattatgtcttgatgtcgttactgtgtatggatattctatagtattttttcagtgtttggttcttgatattacttgcttgcaatagaaagtcttcgcgtaaaacatatataaagaagttgctatttatccgagaaaggcactaaggccccattcattttaaattaattataaggggatggatattatgtttggattatttgtaccatactgattcgaaaagttcgattatttttttttaaaaaaaatctaatttatccatccaatcgtccatttcaaaccagccgttagcgagaatactaaacggcccagacaaattcaagcccatcaattggacgttcgaaggttaaaagtgggccctttattatctccaggctctgtatttggtagcccatataaaggagctaatccatttagctagttgggccaaacgcccagaatccattatgttagcaggcatgataatagtagatgaattatgcatcattttttagcttttacaactttctgaacatatgttctctttatgtttaagtggtttaagccatgcagtgaatcatgttcagactttccataccttcagaaaccatatgcattttttctgtgagtacaagttgaacgtcagaaatatacaatttttccgtgggctgtgtgcgggaccgacagaaaatatactgacctacaggcttgctccaaagtgtggtagtgagtatattagtatatatgtcacacactttggcagtgctgttaagttgtttagtgagatcaggaaacaataatgcgcacccttctggttgacaaaagtttcacatagcttcgagctctcacaatgggaaaaaaaaaacataatccattcgaaagccctttgcaaaagaatggtaggagggtttctcagagaaaccagacatcacatctcatctccccttggtcatcggtcaagatgatttattaagcatctacttcgaatgatatctgatcaatcaatcccaaatcttctctccaagcatatctcaatccctgttaatgactgagaagcatatgctgtccaagccgatggttcgtaagtaaccaagattattccactgcttacatgggtaaaaaaatcatgcgacgcatccttcttccttgtcaagctgtcatcacattgtcaatgcaaatcctcctaatcaggagtaagaatatttgggctatcattaatcgctagtataccttcttgcaaccgaaagagaagcatgagccctccagttaacttctgtcgtttgtaagg

SEQ ID NO: 24616 - DNA, 1766 bp, Oryza sativa
caggttgtgagctattgttggtgcatcgtggtgctgcctgttagtactactcctacgtaatgtagcagtaggcatgcccattaccttggcaaaatggcagccctagctatatctttgttgtacacttgtgatagagagagatactagtgcagtgtgcacacacatctatcccagcaaagccctcaactagtgtagtaccgtcacaagcttcacaaacttactctaattcacaatgtgtttttgatgacctgcgacggtttctggcagtgtacgtcgcttcgatgatcgatcatatcagtgcatctcccgatccgatgaaggctcagacaccaaggaaaccggcttgattcatgtgtcattggcgccgcagccgcgggggcgtgctcaccagcaaaagtgaagtctcgtcgtggggcaaaagcaggcaaggggcaggcaggcagtatagcttagctcctgtataaatcgatcggcagctgagggcggcgaaagcgtcgtctcccaatggtgggggtgggtctccccgtgcggccggccgacagcgcgcactgcttggataaggtgccggacacaacggccggacgaaaggcgcgccgcggggctcgattccagcccaccacctgatgatggatggatgcaacctgcagatggcgtacgtcacgtcgctgagcgcagcagcaggagataccggagggtttggactttggactgcaccgggtgttccacgcggcccacgctgggaggcagggccccccccccgccggttggtgtcgcccccgtgccctggtctcgacacgagtcgatcgatcgatcgatcgaagaaaggctatagctcaacctctagcgcaagatgccggcagcgcggatggggattgagacgggcgctcgacaacttggccccctcggatatgctttgctaggtaggagtaggacgcaggacgaccacgatatatctcggcgacgtcgctggctgccggtggtgcgcgcgcgggcgcggaggcgaaggcgaaggctttttccgcgggcgcgctgggctggctggccgctttctgtcgcttcgtggccttatcttgcactccgtctttgcaggaatgggccgcgcgcgcgcgctcatgatgagatcgatcgtttggctttggttggatcagcgcgggcggtgcgtcgctaggcggtttaggctttagccctgccgcgcgcacgttcatgagcgctcgtagcggtacgtggtttttgtcgatggatcggtcggtttcatcgtaaatctggtggacgtggccgtaggggttggtttctttctcgtaagctgggtgggggccgcggcgcccggtccagtcgaaagtcgaaaccgtcaaatcggccgagagcagtcgcaatcggcacacgtcgatcgctttcgcgtgcgagcgttgtttcatgcctcgtcaagatgacgtcgtcccgtgtatagttggccatatgggtcgcccggcacggcacggcccaggcacgaccgggcctgggccgaggtcagtcgggccggcacggcacgacaaacatgccggcccgacaaacaagccgtgccagcccacgggctacaaccacggccccagtagcctcgggccgtgccgggctggcccgacggcccggccagcccatcgtgcccgtgccggcccaggcacgccctggcaaaaaaccccttcaaaagttcaattcaacacaacaaattgacataacacctcaaattcaagaaattcacatgtaattcatcaaataactcagggctgcag

SEQ ID NO: 24617 - DNA, 555 bp, Oryza sativa
gaagccacgcgacgacgccggcgagatctcggccgtgtacacgggcgcgatcatgatcgcgtaccccacgccgacgcccgccacgaagcggccgaccatgagagtggcgtagtcaccggagaaccccatgagtagagctctggcgaagaagaaggcggcagcgaagacgacggtgaaccgccggccgatccagtccgccgtcctccccgcggcgaaggagccgacgagcgagtagatgttcaggatgcccatcaggatctccacctgcacgtcagtgatcttcaggtctttcttgatgtacagcgatggccgctcatcaccccgatgtctgcaaaattttggcgcgaacttgaacagtcagtgctcgctgacagtacactacacttctgaaaacaaattcagaccacatctgaagatttttctttttttttttttttgagatgatgtgaatacgattgtactacgagtaccatagccgagaatgatggaggccatggaggcgaggatggcgcaggtgaatgcatagctggcgttcttcttcttggggtcgacagc

SEQ ID NO: 24618 - DNA, 684 bp, Oryza sativa
attattaagtccctcattgtaagttcactgtcgtatgtattcttacgtaaagaccctctataggaccgcgctctgaaacagtgcaagtaaggatgttttctgagaaatagaacaccctatccccccattcccccgaaaccctaccactaccctaccagtactgttcccccatccctcctcttcctttgccctgccctgccctagcgccgccgccgcttttccttccctccccggcttctcttcgccggcgacgacgatgcggtgcggtgtctccggctcagattctcaagaattctcgagctctccatgtcaagtagagggagtggacggtgcggtctgttccccgaaaccctagccaccactattcccccacccttctctcgctctctcccctgacctttgcgacggcgcagcctgacctcgacttgccctcctcttctcaacgccgccgccgccagccttcctcgcatgccctcctctgacctaccccatatcctggagctctccctaccaatgctcccttctctctctctctctctctctctctctctctctctttctcccctcagttgagctagctccggggaatgtggtgatggagatcaatggtgagggggatcaatccgctagcccggtgcttgatttggtggataggcgcactcaatcttgaatccggtggtgttg

SEQ ID NO: 24619 - DNA, 20046 bp, Oryza sativa
gaaattcagctgcatctgaatttagtactactacactttcacaatttgtactgtgcttaactgacctaccgcatgttataagaagacaaatacatatactaatgtatatacattagtacagtacaataaaattgtcacacttcaagcgccagttcgttaaaaaaaaggtgaggtacagcactcgagagtcgagatgtgctatgagatactgtaacaagtatatacgggttaaggataagattcagctttttgctaatccatgcgtgggcatataaaagtctttgcagtatgcacttttggggggagactttttccactcttcttggacactaatcccagaaaaaagattgtgcagtacttgctctatgaaaaagcaagcagattgatcaaacaatgatagagctttatgatttgttaatggttgctgcattaccaaatgcagcttgtcaaaaagagccgttgtcccatttcagccatatcggcgccagaagttgataatcacatccacctactctcggaaaaaaaagggggggggggggggggtccagcgacgtgtgagtgacccgaaggaatcactagtactttattttgtcttggcctaggaagcttaatcatgtagtaccgataattttataaggcaggaggtggctaagcaagtactccctccgtttaatttgtttattataccagcactcagttaagatacttactcccttcgtcacagaatataaatatttttagaattagacataattattaagaaagttggtataattaaatggggaagtgttgtgattggagtagaagtaaaggtagataggaaaattaaatgatggagggttgtgattggttaagaagagaatattggtagataacttattatattttgagacaaattataaatactagaagttgttatattttgatacggattgatggagtatcttcttactaccttctaaaacatatgagatatatcttccccttctcaccattcatccagcggttatactagtactaatactcttataataaaatgtaatacttactctaaaagagctaattagaatagagttaatgacggtagtaatgtaatttgtcaacacattctaatttagggtacgatttgatgaaatgaaactaaaatgaaaggtgatgaagtaaggtgatcactgttatatgggacccataactattgagcccacatgtcggccaccacgtccaattcccggcggctatgcaacggccggggacaggtcatacctgggcccaccttaccagaggctgtcaagatgggcccacacgccattcggattgtagtcggagggctcggaggtgatccgaccctgctgcctcctcgcctcgcgccgtctataaatgctggccgatttccactgactcctctgccacacagaaggcgagctctcgaccgccactactgtacacggcccagagcgagcctcctcctcctctgcaccaccggagatggcttccgccgcgctgccggaggccgtcgcgccgaagaagaagggcaacgtccggttcgccttcgcctgcgccatcctcgcctccatgacctccatcctcctcggctacggtaactaatcaaagcgcattcacttcccgcccagcacagcacgagctgctgcttctccccagcatgggcgctcatggcgatgtgcatgtgaccttgcagatatcggggtgatgagcggggcgtcgctgtacatcaagaaggacttcaacatcagtgacgggaaggtggaggttctcatgggcatactgaacctctactcgctcatcggctccttcgcggcggggcggacgtcggactggatcggccggcggtacaccatcgtgttcgccgccgtcatattcttcgcgggggcgttcctcatggggttcgccgtcaactacgccatgctcatgttcggccgcttcgtggccggcatcggcgtgggctacgcgctcatgatcgcgccggtgtacaccgccgaggtgtcgccggcgtcggcgcgtggcttcctgacgtcgttcccggaggtgttcatcaacttcggcatcctgctcgggtacgtctcgaactatgctttctcccgcttgccgctgaacctcgggtggcgcatcatgctcggcatcggcgcggcgccgtccgtgctgctcgcgctcatggtgctcggcatgccggagtcgccgcggtggctggtcatgaagggacgcctcgcggacgccaaggtggtgctggagaagacctccgacacggcggaggaggccgcggagcgcctggccgacatcaaggccgccgccggcatccccgaggagctcgacggcgacgtggtgaccgtccccaagagagggagcggaaacgagaagcgggtgtggaaggagctcatcctgtccccgaccccggccatgcggcgcatcctgctgtcgggcatcggcatccacttcttccagcaggcgtcgggcatcgactcgtcgtgctctacagcccgcgcgtgttcaagagcgccggcatcaccgacgacaaacacctcctcggcaccacctgcgccgtcggtgtcaccaagacgctcttcatcctcgtggcgaccttcttcctcgaccgcgtcgggcggcggccgctgctgctgagcagcacgggcgggatgatcctctccctcatcggcctcggcgccgggctcaccgtcgtcggccagcaccccgacgccaagataccttgggccatcggcctaagcatcgcctccaccctcgcctacgtcgccttcttctccatcggccttggccccatcacgtgggtgtacagctcggagatcttcccgctccaggtgcgcgcgctgggctgctcgctcggcgtcgccgccaaccgcgtcaccagcggcgtcatctccatgaccttcctgtcgctgtccaaggccatcaccatcggcggcagcttcttcctctactccggcatcgccgcgctcgcctgggtgttcttctacacctacctcccggagacccgcggccggacgctggaggagatgagcaagctgttcggcgacacggccgccgcctcggaatcagacgagccagccaaggagaagaagaaggtggaaatggccgccactaactgatcaaactaaccgcaaaatcaccaaatcctaagggttttcttgcaaaaacgtgtgctgtactggctagctagcaagtagtagcagcaacgtgggaagattcgctgatccggcgttgctggagagcgacggccggcgacgacaaagctgagctccagctcgagacttcttaaaatcatcttcaagtacatggattttattttgctctttgctttgtccgtaaaagttgtactatgcgatgaagaataccagtatgtagcaaggctgaggttgtgtgtagctactagaagtgtcagtcacgttgttcttgtaagaaatgtttaactgttaattaagcagtattgttgcagtaatcaacaaccttagccagttattcctcgatcgctgcaaggggtcaagcatgactgcatgaggttagaaaaattggcggtggttcgaggattctgccgagtgagtcaagcaagagacagtaaagtgtgaagaaaaaaaaaactatctgtcccttttaaaatgttgtcacggctggttgccacggagaaataatgaagttttaaattaagttgttcgactcaatcacgggatcggaatcttgtgacgatgcataaagcagccaacgcctgatacgaagtttattattagcgctctcacggtctcactgattagactacctaatggtttacgaatgtgtcattatgctagtgagcatgcacgctgcacaagtgacaattccaattgatattttttttgtttcatgaagaagttaacaagaatgcacaatgataaatactgataattgataattccagctttgaatttttgtttcatggagaagttgccaagagtctttccctgtacgcggcggagtcctctgcttccatggccgtgtcgtccatgccgaacaccttgccgatctcctccagcgtctggccgcgcgtctccgggaggcgagtgaagaagaacacccacgcgagcgacgagatggcggcgtagaggaagaagctgccgccgatggtgatggcgctggagagcgacaggaaggtcatggagatgacgccgctggtgacgcggttgcacgccacggcgaccgcgaagcccagcgcgcgcgcccgcagcgggaagatctccgaggtgtacacgccggacatgggcccgaggccgacggagaagaaggcgacgtaggccaggatggacgcgacgcacaggccgacggcccagctgggcacctgggcgtccgggctgccgcccacgacggtgagccccgtcgcgaggccgacgagggagaagaccatcccgcccgtgctggtcagcagcagcggccgccggccggcgcggtcgagcaggaacgcggcgaccaggatgaagaccgtcttggcgaagccgacggcgcaggtggtgcccaggagctggtcgtcgccggtgatgcccgcgctctggaacacgcgcgggctgtagagcacgacggagtcgacgcccgacgcctgctggaagaagtggaggccgaccgccgcgagcacgattcgccgcatggccggggtcggggacacgacgagctccctccaaacctgcccctcctcgccgcctctcttcttggacacggtgaccacgtcgccgtcgaggtcatctgggatgccagccgccgccttgatgtcagcgagccgctccgacgcctcctccggcgtgtcagcgatcttctccagcacagccttggcgtcggcgaggcgacccttcatgacaagccaccgtggcgactccggcatgccgagcaccatgagcgcgagcagcacggatggcgccgcgccgacgccgagcatgacgcgccacccgagggagagcggcaggcgcgcgaaagcatagttggagacgtagccgaggaggataccgaggttgatggagacctccgggaacgacgtgaggaagccacgcgacgacgccggcgagatctcggccgtgtacacgggcgcgatcatgatcgcgtaccccacgccgacgcccgccacgaagcggccgaccatgagagtggcgtagtcaccggagaaccccatgagtagagctctggcgaagaagaaggcggcagcgaagacgacggtgaaccgccggccgatccagtccgccgtcctccccgcggcgaaggagccgacgagcgagtagatgttcaggatgcccatcaggatctccacctgcacgtcagtgatcttcaggtctttcttgatgtacagcgatgcgccgctcatcaccccgatgtctgcaaaattttggcgcgaacttgaacagtcagtgctcgctgacagtacactacacttctgaaaacaaattcagaccacatctgaagatttttctttttttttttttttgagatgatgtgaatacgattgtactacgagtaccatagccgagaatgatggaggccatggaggcgaggatggcgcaggtgaatgcatagctggcgttcttcttcttggggtcgacagccatggccgtgagcttggtggattcgcggcattgtagtttgcagcttttaaggaaaaagcaaacgccgttaatctgatcgaacaagcgattgaaacgttggctgatctacgcatgcatgtggaaattaaacacaacacattgaacacgaaaactgactttttaaattttgtaagcgtctgcgtgcaagcaacttcaaaaatcctaggcttatttgactcctggagtccacaatatttgcagccattttaaaacctatattaaccaactgaatgtgctcagattatcctatctccaaggaacgctgagctcagtatctccatggaacattaattgattaatacaacttgaagtagcatgtagatagaagtatagaatgggagtggattctaatccctcgagggggatatcccctcgtatatctttttcttcaaattcgatgcaaataattgtgaaaaattttgaaaaaaaatcgacaatatagagtataatgatacctagtagtccaccaaaattaatgttcaattttgatctacacatcgagaaacaaaaaagataaatttagatataaatagtacgctactattcatacgctgaatttgtcttttttatatctcgacgtgtgatttgagtttggacttaagattttgtggagttgtatatatgtgttgtatgaatgttgtcaaatttttccagaatttttcataacagtttaaatggtttttaagcaaacgagggaacatcccctcgagggattagaatagtttcccatatagaacttaacgcattgctcagaatttctttttagtaaaatttcacaaaactacatatactttaataaatttccacaaaactacaaattcaagccatagtatcacaaacttatagatttaggaacgaatttatcataaaactatatattttagccattgtatctcaaaactacaaacttagtggatttttttttcacaaaactacagatgcatccattttctcataaaactacatttttttttgcgaggataaaactacacattttaaaatttaccatggtaataggtgtatggataacacatctaaaatatgtagttttgtgaaaaaaaaagacaatactaaatttatacttttgagatataatagcttaaacatatagttttgtgataaaatcatttgtaaatctttagttttatggtactgtggcttaaatctgtagttttgtgataattttatcaaaatatctatattttagtaaattttactcttttgttttctccgattattctgccacaacaagaatatcttgatcagttgctctattttcaagtttaagaagttagatactttttaataatgaaaatggtttatatcttcgacctctgcacaaccactaagttttggtatctataatataaacttaagacaatgtgacaaactcccaactctctctagaaaaggttcaacttaaaaaaatgtctcaaaatcatattaattctaacacatcatatagtagacaccacattatctaaaataaaataaaaaactttgactattgattttttttttgaaatgataacctcagagaggatagggagtgcctgttttcatttaagaagaagagacttggtccagtttttgagggaaaaccagtcccaaaaatctcatataggcacggtttaaggggaaaaccgagcgaaacccacacaaagaacaaaccaaaaaacttgcgacaacacaactcaaggacaaaggacatcgttgccgagctcaaaagagcagctccgacttcctaactatacaccacagaccatgtagggcaggatcttcaagacaaagcctccaaggaggaaggtagcgatcaacgccaaacaacgtctgtccgaacaccggaagaaggttttcacccgaagaaatgggtaagcaaggaaacgacgccttcaagaaggaaatcggcgcccacatgcgtcgacatcgtaggctcaacccaagatggagtagggccttcgccctggctctctctctctccctgccaactacaacaacccacgctaccacagcgaagacaagacgaaagcggaagagggttatcgttgccgagcttgccacttgacaagcagctccgactcccccccccccccccccccaaatgactatcgattttaaaagtatgagtttttttgaagtcactttggagtacttctaaagttagatacagttgggccaagagtgagcccagctcaactccggcctgggatcccaacgctataagcccacgtagcagagtcagtaaacccagccggccgggccgtgtgctccaagttggagtccgagtcgtggctcttcacagaaacaggcgccgaattggaactggactcctgtactgtacatcccaagaataaatctgacacaacacggtaaacacgacccccagctaacttcaccaaaacaaccgtgtaccggcgccatcagatggcaaagcgagccaggacgctcaccggcgatcacctccgctcctcctcctcctccaaccaagccccctcttggggtgctaagcgagcacgcagcggcagcgctctccgtgatcggtcgcttcccgattcagagtggtacgtcacgtacgtgtcgaagcttctcttcgacaggtttgctcttttttttttcttccctcaatttgatccgattcgatttatggcgggagcaggagagactggtcgagcattgggaatggcccggcgtggctgatctccgagcgcgtgctcgccggcgacgatgtcgcggactacgtgagcttccgcgccgtgtgacgctcgtggcggcagtggatgaccagccctcgcgcgcacggcccgctcgacagccgcttccacccgcggcaatgggtcatgctccgcgactagctcgccgtccccgatcgccgccgcttcctgaacgtctcctccggccgctgcatccaggcggacctcccggagctccggggccaccgcgtgttcgggcccaccgcggagggcctcctcgtcctgctcgacgaggccaccttcgccgtccgcctgctgaacccactcacccggcagctcaccgacctcccgccggcgaccacggttctggacccgaccagcctaatgatttcccccgtacactacctcctccacgttctcacggtgcacggcgccggcctcgccgacggctccgcgacggtggtggtctacttcgagaacgcacgtaagctcgccgccgccaagcccggcgacgagcggtggacggtggtcgaacccgacgccagcttcgcctccgtctcgtcgttcgcgggccgcttctactgcgccacccgccacgccatccgcccggtgatcgtggaggtgaggacgacagaccaccggctgccgccgcagctggtggtggtcgccaagctggccggggtgccttccttcccgcggaactgttagaataattgggctaggcccaatttataatattaaatctcaaaggcccataataaatgttgaggataataataccacttcaggatttaagcgagaaatatctcaacctaaatagggagttattagaggctccctgttgaccagttgaggtgagggtcggaatgccacacgcgcgcgcgcgcggggcgtgggcgaggttgcggcgtcacgtcgctatccttttgtagccactaacccgagggcgaggcgtggcgcggcgcggcgtgcgtcacgtcgctatccttttgcagccactaacccacgttcccacgattccctccgcaacagcgcatccacgttctttctcctgataaataaggaggccacgagtccgatccgacttcttcgcttctttcccggtgttagtttcttcttctccgcgcctgagttgctctcgcttccccgcttctgatctcttgcgcgcacgagagattggaaggagcaatgcctccgaaaccacaccttcgcctgagatctgcaccgggtaggcgggtgatcaggtttttggggagtgcctcccgcacgactgctcatcgccatgtctggagttgctgccgccactgctggcggaggtggtacgccgccgccgacaggagctggatctggatccggagctggtgcgccaggaggaggtgccgtgaacgactacaacaacggaggcaattctgcctcaccatccagcggagagccattctcggggtataatcttctcctcctgctactgctgttagcgctattcatgttcccattgttagcgctatactatgtgcgctatgttcttgttcctgttctacatgatgcctctagcatgttatcgcgttactggtatgttcctgttcctgacattcatgatgcgcatagtatgctactggttatgttaagatcaccctacactgcttatgccatgatcattgtttcattttcttggattaaaatatgtcgattaatgactatatttccaacaatccaaaaacctgataggtcattttcggtagttggctttgctgctgcactgaaaccacatgcttttgatggttcaaactataagagatggaaagcacgtgcactattgtggttgacagcgatgcagtgcttctatgtttcacggggcaaacgaagtgaaccacctctttctcctgaggaagaggctaagttcgaggcttcggattgcctgttccgtggagcattgatcagtgtactcgctgacaaaatagtggacgtgtacatgcacatgccttctgggaaggacatgtgggatgcacttgaggccaagttcggagtttctgacgccggcagtgagctgtatgtcatggagcagttctatgactacaagatggtcgatgaccgttctgtagtagaacaatctcatgagattcagatgctggctaaggaacttgagaacaacaactgtgagttgccggacaagtttgtggcgggtggcattattgccaaactaccaccttcttggtcggactttgccacttctctaaagcacaagagacaagagttcagtgttcctgatctcattggctctttgggtgttgaggagaaggcgagggcaaaggacgtccggggcaaaaaggttgagggaggttctagtgccaatatggtacagaagaagaaccctcatgcatcccacaacaacaagaaagtcaagcctgatgtctaacccaaggctgcaaccaattttaagaagaaaggcaagggaaaggcaaagggagactgctttgtgtgtggcaagtctgggcattgggccaaggactgtcctgagcgcaaagacaggaagtctgccaacatgatcattagcgagggcggaggaacatcggggtatggtaaaatattacctacagttctctctgtttttcattcacctgattggtgggtggatactggtgctaatattcatgtatgtgctgacatttctctgttttcttcttatcaagtcgggagaggttcctccttgttgatgggaaacgggtcgcttgcggctgttcatagtgttggtatggtcgatctgaagtttacttcgggaaagaccgtgcagctgaagaacgtgcagcatgtcccttcaataaagaagaatctagttaacggctctctattgtgtagagaaggttttagacttgtgtttgagtccaataaatgtgtcgtatctaaatatgggacttttgttggaaaaggttatgacagcggaggcttgttccgcttttctttgaatgacatgtgtaataatcataatgctgtgaaccatattagcgagaatgatgagtctaatgtgtggcattcgcgactctgtcatgtgaatttcggttgtatgacgcgcttagctaacatgagtttaattccaaaattcactttggtcaaaggttccaagtgccatacttgtgttcaatcaaaacaacctcgcaagcctcacaaggcatctgaggcgaggaatttggcacctctagaacttgttcattccgatttgtgcgaaatgaacggcgtgttgactaaagggggaaagaaatatttcatgacactgatagatgattgcactagattttgctatgtgtatctattgaaaacaaaggatgaggcattgcattactttaaaatctataaagctgaggtagaaaaccaacttgaaaggaaaatcaaacggttgaggcctgatagaggtggggagtatttttccaatgagtttgcatccttttgcgaagagtttgaaattattcatgagatgacgcctccctattcaccccaatcaaatggggtggccgaaagaaagaaccgtactctaactgagatggtgaatgccatgttagatactgcggggctttccaaggaatggtggggtgaggcagttttgactgcgtgtcatgtcctgaataaaattccaatgaagcataaggaagtaacaccattcgaggaatgggaaaggaagaaattaaatctctcatacctacgaacatggggctgtttggccaaggtaaatgtacctatagccaaaaagcagaaacttggaccaaaaactgttgattgtgtgtttcttggttatgctatccacagtgtgggttatagattcttaatagtaaactcggagtacccgacatgcatgctggtacaattcttgagtccagagatgctacattctttgagaatgaatttcctatgaaatatacacctagcacttctagtaaagaaactgtcatgccccatgagcactttgcaccgatagaacacgatgatcaaacgcctgaggaaaatcctgaggaggacaacattgtagatactcgcaagagtaagagacaaagggttgcaaaatcttttggagatgactacattgtatccctcgtggatgacaccccaagaaccatagaagaggcatattcatctcctgacgctgactactggaaggaagcagtacgcagtgaaatgaactcgattatgtctaatggtacttgggaagtcgttgagcgtccatatgggtgcaagcccgtaggatgcaaatgggttttcaagaaaaagcttaggcctgatggtacaatcgaaaagtacaaggcaaggcttgtagccaagggttatacccaaaaggaaggcgaggacttcttcgacacatactcaccagttgctcgcttgaccacgattcgagtactacttgctctggcagcctctcatggtcttctcgtccatcagatggacgttaagacagctttcctaaacggagagctggaggaggagatctatatggatcaaccagacgggtatgtactagaaggtcaggagggaatggtgtgtaaactattgaaatccttgtatggcctcaagcaagcacctaagcaatggcataagaagtttgacaccacgcttacctctgcaggctttgttgtgaacgaagctgacaaatgtgtatactatcgctatggtgggggagaaggggtgatcttgtgcttatatgtcgatgacatactgatctttgggaccagccttaatgtgattgaggaggtcaaagactatctgtccaagagttttgaaatgaaggatttgggagaggctgatgttattcttaacatcaaactacaaagaggagatgagggtgggattacacttgtgcaatcccactatgtggacaaggttttgagtcgctttggatatagtgactgcaagccagctcctactccttatgatcccagcgtgctattaaggaaaaaccgaagaatagcaagggatcaactgagatactctcaaatcattggttcattgatgtacttggctagcgcaacgaggcctgacatctcatttgctgtaagcaagctgagccggtttgtctcaaatccgggagatgatcattggcaggctctggaaagagtaatgcgctatctaaagggcactatgagctatggaattcactataccgggtatccaaaagtactagaagggtatagtgactcaaactggatatctgatgctgatgagataaaagccacaagtggatatgcgttcacacttggaggtggcgctgtttcctggaagtcttgcaagcagaccatcttaacgaggtcaacaatggaagcagaacttacagcactagatactgcgacagttgaggccgagtggcttcgtgaactcctgatggatttgccggtggttgaaaaaccagtgccagctatcctaatgaactgcgataatcaaacagtgattattaaagtgaacagttcaaaggacaacatgaagtcatctagacacatcaagagaagactgaaatatgtcagaaagcagaaaaactccggagtgatagcattggactatgtccaaacggctagaaatctggcagatcagtttaccaaggggctaccacgtaatgtgatagacagtgcatcgagggaaatgggcttgatacccacctaaggttgcataatagtggaaacctgtccattgtgatcggagatcccgtgaatttggatggtgaaacaaactattgtgtgactgagagaagagacccttgaaaagggctcattttcatgatgtgcttctcttctttcctgcatggtaggatggcttatgtcttaatgtgatccgagtggcttttccaagcagagatgttgacctgcagaacatctcagaaggaacacacctatatgagttcgactgctagtcacagtctatgaggtttgggcaatctctagatactcatgaaaggcctggagtttgacttatatgctccaaacagaggggatgcgaacggcagcccagtaccagtcaaggttctgagtgaaacctgatcacacaaaacttacaattcaaggcatagtccattgttcagttgtggtctgatgtagctcatttcctaggtggaagttcaacttaacagtctccaccaaaaccctggtatatcaaacaggcacaacattgggaacatttcttatgagccttgaaatttggtggggattgttagaataattgggctaggcccaatttataatattaaatctcaaaggcccataataaatgttgaggataataataccacctcaggatttaagcgagaaatatctcaacctaaatagggagttattagaggctccctgttgaccagttgaggtgggggtcggaatgccacgcgcgtgcgcgcgcgccgggctggggcgtgggcgtgggcgagggcgaggcgtggcgtggcgtggctggcggcgtgcgtcacgtcacgtcgctatccttttgcagccactaacccatgttcccacgattccctccgcaacagcgcgtccacgttctttctcctgatagataaggaggccgcgagtccgatccgacttcttcgcttctttcccggtgttagtttctccttctccgcgcctgagttgctctcgcttccccgcttctgatctcttgcgcgcacgagagattggaaggagcagtgcctccgaaaccacaccttcgcctgagatctgcaccgggtaggcgggtgatcaggtttttggggagtgcctcccgcacgactgctcatcgccatgtctggagttgctgccgccactgctggcggaggtggtacgccaccgccgacaggagctggatctggatccggagctggtgcgccaggaggaggtgccgtgaacgactacaacagcggaggcaattctgcctcaccatccagcggaaggccattctcggggtataatcttctcctcctgctactgctgttagcgctattcctgttcccattgttagcgctatactatgtgcgctatgttcttgttcctgttctacatgatgcctctagcatgttatcgcgttactggtatgttcctgttcctgacattcatgatgcgcatagtatgctactggttatgttaagatcaccctacactgcttatgccatgatcattgtttcattttcttagattaaaatataccgattaatgactatatttccaacaggaacctgatgcccgaccccaatttctaccgtacgccgcacgacctgcacctggtcggcaatggcggcaggctgatggttgtccaccgtagccgcagctaggtctcgcactcgcacggcggcggccgcaggagcagcaagtacagcgtgcactgggtgtatttcgattcgaagaggacggtgtccatggtcgtgactcgctttcgccggcaagccctgttcatcggcgcgtaccgtgcgatttcggttaatccagaggcgttccccggtatcagcccggacaccgtctacccaggctttgattgcgatgataaaccgagctcgcagcaagttggtggtggcttggatggatccaacgtggcatttccacatacagctgttgattgtttatccctatgtataagccagcctccgcgtcgctctcacgcgggtggctcggggcgaaaccctagccgcccgcgccgccaccttccccacccgctctagccgccctcgccgccgccggagcccgccgccggaaaccgcgcggccggccaggaaggcggcggcggggaaaaccagccggcgacgatcctccccctcggcgtgggaggtggagtggcgagcgtcaggcggaagacggcgtccgaagaggtccacagggcgaatccggccacgccggaggcggattcggccccctcggcggctgatctggcctccccgtggccggatcgggagctggcgactccggtggcggcggaactcgcggggcggtgcgtcgactggcagaggaggctgacgtcatcgccaagcacgtctctgaccggcggagctcgcagcgacggagatggtagcagctggctggcggcgggaggcgcgggagaaggcagcaagtggccggcacggctggcggcggcggagggcggcatggcgcgcgcgaggaggcacgtgcggtgagaggggacacgcccggcggcaacgtaggctggcgaggaggcgcagacggcggctgtggaggctggcgcggccggcacggagggaggtgaggccagcggaaggaacgggccgttggcggaggcttggaggctgtgaggccagcgtgggcgcggtggcttcgctgagaggccggcgcggacgacggcatggaggccgtcgtggcgagtcctccagaggcggcgaccggcgaggtgcacggcgagcacggcacggtgcggcggcgagcctaccgcattgggaggtcgggtggtcagaggcggtggcgatgcgaccaagtggcccctcaagggcagcttggttgaggcggcgacggcggtaacgccatgaggtgggagttgaaggctgcggcgatcttttctccaggcgtcagtcctcttgcggtggcggcttgccgctgcaagatgaccacgttggacgggccagtgtgggggagagaggattcatccttctctctcaccctttccctttccaacccgcccgcgtggatggagccggagcgagccgaagtttgagatcctttctgatggccgaccggcggcgaggcgtcggcgcggtggccacgcgttgaagaggattagctggtggtggctgttgattctgacgagcactcgttgacgcgggggaggaggaaagcaatgggtgaaagcctagccttcgggccggcaacggcgacgcctgcggggcgttgttgcgctttcctcctttggtcctttaggtgaaaaccacatcctgttctaggacgggcgacggcggtgctctttggcgtcgcttcctccttggaggcgtcgtttagaagttccattcgtgttgtgtgcttgttgggtttctgcagtgggatcagacgtagacgcgtggtgtggttgtattttctttttcctgactgcagtctcccaggatcgtaatcttgtattttttttcttctatatcaatagaaacgtcgcaatatcttgtgctggttgtttcaaaaaaagtggtatttgaataactgttttaatttgaagagaaatgggtggaaatttgtcagccatgggaggctagtgcaccttaattaatatataaaaaataaagaactaaatatagagaaaatacgattaattaattaatctcaatgatggtaaatacattcccagtcatatgggctgtagagcctgagcgtggacctgccagagtacttaagccgcttgtggtcgtctttgtcggtctagagtaaatttagtttctgaggtactaaaattttttttatcttatagtacctcacaaaaactgtaaaattgctcacgataacatggatctgtcctcgtttttctttttcaacgagaaagaatcctcacctctccttggcgccaaggacgccgaaatacacgaggaaccacgcgaacacgatgatcgcggagcacgcgagcaagttgccgtacacggctgtaacctcgtaaacccacgcgaagctccacaggatcgccgccctgacggcccggttcacggcggccaccgcggtccgcagccaccgcggccagccactggacgacgacgcgtccgccatctgcacggggccgagcaagagccacaccagcgccatcagcgacatcagcatggtcgcggacaggctcctcgcccacttcagctgctcccgccgccgcttcatgcccatggcaacgccgccacggtgggcgtgaggcgacgacgggtggtcggccggcgccggcgcgcgcctcgggcagcagccgccggcgagcgctttcaccagcagccaggcgagctcgagcagcaccgtggagacggcgaagaaggcgaacacgacgaggccgaacgccacgagcgccctcgtcatgcgcgtgtcggacgggacgccggcgtcgcggaacgcgcgctgcacgtacaggaacatggacccgatgcccgacgcctgctggaatgccttggcgaccagcgcgctgacgatgttgcgccggaccggctccgtcggcctcgccagcagctccagccagagcgcgcgctcctccctccaccgggttcgccacgccggcgttgccaccgtgtcgtcgcagccgacgtcgtgcggctcgccgagctccgtttttgtctcgagcagacggagctcggcatcctccagtgacaacgtcctggagaggacgcgacgtgcgtggtccttggtcaagagccactgtggcaactccggcatgaggaggacggcgaagccgagcaacgccgggatggccgtgccggtggctacggtcagccgccaggcgacgcgcacggggaggttcaagaatctcggggagaagcagaggccgccgaggatgcaaccgaggcacacgaagccgtcagggtgcgaggtgaggccgcggtgcagcgacgacgggctgagctcgccggcgtaggccgggacgctcatgagcgccaggcccatgccgacgccgttgacgaagacgccggcctcgaacgccgcgaagctggtggcgagcccgcgggcaagcgcgcccgcgcagagcaccgccgccgagagcagcacggtgcagcggtcgccgacgacgcactgggctcccacggcggcgagcgcgccgaggacgcaggacgcgacggcgacgcacgccaggagcttcacgccgggcggctccggcagcgtggccgagccgcacaccatgacgaggtctgcatcgatcaccaatgcgctcgcaagatcacgccgtgcttgatggacagatcgatgcatctgcgcgcgcgcatggatgggatcgctggttcttaccgtagcccaggaggagaggcgtcgccgacgagagcacggcggtgacaaagccatatttgttcttaggacgcctcatctccggcaagaaaagaacaccgtctctattcactaatcctaccaacaaatttcgagtggtgaatgctgatgaaattctctgcaaatctgataaaaagaatactgatgcagatgagaggaagcgatttgagtggatctgtaaatcataagagcacgaacggtctcaagacgaagatggctctgaatcatacccgtcttaaacacaacgatcttcccaacacctgattttttttttcaaaggtaaatctcttctcataacactaatccaccttcagaatcattccaaggcttccttcttctcgttgaaatattggagtttcctcaactctcatccatgtgttgtgatctcccttttgaaagacgcagctgctgttgcagcgacgacgtaacaaactcctgaaaccaagtagtccacggccgaaaaactctctccaggtagttcattagtagcaacagctaaccgatttactagggagcaagtagttaggcttgaaaatgccagtcaaagccatactttccgaagataataatagtagaagatatatataacattttacatcctacaggagcaatagatagacagatttccaccgaaacatcatttgataaatctgaatacccatcctgaatcctgcatccgccacaccctatgagcgttgtacgatgttggattaaacacacaaacataagttttgctacttcttccgtttctcaaaatatagtaacacagtactaaataagacaacatagatccatactactaaattagttctcatg

SEQ ID NO: 24620 - DNA, 3553 bp, Oryza sativa
ttatccaaattcaaacagttcagaccccccacccccaccccacccccccgggcgggaatagttcagattcttacctgatttaaaaacctacaagcttcagcctaaagaaatccaagaaataaactagtagccaaaaactagaaaaacgagtttctccggattgtcaccatcttctaagaatctctagctcccaaaacatgtagttgaggaacataaatacagagcacgtcaagactggaacaaacatgaacatccagattaagcaccaagtataactgggtatatatcgatctgttatctgtatgacttaaggcacggtacaacgacaaggtaacatcatagcgaactagctatgccataagtttctccttttggagtgacgaacagctacatatatcaaccatgttcctgaaggtaaccgagactatatatataagcggccactacagttctcagaagtatccagcattttgggctgtcctgatgatctgaaagagagctgcacaaagaaaagagtagaaaacacaatgacttggtaagatgttcataaagttatgatgaaaaagatggaaactactgccaaggctgtaatgaagactgaaatagttgcaggatttttcatgcaaggagttctattttaccaacattagactgtctgttccatttgaatccttaactagggtaacatcaaaccttcctcttctattttccaaagtcttaaggagaagcatatatttttttgagaagtttataagcatataaggatttattgcctggcaacagattagtagctgatgtccatgggtgtggtagctgcagcagttaacaaccatatctggagtaaaccatgagactatttttggaattaatcagagcaggaatctagcttcttattctttgaaaaggatttgactaatctaagatcaaaacaggaaacacatagatactttcccacaaagtgataacatcctaaagcaaaactaatgatgtgtactacagctacccccatacacgactactgataatagtactagattagcactttcgcaatttagcacagtttagtcctggagagagcacagaagcaatacccataaaaacaagaactaagggtgaaaatagttaaaatctatttaggttggtaaaggcattctgagttatgaagagtatgagtgaagataaatagctcaaccattcaccacaaatatataaaaaaagaatgtaacttacatgaaccaacaaccacaaagacgaaaaatccaagcacaatgggtccaacaggataatcatttcctttcttgactgtctcaggaacagaacccctcttggtgacgttcttctcaaaccgtgccactttcctatctgagagacgccttgaggtagtctgtttcatcatcagcaaataatatcagaagatatcataaaagaacttgtttgaagaaaggaaagaaatatgcagtgtatttggacagaatcccaaggaaatgacattcatgatgccagtaaattcatacagaaactttcatctattcaggaaaaaaaatgttactcaagatgcaaagcacaatggtgccatcaccagctaactgatgcctgctaccaaatatttctgacaacatgttgatctgtccgacttgcatgttaagggagtaatttttacattaccccctagaaccagtaagcagggtttgaaagttgatcataactaaatccatcgaaattataaaatcaagcgtattgggtgagttatatgtttttgtgcctttattatatgtattagatgatactcaatggcacgtgataatgctgacaagaaaattagaaatgctttactatatcataaaaatagtaatatcctctgctcgatttggtggaccctgattccaaactactctctctgtcccataaaaaaaccaacctagtactggatgtcatcctagtactacgaatctggacatacctctatccagattcatcgtactagaatatgtcacatccagtcctagattcgtttttttcgggacagagccacagagggagtaatccctaatcttcacatcttatcctggaacacattttcgaatcaaagcataggagtcgaaaacaataaaaccatacattaaaatatatgctaaattgaagttacgcaggatcggaagcgttgtagtgtgctagacgacaaatgcaaaattgcatgggtcaattaatactcttcgtcgacatttcaaatgcgttataaagtaatctatatactaccaaatatgatggctagcccacgtaaatgcataaccaggttttctaggtctttgataggccaatccagaatatgcggttacatgaagtgatgtaatgcaagacaactagtgaatgttcgctctcggatcaggaaaatcaatctctgcgtcactgttattctaaacctgacattagttagtcagcaacaaaacttgataaacttgttaccagatcctctaaatcttgccaaaggataatattgaagcatagcctaaaaataaacatatcttttgttacgaaatgaacggtttaaactacaggtaggcacgatcatcatagaagtacactacactatctacatacaggagaaatatgaattcaaaagcaaacagatgtgcacagccacggatcttcctgcgaagattcagaagaagaggaacagaaacaagtaaaccagaaatcaacatttcgtcggttctatttcacaaaatcatcgccaggacaggggcggatccaacttgggacacccaaacttttcggggaacaaacaaactgttacttgtattaaggttaaggcactgaaattaagggaagagcttcttccagatctagaagagaagctagggttaacgaacgaacacaagcaaattccagaaccgatgggagagagagatgaatcagaaaaaggatgtgatgctcaccatgatcctctcccctgctctgctcgccagatggagatcgccgccactcccctgttcagccgcgactcgtcttggcggcgcaaggaggaggagacgagaggttttctttctgttacgccacaaagggaaggggaagacactcggagaaaaggggaaatttaactatttgccacttttaggtttaccaattatccaaatacccctcttatatttgcccttattttcttgcccctcttagcttgtagcttcttaattacttatttgccacttttgcccatgtggcatgccaacgtggcagcgcggtgcaaaattcgccgtgggacccactagtcagtagcacaactctccccttaccctctctctccgatcagccccgccgtccccttcattgccggtgaccctctctttcctggcaggtggcagcgaatcctctcggtggtagcggcggcggcgcgccggctcgcagtggacggcggagtgcggcgaggcggaggttggattcacggcgacgctcggttcctcctccggtgcactggctcgcggtggatgacgaagccctctttctccggtcagcctcccttctctccggtcaaccccgccgtccgggctgcaggaat

SEQ ID NO: 24621 - DNA, 5198 bp, Oryza sativa
ggacgctgccatcgaaacggatcgacgcaacacagcctccctcgacagggagccatgggaggaggagagggaggccccggaggagaagccgagcgccgtcgcgagttcaacttctgccttgccgcactccgccgcaaccacgacctccagtcgggaatgaaggagaggacgatggggctgaccggagagaggggaaagggagagttgtgtgactgacgagtgggtcccacggcgatttttgcactacgctgccatgttggcataccacataggcaaaagtggcaaatagttaaaagggcacaaccttagaagggcaagaaaataagggcaaatataagaagggaatttggatatttggcaaacctaaaagtggcaaatagttaaatttcccacagatatggcatatcttcacgtatgcggattgttctcgtgtacgccgaaggaatttatttcgaattatggaaaatatctctacgagtcaagtgatttccaaagtcctgcttggtggggataaagtttatgttatatcgtacaagatccgatgtctctgagttttacttggagatcaagatgatccacggtattaaggggcccaaggaggggtgcaaggcatcaaaattcatcaccaacacacccaccatagtttacgaagccagagtactcggagctaggtcaccgggagatctcgtcgggaacatcgactacgatctcgtcagtatcgtcagtttcgactactttctttgtaatctgtggttttccatcatcaatcccatataaactggagtagggctattacctgataaggggcctgaaccagtataatccttgtcttctatttgcttgatgtcatattacgtaaatccttgttccaacgtatcccaatacccaaatcatccggtctacgagtaccactcattgacagtggcacgccaggtaggggaacttggtgctcaaggttctacaaatatgacttcaagccatcccgacaacagtaccaacaccggcgtcaatcaaggagcctctacctcgacatcgctggtttggactcaagtcgggactattgtctttccggtctacaccgtcatgccgatctcgacaagcccaatcactattgggaacgagaacggcacggctatgacttcgagaaatgacgcttcgctgacaattcctcccacgcaagtggagaatggaacatcgacggccttagtacctggaaggaatcctcaagcggccgagttctgtcctctgaacaagagaccagagccgacaaggatacccatccagaaaccgaggtcttggtgtcccgtccataagacatccaagcatactctggaagattgcctcgtgatacttcacgcaaaggctgaactctacgcctgctggaaacgtgggattcaacgcacttcaccaacgggcaccacttattgcccgattcatagatcgagatcccacgatctcacaagttgcataatcttccttaggacattcaagtcgtcgcatcctccatcccacaaccacgagatcaatctcagtgcgttgtcgaggaacgagacgcagcgactttagatcggttcgtaggctttatcggtgtcaaccctagcgagccatccatgctgcacctactgaaagattacgagtcttcttcagactcaccacgagacgtgaacgtgatcaatggtgtcgagacaagtgcttccgcggccgcgagaacacctccacaacaactgcggaacctcgacgcaatattaagagagagcccctttgaccctgtcctaaaccccgatgtcgatcagtgggcggcacgactacgagagactgtgaccaacctcaacagcgcattcgtggatgcagcagtcgagcctccaccccaagatccaccgggagggaacggtgaaccagctaacgggaacgcggaagcgcaaaaccctactagggaaccaccggctcgagacccgactccatcgcgtcgtgaaaatcgtgaccttcatgaacatctagatgaccggcggagggacaggcgagattggaatgacaatgatcgtcatcagcatcgctctccctccagacgaggagagaacatcgctcacgtcaacaccgtcaccgttccctttcacgccgaggtgggaacgcggatcgaggaggccatcccaacggtgaccgagatcggcaggcccgtagcgaccaccaagacaatggagataacaattgagaacggaggcgaggcagcaacaacggacgagaacgtagctcccggtctcccgcctctaggcgagatcgaagacgtgaccaccgttcgagaagctgggctcctaaccctagtggaccaccgttcgagaagctgggctcctaaccctagtgatccctcgtcttcgtcttggtcatcttcttcatcggacaagcctcctcgacgacatcacaaccgcgggccacctttcgcccaaggaggcgtgtgcagagcgtttgcgcgcacattgcgagatgtgcgatggcccgaaaagttccggacaggggcgatcgagaagtatgacggaagcacagacatagaagaatttctgcaagtctactccacaattctctacgctgctagtgcatacgacaatgcgctggcaaactatttaccagacgcgttgaaagattccgctcgttcatgactggttcacctcccaccctactcaatctcttcatgggaagacttgtggtaacagtttgttgtcaacttccagggaacatacaagtgtcacgcgattgaggacgaccttcatgccctaactcaaaacccagatgaatcatagagggactatattcggcacttcaatgagtgcaggaatacgatccccgagatcactgacgcttctgtcatccgcacattcaagtcaggcgtccgagattgatacaccaaccaggaactggcaactcgaagaatcacatctgcttgcaaactatttgagatcattgacagatgcgctcatgcagatgacgccttgagatgaaaggaaggaaagagcagtgtaggtgaggagaagaagtcagccaacaaagacgcgccggaatcaagcaagaaaagaagtcgtaaaagtgggaagcgcaaaccctcgggagaggtcctcgccgctaagcaaacggacccacccaagcgctcgaacccccaaaacgacgactcgaagaagtaatggtgccctatacacaagactaacaatcactccatggaggattgttatgtcttcaaaaaggagctcgcgcgacaactagcactctagagagggaagcgagtacgtgttgtcgaaacggccgaagaggcggccactcccgactccaactccgcgttcccagagtacgacctccatgtcttgcacatattcggcggttctacatcgtacacctcaaaaagggagtacaaaaagatagaacacgaagtctgctccacgtcgcaggggcctaccgctaagatgagatggtcccaacacaagatcgagttctcggagacggaccacccgaagatcgcgaccacacctggtagatatctgatcgtgatcgaacccactattcggaatgtcaaggtagcacgggctctcatcgatggcagaagttccattaatctactcttcgccagcaccttagatgccatggggataccgcgaagcgagctgacgcccacagatcagcccttccatgaaatcactccagaatcatcatctaagccgctgggtaagattacattgcccgtcaccttcggacaagccgacaacttccgaacagagcagatcacctttaatgtcgcagagttcgataccacttacaataccatcattggaagaactgcactcgcgaagttcatggcagcatcccactacacttaccaagttctcaaaatgccaggaccaaaagggacaattactatccagggaaacgccaagttagcggtgcagtgcaacaagcggagcctcgacatggtcgagcatactcccaacccgcccgccacaattgagcaccccaagaaagtgagcaagcccaacaagaaaccgaagttagacggcgccatcaagattattccgttgtccaactccaaccccgacaagaccatcaagatcggggcaaagctggatgacaaataggaactcgcgttcatcaccttcctccgcaacaatgcaaacgtgttcgcttggcaactgtaacgccccgattttcgttcgggaataaaaatcaattaataatacattttctagaaattaaataaaatttaaatcaacttaatcaagtgaattattgagggaattaaaaatttcctttaaaaatcattggccgagaatattttgtaatattctttgtgccctaaaatactctccggatttttccgcaaattttcgaagctcaagaaataattttaaagtcacaaagatcatttaaccaattaaataaaaagaaaacaaataaaaatctccttccttcccttttgggcttggcccaagccttcccctcctctcccgcgggccgcgcgcctcctctctctctcggccggcccgcgccttgcgaaagtctgctttacgtcccccggtttccctcctctctctccatccggccgacaggtgggaccgtgggccccacctgtcagctcctacctctcgccggccaaccccaaccgccattgccgcccacgtcgccgcaaaatccggcgccctcccgcacccgagctcgcatccaacgacgtgggcacgatcccctccacgtcctccaccattttccccgctcgtcccacaaaaaccggcgccggccgagccaccaccaccccccgtcggcgccccactttcccgccggttgccgcccctctcggccccgtttccgccgctccgaccctataaaaacgaacccggagcatcctctctcttttcccctcctcacccgagccagccgcgctctctctccccctccccacgccgctcccgcgcaccgccgctttccggcgagctccggccgcccgccaccgctgctccacccaccgccgcgccaatccgccaccaccgtcggcttcgcggcaccgtgccgcagcccggcctctactccatttcccctctccgcctccagaacaccgccgcctcgtgcaccaccacctaccgcctccggccgcctctagccgccatcctcaaccacctcaagccgcgccactgcctcggttagatccaccaccgcaagggcaagcccgg

SEQ ID NO: 24622 - DNA, 11135 bp, Oryza sativa
cccggccgccgccgccgccagccttgtgtgcgcgctggccaggccgcgccgcccggccgtccccagccgtccaatcggccttggccgatctaaaccgtcgggtgcgcggccgcgtggccgatcgccaccgtggactcggtccacggtgggccgtgccgctgacgtgtggggcctgccccctttgtggacgtggtccgcgcctcaccccttgctgacgtcagcgaggaccatttcctttgtaaaaataaataataattgcgcaataaatcgagtttaattctagaaattcatttaaatggcttaaaacttctaaaattcatacctaattcattcgaactccgaattgagccattcaacttgcaaaattcatctaaaattgagctctacatgtttgtttagtttttatgtactgttttcttggtttttattagagtttttcctcgttttgcgtgccagcgtgtagttcccgtcgtttcggaagatcgcgttcgcaaggataagagttcagaagatccaagtgaagaagcaaggcaagtcacacattccccttgagcatgttgatcccaatttacaaatgttttactgtttgcaaataaatatgcatgttttgctaattacatggggtcagggttttacctatctgctcgcttgtgccatgtttacttgatatctgtcctttgtcaaccatgggtaataaatcgcctagctggtgttactttgatgacctagctagaactatatgcttagccatgcttaattaccactagctcagtcgatgggataattgcagtattagacattctagtatcttgttgagctgcgtgctcgagacatctggccattcttcagggtcgtaattatccaactaaaatgcgactgaatggtgggctgtgggtgcatggttttgctggtcgcacccatggcagttaaggaccggttcgcgggatgccctggaagaacttatcgtacttaccacaagccagcgtgggcaacggctgggcttgtagtgtagctttcctctagtcgacgcatccaggcaagggtgggcgtgatggagcggggcgggccctgcgacggtctctgtcgcttccggattcacctaggcacgagaggggactgcccgttgcccgctggggacgggggtgaaacctgaggtgtggtgtgcttggctagagggggttatgcgaagggtcctgtcacggcctctttccggtatgtcgtggtggcatgtcggcgcacggaaacgtgtcgtggggctgtgtcttgtgggtacagttgtacacctctgatcagagtaaaactattcgaatagccgtgcccgcggttatgggcggtcgaccagattcaccgtgattagtctcacacttaataaatcgacccaatacactgtagtttaggtgggttggttgggcctgttcaacgtggtgtagcgttgatcagtggagatttaaggttactttaattactcaacagttttactgtgttgctcaataaaatgttttacaaccgcctttatgcaaatagccacaaaccatccttgtatccccttgcacgtctgcatcgttggtgtggcttgctgagtacggtggttgtactcagccttgctattattcccccttttcagaagtgtagtgcttctgagctgaagatggagttagaggaccaaggctcagaccccagttgagttttgcctgtggagtggagctgaagccccgctaggatcatttttttttcgctgctgctgcttttgtttcggtgtgaggactaagtgcctcttctgtaagtattttacgcttattttacgtttggaactgtatattacttgtcgttttgtgtaccctggctggtcctggacagggatttaatacgcaaaatagtctggaaatttgggtgaaatttctgggcgtgacagcagccgtcagacatgtcgggagttcccagggaggcgattgagcacaaactgatggtgcaacccgacgccaagccagttaagcaaaaactatggagatttgcacctgatcgaacacaagtcatacgaattcgacaaacttctcaaaattggcttcatcaaagaagccctccatccagagtggctcgctaatccagtaatgatacatgaagccaacgggaagtggaggatgtgtgtcgacttcaccgacctcaataaggcatgccccaaggaccatttccctctccctcgaatagatcaactggtggattcaacagccggctgctagttcttaagctttctcgatgcttactccggctaccaccagatcaacatggcaaaagaggatgtggagaagacagcgttcgtcacgtccttcggtgtattctgctacaccaagatgccgtttggattaataagcgcaggcaacacatatcagtgcgggatccagggagcactaggtgatcagctcggacgaaacgccgaagcttacgtggacgacatcgtcgtcaaaaccaagacgggcgactcattgatcgacgacctaaggaaaacgttcgacaacctccgacgatatcaaacgaagctcaacccggagaagtgtacgttcagagtaccgttagggaaactactcggcttcctggtctccgggcggggaatcgaggccaaccctgagaagttcaaggcaatcgagaacatgaagtcgcccacaagactcaaggaggtccaacgattgacaggatgcatggcttcgttaagtcgtttcatccgcagggatgggagacgaggacaagctttcttcccctgctcaagagcaggacaaattcgagtggacccaaggagctgagagcgcgttgattgcgctcaaacgctacttgtcaaaccccccggactagttgccccacaaaataatgaagaattattcatttatattactgccacaccttattctatgagtacgtttatcgttgtagagagggaaagagtacaatacccagtgtctatgtcagcaaggccctccacgatgcaaaaactaaatatccacagatccaaaaactattctacgctgtgatcatgacatccagaaagctacaccacaacttccaagcccataaggtcatagtgatctcctcctcccctttgggagaagtcatcaggaataaagatgtcgtcggccgtattgctaaatgggtagtcaagctaagccattgaaatagggtggtccaaattgaaatgtaaagttagttgttctgtaaatgaaaagaatggttaaaggatgacataatatgaaaacttttaagaatacatagtacgaactgtaatttacttttttggtttagcacaattaaagatgagttgtctattacctggtactcttgtgatatactaagtcattagtacaattaaagatgagttgtccattactcaatagtcttgtgatatattaagtattgttgggtcagtgtacttggctattactaatagtctcatgatatgttgatgcatgaagatgcatacttctactaacacgagataattaattatggttatatagattcagctaaaaaaagataaaattaatgccatcaatttttctcaacaataaagcattcgactgtggtctccttttctcactgcatgatatacgattgtaggtattaccgtaattctttcatattatttttttctacatatacgttaatttggactaatattttttctcataattaaatatttaataaatcatttttcatatttctactataaaatgtgaagagggcattgtataatttgaaaattatattataagtgtatgtaatttaatgtgtaagatatgaacttatagtataagatttaactttttataaaaatgctgcatgatagtagataggtaatgaactaaacaaccataaaatatatagtgaatccattgtgtgttattgattttgtccttattctacaatatgtcactaggtttgtcaagttctaatatgccatcgcattttgcttaacttctataacataccatcgtcgtctagttagcttctgttagtattgtataattttatcataatgaccgaaatagccatgggacgaaaaatttcaaatatctcattgtaaacttccaaagtttgagatggatatcttctctgccttgtttataatattatattttggaatattctgtcaaattttggaatttctgtcccggggatatttcggtcattagaacaaaattatacagtactaacgaagtctaaatggacggcgacggtatattacagaggataagcaaaatacgatagcatattgtataacttaacaaactcagtgccatattatagaacagggacaaagtcagcggcacacagtggattctcttaaaaaataatctagtcaaaaaagtttctttattttattcaaaacaaaacattttttctaccaaacacgttaggagaacttcgaaagaagataagaaaaaaaaggaggtttagtcattagctcaaacacacgtggggaaaagctactcacatccatggtatggtatatactcacattaatcgataatatactaatattattaaaattattcttcgtcttaatacggtgtaaaactaaaactttaaccttatattcttctgttattccatcttcttctcgctttctcattcttatttatttttgataataatattgctacaatcaacactagtacttgcacatgaatactagcagctaactcatatgtgtgtgctccgtaatatatattatctatgtttttacatgagtaaacaacaattattatatttcttaatgatattgtaattatataaggtacctaactagttttctaagaactggaaagatatttttgttaaacataatctagaatgctataaagattaataatattgaacgatatataaccatataatttttttataaatgaattagagatcgactcttgttaagaatccaatgatcataatgcactatatatattgtttaagtgagttatgatattctatttaggatgtgtttgacaaatgggttatgagaggtgggattgagaaagggaaatggatgaatgattaggattaaatgaggtgtgatgaatggatagttaggatacaatactaccctttggagggtggaatattatttccctatcctatttgcaaacaaagccttactagttacatgtgtatgcattaaagtgggatctagagataaaaatcagacactgctcgcccaagaagcacgaatgcacgatataaataaaccctctaatcaccggatcaactaacacgaaaaatgatatatataaatcctctaatcaccagatcaactaacacgaaaaaacacggccctcactggcgtcgccgcgaattggggagatgacgaaatggtgtgaatgcgaagtggggtggtcgaaaccggtccgcctttatttgggttcatggagagagacccaagcaagcggcgagctcctctcgtgcttcccgtgtgctatctggctggctgcacagtggttcgtccgagcggtgagccggtgacgcgcttcggtgcttgcttctgagcttttgtgaatcgtgactttgtggctgatagataatgccataatggcacgccatggtagctttattgccattgctaacttcttgctttggctgctatgtaggcaaggcgtaaacaatttctgtaatgaagaatagtcaaaataatcaattgtgataaaatatcccgatgtaatttattatatgaaacattgtgaaaccctaacgattaaattgctattattatttacattcattttcgtggtgatttttggtgagggagattgaatgtgactatgttgaccatagggagagacgtaagcaagcttaaagcaaccagggcttttgcctacataatcacaattaggtccttttaaatcactattgaaagtttttttttgaaaaaaaagaacttaaaatctagtagttgagccctatgtgagttctaggttttggtaatttctgactccctctctgagcagcaataggttcttagtccgataacatgttttttagggtttgcatgggttagttaaaaatatatgtagactgatggatatactgccaagaaaggggagacaataaatgtaccttttttttattgttttcacaaatggcattagctttgttggatacttttattctctcgccggctcccgcgtcatgtaattgagtggtagaatccatcgttgtagtggtaagtagtcaggcataatctacttttggcatgaaatgtggttgtgagtattttacttactccatttcaaaatgactaaagttttaatattaggagaaaaagggaaataatctaaatacccctcattaaatgagaggtggttgggggtaaagcatgaagaaatttaaacgagggtggttggagaggaagatattactttcaaattacacttatttaagacaatttcaatgataaatttctaggccagaataatataatagccattaggttttgtgaggtgctatgtgtttctttttctaagtgaaaatataatattgcataaaaaggtacatcaaaggggaaaaaaggccaacgaaccaaactagcatggcatcattataatcaacaaagacacccaaattgcatacaaaagtacccataatcatcagctgcttcttatgttgacatcacagaaaacaaaatggataggatgtgcagatgcaatgcaccacactggcctacaccaaaagtctctagacatgcaaacactgatcaatggagtagtatcaacttagagcaggtataatagtaggtggtaagactttaaatattatatctgtgctgacatggaagggagaaaaggttaggaaacgcaaaggcgagcgcttcagttagcgctagctctagcacagcctccaacgcaaagtggtggggcccataagtgggagggcatggccagccaattggatggagctaagccgagtgatacgtaaagttagttgaataaaatattaaaagtaactatgactagcttaagtagtatttcttctttttatttacttttgctgaggtggattattttgcagcggctgcgctattaaccttgctcttattagtatgtcataatgaatggccacatgggtacatggcaccagtcaccctcttgtcaacagtccaaatgtccaatctctcgagtcttgagaacgacctttcactcggttcgtcatttttttttcactaacaccttgctcgttgaaaaatatacccttattaattccattattattagggagtactggagaaatctaagagattgttcaaataagcataacattaaacgctattccttctcaaggatactattaaatccccactaataaaaagatatttggccccttactcaaatcccatctaaacaatcactgaggtggcattaattaatgtgtagggttagatcaatggcaagatgaagggtgaggatagagaagcagagcaggattttgggttcggatttacccaaccctcttatccggttcgatcatgtgtttcttataagttatatgtaacatgtgtccataaactaatatatatcactcgagtgatttttaaagtaaaaaagtccatgaatataattataacgcctatattttttttacatggtcttcaataacatagtttgactagtattttatttcattctataatctcaacaaatataaaattagcatcacatgaaagtaattcaaaatatgaatctagtaatataacatgcataatacttagtatagatatagttaggccctgtttaaatcccaccccaaaatttttcaccatgtcacatcgaacgtttgaacacctgcatgaagtattaaataactgtcgacgttggatgtcgcgattccggtatttgcatagtatggggatcgttggtactaggatatacgcgagacttaggtaaaagagacggaggagaggatttttatacaggttcgggcccctgaattgtcaggtaatagccctacatcctgttggccgaaaccggtcgttgctcttattcaccataatcacaccagtacaatatttggggtagcctatctatctgttgtcgacttggcggtctgaagtgctgactcgtagtcgacaacagggtagtcttcctcctcgaatctgtgcccgacgaggtcagagatagcgctagattcctctctttggttcccgtaggtaccatattgggttttcccaggcttatctctgatgtcgatatctggcagtttgtcttggcgtatgtaggcttgtattggcctgtggctttgtggcgtctatgttgtctgtgtccctctcctcctaggcggtcttgtatttatacccataggtgtccccttgtccaagtagaactaggaaaatcagtatggatacaatccgagtagtccttgtcgttttcatatagaactctagttatctttccttatccggaactccccctatatccgaaggttgtttccgtataagacatggtatgtggtgggtcctgccgagatttagtcaactactattaggtatgtggtatccataaccctgacaataactaattacacatataggctaaaaaaataactaattacacatattgcgactaatttgcgagacgaattttttaaacctaattgattcatgatttgacaatgtagtgctatagtaaacatttgctaatgacggattaattaggcgtaataaattcgtttcgcagtttacatacggattctgtaatttgtttcattattatactacgtttaatatttcaaatgtgtgtccgtatattcaatgtgacacaccaaaattttacagccctaaatctaaataccctttagtatgattattactcaaaagctaccaagtttattttttaaaaaaaaacagggcgccctataattttgggcggcgggagtagtaaaagctatttttttttacactcaaaccagtccgtgtatgtgcgcgtagctcgcctgtctcaacgtaattaagtgaacgataaatcaaataaggcaaaatcttccaaggtcaaaatggaggaacccactatccccagattaccacgggccaaaattcggcccaacctgtgatgaagcggcccagcccaagtcggctaaacccctctcctcttctcgtgccctgcctgattccgctgcctccaccgctccacgtatccccgaaagattctcctcctcgtcctcatccatcccccaccgccgccgcggataaaaatccaaggaatcgaaggccccaacgtgtagtactacgcctacgcgccccctcccatggcgccgcctccgccgctcgccgcgctccgccccgcgccattccctctccctcgcctcctcccctgccccgcctccgccgccgcccgccgcggcgccgtcgccttctcgctgcagaccaacgtgcggctcctcaagcccaaccgccgctcccggcgatcccggtacccctactacgaccacgacgaggacgaggacgacgatgaggcggagttcgagtttgaggaaggggaggaggaggaggaagacggctacgagaccgatgtaagttccctcgtttggcagtagccgcttctagctttgctactgtcgtgagaggttgcctgagtggctgggtccttagctaaaattgcttgcgtactcaagctcgtgccatgggataagtgcaaggctgtgctatcacatgatatcatcatccaattgctgctcattatgtaattagagctccggaaggaatatcattcaactgctgctcattatgtaactagagctccggtattccttttgttttggagtacattagagatgtgataccattttattgcgtcaggctagagagtttcagaaattgaactaaccaacatctcattaggttgtaggatgtaatgttgtatgcacattgagttaaagaggcataagtttgtcaaaggaatcaacaaacattgtaggatgtaatgttgtatgcacattgagttaaaagaggcataagtttgtgaagagcgcactagtggtaaatcatcgttcctgtatttaatggtataacaccttaaccgctcatatgataaactgttttaaaagttttctgcctggctgccacagttaaacaattcttatttatatggtttatttgttccatgcatatttatgtgcttaaatactcaatggtatgctcttaaacttaggctagctgggtaacagtaggtagaggtgggcattagggtgagagactaatttgatttctgccttgggtaaaccatatccaacatacggggaccaatagaaacagcgaaactcgcttttctgctgattagtgaagacttaaaagagagagggagagagaatcagttatgtttcttctgccaccctgactatatgatctgttctgcattgagttttcaatatatagtatactgcatcactgggtgtttagtccacatgccaaaccaggcagaattgcagattattggattcaaaaggataaagttttgtgatgctaactttcattcatttctcatagaatgaaatatgagaaacttaccattggcaatattctacatttccagcattctaatatattctcttactcttttcaggatgatctatcaggtttggagtatcctggtgtactttattcaaacaatcctcgtgctccaatcaagaaaccaggtatgaaaggctgtgaaaatccctgatatccagtggttactttgtattaatactttattctccaggccgggaaaaaccagcgctgaaacaaaactgggaaggaagacaacctaaaacacgagacagatgtgacacttcaaaaaaagtcgatgctctgcatgccaagagtaaagctagcagatcaactggtcttgtggacatagataatgaagtagaggtagactactaaggttgattcagtgtgtccatgttcttgtttatgttcaatatttaacgtatgcaggataaatgattgatttattttcgcagttgaaaaatgaaagtatctctagaagcttgtttcagaaacttcaagaagaatatgactttgatgataaatggttaccactaatcgattacttgtgcacatttggactgaaggaatctcattttacaaacatgtatgagagacacatggcctgctttcaaatcag

SEQ ID NO: 24623 - DNA, 597 bp, Oryza sativa
ggcgctccctgtgacgttcgggaggcgagtgaacagatcgttcgtcgtgacccctgctcatccggctagatcctgtaccgatgatgctgaggcttggctgatgataatcatgagatcggagatgagggactcggctaccagtcggagtgcgggtgcttgcggagttggctggaaccgaggcagcgatcatggtcttcatctggttcaagatgttgacaacatgatcagcttggttgagtgcgtcttccttgaggagggtgtcgaggagagtgattgctgcaaccgcgttctgctggggggtgtgaaagaccgctgttccatcgacgtcttgttgcccaatgagctctctcgctcgccgcccagattccaaggcgcgttgtcgtcgatcttcagcctcctttgcaatctgttcgtgatcttgttgctcacgctgtagtcgttctcgctcctgtcgctgtcgctcttcctccagtcggcgacgttcagcttcttgccgtgcgcgatcttggtccgcttctcgggcttggcgctgttcctccgtttcgttgtcagccatgaatacgccgaagaagaggggcgtgtagttatcctcatagc

SEQ ID NO: 24624 - DNA, 720 bp, Oryza sativa
acagaaaagaaactaataaaaattttcttgtgtacatagggggttcaggttgatgcaacaaattgtggcttatttagataactgtgtaggatcttccaaatatcatcccaattgccaaatcaaagcatatgttgcaccatttcaagtgatagatgacccatacctgaaggttaaagctaaaagaatacagaaatttactgagataataccaacaaaatgatgcatcatgacatttattccaaaattaaatagtattcaggcgattgtgcaacaacaaagcagataaaacatatatgatacaatgtgaaatagagtatgtcagaccttcttcgccatacttgccagcgaggtgctacttttatcagagagtttttcaccgttgctggtgggatgaggcactggagtacaatctccttctccagaatcctccctttcagttgcaggagcaaatggctgaggaacagtgtggtttgactcttcctgttcagctataccatggtttattggtgaactgggaagagaagacttctgctgatcaaccagcttcagcacatcttgatctgcaggcactccatcctggacattcccattcatatgtgagtctatagtagaaggggtttcttgccctcttgaagaatcttcatcatgcctgccactcataacttctgtatgaccagctttcccatttgggggacatataaccacacaatctgattcatc

SEQ ID NO: 24625 - DNA, 550 bp, Oryza sativa
acaggagtactcgggaagaacaggcttggggttttgaacataaaaccagtttgcgtgctagcctttatttgaggtcttgaagggcatggagaagtatttttggcttagtgttcccctgagttggaaaccagcacccccaatgatgcatggtttgatcttatttggctagggcttgaggaagaagatgcggcggaacaaggcgaaatgaggcctaatgcccagaaaagcttcgcaggcatgaataaaattggcaatatgcactatggagtttggattcagatgatgcaagctaatcccgtagaaattcagaatgccccggaaaaatcttgaggttggaagagaaaatccgccatagaagaaatgagcaaataccatgatttcgtgtgtatcgggggtcaggaatgcctcaccaaatgccggtcgccacccgatgatctcttttgctggaagaacgccgtgcgccaccatctccttcagattgtcttccgtcacatcggagggcgcccactgactctcgaagctttctctttcttccgccatgaatgtgaac

SEQ ID NO: 24626 - DNA, 897 bp, Oryza sativa
acatctcgactaccgggccgcagctcgtgtagccttcatttgccctagagatgtccatcggaccccaactttgtccatctctatccgtgtacttttgcccacgaccagactgagccacaaagtatgccttacccactagacatgtggaagtacggtagtgctttgcaacagaggcccgaagaccggtccttatgatggccgaggtgctactattaaaaccatgcacctcgagccagcgtaaaaccattttgggggttttgaatagagggggaggtgtgtgtccaattccacataagccaaccattccataatgtccaaatgatatgagaattcccaaagtctaaagttataaatccacctaaagtttgtctaatttaaatagcgaagcttctacctaaaaatggtactagtgagaccatagtacggtaaacactagtggggttttgtttactctagggtgaacaaggtaataataacaataacaataataataagatcataacaaaggtaaatatgcatggctaaataaaacagtgataatgcgggaatttaaataaagcgataatgcattaatttaaaacaaaataattttaaagcatgggacaaaaatatgttcaaaggagatatgacttgccttactcgctttcccaaatgtcggcttcaacctcaatgtagagcggatcttcgaagctacagcgtctacacaaccaacggataaagaaaaggcttttactctaataaaatccatttaaccaaaagaaacaaatcacaaaaatgggttcttgacctcttaaggaaaaattagagacttgaatggtccaattccgagttcaaatggccaagttatggccatttgaagtttatatgctctttaaatgaatatttgcgaatttctcc

SEQ ID NO: 24627 - DNA, 508 bp, Oryza sativa
gctcacggccatggctgtcgaccccaagaagaagaacgccagctatgcattcacctgcgccatcctcgcctccatggcctccatcattctcggctatggtactcgtagtacaatcgtattcacatcatctcaaaaaaaaaaaaaaagaaaaatcttcagatgtggtctgaatttgttttcagaagtgtagtgtactgtcagcgagcactgactgttcaagttcgcgccaaaattttgcagacatcggggtgatgagcggcgcatcgctgtacatcaagaaagacctgaagatcactgacgtgcaggtggagatcctgatgggcatcctgaacatctactcgctcgtcggctccttcgccgcggggaggacggcggactggatcggccggcggttcaccgtcgtcttcgctgccgccttcttcttcgccagagctctactcatggggttctccggtgactacgccactctcatggtcggccgcttcgtggcgggcgtcggcgtggggta

SEQ ID NO: 24628 - DNA, 1374 bp, Oryza sativa
atctaccgtcgcccgccagctggaggcctgcgccgggggctggctcggaagtcggaggcgcacttcgtcggcgagggggtgtgtagaaccaatcgctcttccagtcgtcccactttttgcggaggacgcagggaatgtagcggttcggcacctgcccccgcggctggaagtagcagccaccgactaccgtcggcggtgacaccggctgtacggtgaagaaccaccggaacagccggagagatgggcgcaccccgataaacatctcgcacaggtgcgcgaaaatggccaacgtcattatcgcgttgggggtgaggtgcgccatctggagatcataaaactccagaatatccatgaaaaaaatagagaatggcgggaccagccccgccattgcgaaagagaggaagaagacggaccgccccgggtagtgcggcgccaggcgtccctcgcccagcgcgaccacctcccggccggtggcagattccggcatgaatcggcgcggcagcccggcctgcctctcgctcacgatgcgggaaggcggcagcacgctaccctcgagcggtacggagccccgtgccatgacgccggcggaggaggagcttgagagcgagcgagtatggcaagggtagggcgcaggaaacggagagtcagagcacaagtggcgaaggcaaggggaagagtggtgagaggaaggaaacaaatcccttccttggcgtctttgtacccttgccaacgctatgcccggctcctcgcttcccgcgcccactacctcgccccctcgtttctcgcgcccacgcctccactaaccccactcgcccgtttgcggcgcacgcggcagatgtgcggtcgtggcgtttgagatggggcagatcgtgcgcgcgtttactgcgctcgccaaccgcgaaaaacgccatcatcatgtccccaggcgaaacaaaccggctcgtcccgattcgcgcgctgcttgagtaatgtagcggtcttgaagagcgcgctcattattgtcgatcggtttttcccttgccgatgcgcgcgatttgcgaccgttgggtttctgcccgcctgtggggaccggccccacctgtcaccgggcctaaggagtggcgtcacgcccgagcgcctccctcgaggggggcggtcgccctggcgtaacgccgggggctattgtcggtgacatggggccgggggtattgtgactagaggcttgggtagccgcgatcactcacgtggcccgacctcctcgggggggtcgggcccgacggtgacgtggccacccctccctctgtctccccgaggggtcgagccgctcccgtttcggccccaagggctggggcaccccgaccccccgtggtgttggcgccacgtgtgtgggttagg

SEQ ID NO: 24629 - DNA, 705 bp, Oryza sativa
cagggagcgcccgaccggcaagtggtgtaccgtgcacaacacctccctccacgacctcgcggactgccgcgcggtcaaaagtttggctgagcggacgaggaagtgggaggaggagaagaggcaggagcgccgtgagggcaagaccccggcggctcccaccggtaactggcgaggtgaggccaagcagaaggccaccgccgaggacatcgacgatggcgacgatgacctggggttccaggagcctgaggccaccgtcgccaccgtcgatgggggagcgtgcgctcacgcttctcgccggagcctcaaggccatgaagcgagagcttctggccgcggcccctacccatgaggcgacgcggcgggcgcggtggtcggaggttgccctcaccttcgaccagaccgaccacccgccgtgcgttgcccggggaggacagatcgcaatggtggtttcccccaccgtttgcaatgtgaagttggggcgtgtcctcaaagacgggggtgcagccctcaacatcctttcccccgcagcctttgacgccatcaaggccccggggatggtgctccggccgtcccagccgatcatcggtgtgacgccggggcacacctggccgctgggtcatatcgacctcccggtcaccttcggtggttccgccaacttccgcacggagcgggtggatttcgatgtggcggaccttagtctgcccta

SEQ ID NO: 24630 - DNA, 1768 bp, Oryza sativa
taacgcttctccgaacaacgcaacaagatctccgacatcaccgacgacgtcatcatcgccgccttcactaaaggcattcgccacgaggacctagtcggcaagttcggacgtaaacctcccaggtcggttaagcagatgttcgaaaaagccaacgagtatgtcaaagccgaagatgctattaccgcgtccaaacagtcgggcaccacttgaaagccaaagaaggatacgccgaccgcaggagagagtggaagtaacaaccacaaggatcgcaagcgtaagcccgaagaacttgtggcgaccacctctccatcttcctgacaacgttcccgcatcaacaccttcgacaagataatgaactcccaatgtccgcatcatcccaactccaaccacatggccaaagattgcttcgtctacaaccactttggagcaatacgtcaagaacgcacgtaaaccttcagacggagatcaaggcacatcaaagaagaaagatgatgaagacgatgccccgactggttttcaagatcatcgcaaataacttaatcacatcttcggtggacccctggcttatgagtctaagagaaaacagaagctaacataatgggagatcaatgcggtttagcctaacacgccccaatatcttcggtagttagaaatagcaattaagtttgaccgctcggatcatcccgaccgagtgatccacccggggcggtaccccctagtactagacccagtggttcgcaatgtcaagctccgacagactctcatcgatggtggcagcgcactcaacatcctttttgctaagaccctggactatatgcagattcctcgcacggaattgaagccgagtaatgcacccttccacggtgttatcccaggattgtcagctacaccactcagccaaatcactcttccagttaccttcggcactcgggagaattttctcacagaaaatgtttgtttcgaagttgttgatttcgagacagcatatcatgctatacttggacgaccggctttagctaaatttatggtcgtcccacactacacctacatgatgatgaagatgcctggtcctcgaggagtcatatcactacggagcgacatcaagcaggccgtcacatgtgacaaagaaagttgcgagatggcccaaacccacgagactactctcacccgcgaagagatccgactggctgcgaccacggcaagcgagggagaagtgcctgcaaccaagctgacgaagaccgaagaacgtgatgctaagacgaaaaagattcccttagatccctccgatcctgataagactactgtaataggcgctgagttaaattgtaaataggaaagcgcgctcatcacctttcttcagaataataaagatatttttgcatggaaaccatccgatatgcctggtatccccagagaggtgattgagcactctttacatgttaggaagacgccaaacccatcaagcaacgactccgccattttgcacaggacaggaaggatgcgatcaaggaggaattaaccaagctgttagcaacaggcttcattaaggaagtccttcatctcgactggctggctaacccagtcctggttcgaaaaaagacggggcaatggcacatgtgtgtcgattataccgacctcaacaaatcttgtcccaaagacccttttgggttacctcgcattgaccaggtggttgactcaacggccggctgcgagttactcagcttcttggactattactcgggatatcatcagatccgactaaaagaat

SEQ ID NO: 24631 - DNA, 4712 bp, Oryza sativa
caccactccaccagttttggcctcgccacatccacaagagccgctactgttatatgtgtcggcgacctcccaggttgtgagtacggtcctggttgtcgagcgtgaagaggaaggccatattcaaaaagtccaacgtccaatttattttgttagcgaagttttagccgactccaagacaagatatcctcaggttcaaaagttattatatggtgtcttaattaccgttaggaaattatctcactactttcaaagtaactcggtcacggtggtcacatcgtttccactcggagatatacttcacaatcgcgaagcaaatggacggattgcgaagtgggccttagagttgatgtctttggacatatcgttcaagccacgaacttcgatcaagtcacaagctttagctgatttccttgccgagtggaccgagtgccaagaagacatgccagaggaaaagatggaatattggactatgcattttgatgggtcgaagaggcttacaggcactggggctggggtcgtcttgatttccccgactggagaaagattgagctacgtattgtggatacatttttctgcgtcccataacgtggcggaatacgaggcgctactccatggattaaggattgcaatctctttaggcattcgccgattaatcgtccgtggagactctcagttggttgttaatcaagtcatgaaagagtggtcatgtctagatgataatatgaccgcttatcgacaagaggtatgcaggttggaaaataaattcgatggactcgagctcacccatgtcctccgatataacaatgaggcagccgacagactggccaattttggttcaaaacgggaagcagctccttcagatgtgttcgtcgaacatctttacgaaccgaccatgcccagaaaagagacagtcgaagccatggatacccaaggcgtaagcatgatcgaagctgactggagagaaccgtttataaaatttttgagcaaacaagaactccctcaagacaaaaatgaggccgagcggatttccaggcgcagcagactttacattatccatgagactgagctgtacaagaaaagtccatcaggaatactgcagcgctgtgtgtctttggaagaagggagacagttgttgaaggatatacattctggtatttgtggtaatcatgctgctacacggaccattgtcggcaaagcttaccggcaaggttttttctggcctatagctgtgtccgatgcggacaagattgtgcggacatgcgaaggttgtcaattttttgccagacaaactcatttgccagcccaagagttgcaaaccatcccgttgtcctggccgtttgcggtctgggggcttgacatggtcggcccgtttaaaagggcagtcggcggttacacgcatctctttgtggctatcgacaaattctccaagtggattgaggctaaaccggtcatcacgatcacagcagataaagctagagatttcttcatcaacattgtgcatcggtttggggtacctcatcggatcatcactgataatggcactcaattcactggcggagcatttaaagacttttgtgaagacttcggcattaaaatttgttacgcctccgtggcacaccctatgagtaacggacaagtcgagcgcgctaacggcatgatactccaagggatcaaagcatgagtttttgaccgactacgtccctatgctggcaagtgggtagatcagctgccgtccgtactttggtctttacgcactactcctagttgggctaccggccagtcgtcgttctttttggtttatggcgcagaagcaatgttgccgagtgaagtggaatttgaatcactacgattttggaacttcaacgaggagggctatgaagagggccgagtagacgacatcaatcgactagaaaaagcccgagaagcagctttaattcagtcgactcgatatttgcaagggttgcgccgttatcataatcggaatgttcgatcgcgagcctttttagtcggcgacctggttctgaggaaaattcaaacaacacaggatcggcataaattatctcccttatgggaaggaccgttcataattgctgaagtcactcggccgggttcttatcgactcaagggcggagacggtactctcatcaacaattcttggaatattgaacaccttcgtcgattttatgcttaggcatttcgtttgtatctttcctctttgactactaacttcaagtttttccttgaagttttcagtcagggggctactatgataataatggagtgtgatttttatcaattcaatttgcttacttgatttatcattgccatgtttggtctttcgacttagccaatgaggactaaaggtttttaatagcttttgcgggttttaggctcaataagacttgacaaaggcttttaagaaatcagaagctaagtatggaacaccaagcatagcataaattcatcagtattgtacaaattgagcctccaccgtcattgatcatcaaaatcattgttatatcaataagtatcagttttttcatcatcagacttatcagacccagtcagccgaaggtcgatatcttggaatctctcaactacatcagcagcaatcttgtcagcggctttctgcgcatcactgatgaggtcaagagcagcttcttcgctcgtcccgtttgcaaagccatcaatggcatccatatcaacccttggataaagggatttggtcatcgccaacgccagacttgctcccatacttccagcttctttgatgttcttgaaataagtatctggagcgactctcagcttgtcaaagatttcggtagcatcaagtgtactcgaaccggcgttattgaagaacatggcctggatgagtggagtagcggcattagcgactttatccctggctccttcaagcttgttgatcttgtcaactaagacatcaaactgtgcttgagacttgatcttgcggtctccatcaacagattcacattaatgaatcagcatatagaagataatggcttttgaagtattgattattggtaccttcaacctcttttaaaaccgaatccctctgtcttgccagctcagccttgtcattttccagagtttggatctgcttctctagttgagatatcttggcagcttgcactgcattaacttcggttaatcaagattacagagataatagcacaaatcagttgggcagagtttgcgcgaacctagccactcagttcgaaattggactcctggagctcagcaatccgatccctcagatcgtgttcattcttcttggcaagttctctggcctcgtgcagttgactcctggtggcttcgagggttccaagatgaggaactagtctctctagggttgcagttttcgcctcgttcctaagatgaatcctctgcggagcagtttaatcagcgctcgcgccagatggcaaacaagatggctgaggtcaggcgtcaaggaacttacatttacaatgcgagtcgcttggttgagtgcctttttcagtaggcagacctcttcgtcttctttttgccggtttattacaattccttgaggttgcaagttgtcatcccaccacttgaccagaatgggagggcacgaatcttcggctgctcgtatacgggggatttcttcttcatcaccaatcattggtcctaatgtattcactgacaaaggttagacaattgatcagagttatttgggtcaacatggtttcagataaagtgtttacccgtaatgatttctggacgaggacgagtggatttggatgcctttaaaggagatctagatctctagttattgctggcgttttgtccgcgcgggctgtctgcttgggtttcgacttctggaatctcttggcttggccttgcgtccgactggtttccagtcgggggctcctgattaactccggcttcggcttcggccgactggtttccagttgggggttgatcaccggattctacattatcggttgccggctgattgtcactcagatgatccccagcagttggcccggtttctttggacgaacttgtgttcatgttagtcgggtcagagtctttcccagacggatccatatcaaatggtttcctgcaaatttaattatcagtattattgccgcaatgggtgcgcatcaatacaagagagatcgttatatgagttgcacctagaagacttcctgatctttggcacagggcgattggatgttttcttccttggagtagcctgttttggtagtttcttggttgtctctcggtcttcaggcctcctggtggtatcatcggcttcgtcgtcacttaaaaccagcttcctctttcgataatcggactggccgactagatcagaagcacttggttgagtttcagaccgaattcttggtcctccgctcccttgcccagtttggtgacggggagatcggcgttgagcgattgggggatccgacttcatcaaagcaaattcctgggtgtaatatccttcattgttaactgattcaacaagaaaacaagatcatattttgagaaaggttgaagtgtatgaatatgtaccggtggaggaggattgaatgcattgaatggtacgactggcagcaagtgtgagtagctgacaacgatggcgtttgagaagatcttatacatcctttccttcatgaccttgaagtcaagagaatctggatcttcacggtttgggtcatgcttgccgt

SEQ ID NO: 24632 - DNA, 1763 bp, Oryza sativa
aggtcttgaagggcatggagaagtattttgggcttagtgttcccttgagttggaaaccagcacccccaatgatgcatggtttgatcttatttggctagggcttgaggaagaagatgcggcggaacaaggcgaaatgaggcctaatgcccagaaaagcttcgcaggcatgaataaaattggcaatatgcactatggagtttggattcagatgatgcaagctaatcccgtagaaattcagaatgccccggaaaaatcttgaggttggaagagaaaatccgccatagaagaaatgagcaaataccatgatttcgtgtgtatcgggggtcaggaatgcctcaccaaatgccggtcgccacccgatgatctcttttgctggaagaacgccgtgcgccaccatctccttcagattgtcttccgtcacatcggagggcgcccactgactctcgaagctttctctttcttccgccatgaatgtgaactggatggtttgatttagtttgagatacggctggaaagggatggggaatcggagcgatggatgcggggagaaatttcgtgaagtttttgagggtggatttgagcggattgatgaaccctagtttgcccggcgcagttttgcactgtagcaggaaatggggaaaatggcgagagtctcggcggggaagacgaagagacgtttttcacttcggtattattagggtatcgggagtactaatgggcctgggcctgtatagtatttcagcccaatactataatcagcgtggcctgttgtgatccctagggacttaggcactttttgctttggtaatttatgttcacaatggtgtggcctaatgctgttaaaatcctttttaacgcgatttaataattctttggaattattatgatgcacataaaaaggtgcccgacagaaaggtgttataccattttttgtaagctttattaggctggaaaagctgattgggttgatttgagatgactggtttattaatagtcattcttttagcatgttatatgcttattttggttatggtaagggtcacagcctaggctattagactcattaattaccatgattttctatcatgtttggtgggtcattctatgagatttttactcggattcctatcaaacatgtctatttttggacctttgagtgtttatcgctcggcccttcttgtattttttgtccttgatatgttcaagttgagcagcagtcagctgggtatcgtactaagtaccatgcatgcttcgctataaaactactcggttcttgactatatgtttagtttttcaactaatcacatagtcgggggctacacctaattaggtgcatctactcgatgcaccatgttttattttcgcccttcacagtttttgatttctagtactcggcaagctggagcaagttgaattgaagcactcggactactgttttttgtttcgagaaggttatttcgtcaactgcgaaggtctcgggggctactgtggagattatggataccccatatctgcatgacagttatactttagtcgaatatacggtaccaaatatagatggaatatctttatgaggactcgggttggattctaaacttgtatgtcaaggaaatacccgggatcctagtcggttacgattgtattttatctataatcccatattccgttaggatatggactgtattttgtaaagcggactccttcccctatataaggagggtccatgtgcctctcgggcgcgattcttttttccaatttataca

SEQ ID NO: 24633 - DNA, 874 bp, Oryza sativa
ggcaaattgaaataccaagaacgggcgatgccgtctagagcgagatgtattacctttgctttggtattttcgtcgccatgagccgcttcgatcgcggactcataaatggagaggaattcctttgggtcagtttcgcctgagtagcgtgggacgggtgggaacttgaactggggtgggattggacgggtcttgattcccccacttagcggtagccccttttcgccccctgccctattcacggcaccttgctgcggttacggcgaggcgaagggcgaaatcacggcttgcgcgtgaggttgggccatggcattcggttgcccggctccgattggtgatgcttgctgagctgtcatggatgggtcgaaagttggctctgaccatgtcatagcgacctggtttggtgctcggtttgctccgaagcctggcgttggtgcttgcggccaaacggttggtgcctaagcagcattgatgaagtcgaactgcggtctttgactccacggtgaagcccccagacctagctgattcgacggcaaccaactaggcgcaccttgacttgtattcccctccgggtgagccgaaggggctgtacctgaaatgttgtggggttggctgagctgctgaaggaaagcttggagctgtgcctgcagagccgaagccccttctgccattgtttgtggcacttggccaggcagttgagggtgtacttgggcagcgaccggttgagcttgcagttgcacgtgaggggccggatgcgctgctgcggtcgatggctgcccagcgaagtacattggcgcttgcacaacttgtggcggaaagggttgggtcggtacttgtggataaacttggggtgggacatagcctgccgaatactgga

SEQ ID NO: 24634 - DNA, 1909 bp, Oryza sativa
acaaaatataccaactttatatacgtatatatagaaagtttgttttgcatacgtgtatacaaactttgcatacgtgtatacaaactttggatacgtatatatacaaactttctatccgtatcttttttatacatgtatacaaacattgcatacgtgtatacaaactttgcatacatacatattaaaaaaccgaaaaaactgaaaaaaaatacggatagaaaaaaaacgtgcgaaaaaaaaccgtggaaaaaacataacaaacaaaaaaggaacgggcgggaaaaaaggaaaccgaaaaaaaagaaaccgtgtgaaaaaaaaaccgcggaaaaaaaaacagaacaaacaaaaaaagaggaacgtgcgggaaaaaagaaaaccaaaaaaaaaaggaaaaccgcgccgccgcccgcgcccatctccacgtgccacgtgtccagtcgcgcgggagaggaggcgcgcgactgatcgcctattagtgttctcgtctaaacaccccctaattagtaattttgcctagcactcaatccacccggattgcttgcacaccccattcccaccctacgcaaaaggttgaaacctaaaaaatataagtactaatcgcattctccaaatgaagccccatgggactagaacactctgatgcagagagtccttcactcaccgatagcacattcctcttcctcatcatcaagcaccgctgtgacccttcactttctacttccttcatcccaagccggtgagtcccaatgaccacgtgcttagtggttgtactcatgaatagggttgaccgcgccaccatgctatcgtggtaggcctatatcgacgagcatccaccatcactttctctatctcgagctcctggcttactcaattctttcgatctcctttcctcatagctcccgcttggatgacagtttcatgactggcgactgtcagtcaccagtcatcatcgtaccgtatgggttaggccgtgttgtgctattcctaggccatgttgtgctggctcgctcatgcacttgtcgtgttgatacaccaagccaggtagcagcccaagcacggtgtggctggatcggtcgtgccagcaaaacccatagccaaacggatcatgttgttcctgagttgtctaaatgtgtgtccagacagacacagaaagacacaacccatttgacaacccttatagggggatttaagcaaatttctagctattcttatgtttcttttgatgagatcaattacgacacctcagtcgcacctaattaatttgattggtgtcgaattaaagggaacctttcaaaaaaatttaaagatgttctcttccataatagctgacggagcgtgggggctcctcaccagaagaccgcgcaggcccccctttgccggttcggccgggggcgctatgtgaggttcttcgccctcgatctgaggaatgtcagcgagaaggagcgcacaagacacgggcgacgtagacaggttcgggccgctgagaagcgtaataccctactcctgtgttctggtggatctgtgtgtgaagagagccaatacagagagctccagagcgagagagagttcagcctctttctccttcctcttttttttctcccctctttcctaggcctgggcctcctttttatctggtccggggtcaccacaagggcctcccgctacctaagaaaggaaacatgctttttacaatgagggctaatctacagccggaaatgacctctgacaagcagtacacacgcctcctgctccgctcgtcagctctcccggtggacgcccgtttcaaccttcattcaatggccagcgactttcttgccatgcttgcgctgaagcctggaatggatctgaccgggactgacataccaactccaggagtcagcacgccagctccggctagagacgagag

SEQ ID NO: 24635 - DNA, 3672 bp, Oryza sativa
ctgcagcccactatggaattgttggatcagtgtggaattggattcacacctccccctctattcaaaatcctcaaaatggatttaggttgggctcggggtgcatggttttgatagtagcacctcggccatataaggaccggtcttcgggcctctgttgcaaagcactaccgtacttccacatgtttagtgggtaaggcttagtttgtggctcagtctggttataaacaaaagtacacggatggagatggacgaagtcgggggtcgatggacatctctagggcaaatgaaggctacacgagctgcggctcggtagtcgagatgtcatggcacagggccggtgtcctgctgctaggggctcagtcctgcctacctgtcccggaggttccggccgtaggtggggttgggtctgtactcttgtctatggctaggatgggttggaaactatgtcacgtcttccgtccgtataccgtggtggtatgtggcacgtgtgatgaaccctgagttcctctcgacactcaaggctgttgttggcccgatctttcggtgagttgtgatatctacgatttgggagaaacgttgacgatccgactacaaccgtacgagacgttgtgttgcgccttagcgatcgatacacctctccgtgggttgctgatcttgccggtgcagatcaaccctattcctgcaagcaaatcgaagaaacaagcaagaacaagataaaagcaatctgatattgcaaataggaatttaatacaaatgataagttggggttccaaagaacaagcagacggacggtctagccgacacgcgcgctgcaagcaagtagcaatggctaaactttaatctaacaaaacccgagaaaccctgaaggggtaactagctatatataggggtgggaggacgacctaggggtgcctagggtcgtgctccaccagcttggggcgcaccccacatggaccccacctgggccggggtcccaaatgaagttacaagcccataggcccattataggtgatgcaacaccttgttcctgtgattctggccacacgagatagaattcagagaagaggctggatccgttaaaaagagggctccgagagctttccatcaagtactcacgggccgaaaacggaggtcgtatgcagattcggtggccgtttgaagtcagcagtgtagtaggtggccgaatcggattccagcacttggagtacttgatctcgatatcttcttgttcatccatgatgtgagcaatggttgcatccgtggtagccatggtcacatcaacgtggttacatgtgaggaagatgtgtcttgtgggtaaagatgtacacatctgatcagagtataatctattcgaatagccgcgccctcggttatgggcaagccgagcaatgtacccaagttagtgtttttaattcttaaaacctgcttaacaactaaaatgtggaatggttggcctgggttggcttgggacgagctgggacccagggtcgggttgccagttcagtctgaatcatcgtaggccttgggttaaggcaggttcgtgtgggttcacggccttgattaataatattgtatagctctaggatcgtatttacaaaatagctttgagcaactaagtgtcttttaatgctgtttgctgcaaaccctaaccctttatattataacccccttgtactcccttggatttatcctgcacttgtgagtgtgtcttgttgagtacggtggttgtactcagtcttgctcaattttttcccaaacccagaagaggagcccctggataatgaaggctttggtgtctagctcgtgcctgccgtcaagcgcctgtggtcgtcgccctagtcttccgctgtttttcgtttgtctttttgtgtgctgggtcttcgccgcccatgtaataaattaattaattacgcttccgcttgttaaactctgaattgtatcaacttttggtgtaccttgcctcctgggacaaggaataatgcacgcacgtaaggaacgcccgttgggttatttctggtcgtgacattttgtaacgaacaataataaatatgggaattgatttagtatgagcgagcgcgtcggttacagaattaaacaccgtggttgatgatcccgaacattactctcgcgctcgcacatactctctcgttttgtaacggacaataataaatacgggaattgatttcgtatgagcgagcgcatcggttacagaatttaacaccacggttgatgatcccgaacattactctcgcgctcgcatgtagttcgtctcttgcacttatgttcattgtggagattatggataccccatatctgcatgacagttatactttagtcggatatacggcaccaaatatagatggaatatctttatgagaactcgggttggtttttaacttgtatgtcaagaaaatatccgggatcctagtcggttacgattgtattttatctataatcccatattctgttaggatatggactgtattttgtaaagcggactccttcccctatataaggagggtccgtgtgcctcttggggcgcgattctttttccagtttatacaatcaataacacactcggcggaatcatccccggacaggagtagggtattacttcttgaataagaaggcctgaacctgtataaaatcccttgtctccaaacccatccactttcctagcttgatagccaccccttttattattgccgaaatcttgtttcaacagttggcgtgccaggtaggggtagcgtcaagttctcgccgactaagtgcgatgggctttgtttctggcatcgacgacttcgccttccctctcgggcaggcgttccggttcggcagcctcaacttcatcaccaacgacttcggcaagatctctctccttgactcggattcaaaccagtcggggagagaccaggtccccgtgccattcggtattccgaactcggcctactctaagatcatctctcccgagtcggcttcaaaccacttggacgagatccaatccgcttttccgcgaccagatcaagacgacgggtcctatccctcaatcctgatgaaacttcctgatgatttggccgctgtcttcacagtcaagacatctcccactcgaagatctaggcgagctccggcttcggccccgatccgatctagatccagggaggttggcgttatactccaacctcttgggacagtctcgacgtatgagatttttactcggattcctatcaaacatgtctattttggacctttgagtatttatcactcaacccttcttgtattttttgtccttgatatgttcaagttgagaagcagtcggctgggtatcttactaagtaccatgcgtgcttcgctataaaaccactcggttcttgactatatgtttagttttttaactaatcacatagtcgggggctacacctaattaggtgcatcgctcgatgcaccatgttttattttcgcccttcgcagtctttgattttagcactcggcaagctggagcaagttgaattgaagcactcggattactgttttttgttttgagaaggctattactgtcaattgcgaaggtctcggggactactgtggagatgatggataccccatatctacatgacagttataatttagtcggatatatggtaccaaatatagacagaatatgggctgcaggaa

SEQ ID NO: 24636 - DNA, 7961 bp, Oryza sativa
atgtaacggaaaagttgaaagtttgtatataggaaagttttgatgtgatagaaaagttgaaaatttgaagaaaaagtttgaaactaaactcgaccctagtaaaatcaaatgtcatatttctattattaaaatgtatcacatccgatattaagtttagttttatgggatggaaggagaactaactgtgtgctagactgctaacaatacaaatgtcgttgtcacgggcggggaacaagagggatccagttctttggtaaaatcatttataaccgatcactgctctttccgtcgtagagaaaatcaatatgatgataatgataaatctgaacatagcctatatccagatttatatccagctttatagatagaaattggttttttctttacaaagcataacaataacataatactaggcacacatttacacaacctcgaaaaaatatgactgatcaatataaaacatagtaataacatagtaatacaaggcacataagagagtgtgttaaaaaataggtacacttgtacacaaccatgaaaaaacatttgactgatcaatactacataaagcatagtgataacatagtaatacaaggcacataagagatggtgttaaaaaaaaggcacaaaaaagatggttagtaaccatcaaacggtcatccaatcacagaacgcagggtgaaaagtagcagtactagtagtaaaagaccacaaaagtagttttttgggggcaaggatattgacccagatgatagcaacagcaaagacatctttcccatgtcaacctcaccgtcgcaatctcaccttatcttttccgaaacaatctcgcattcgagccacaggtctctcagttaagataacagcaactacttactgcccatgttaccttcatacagtttgaaaggaacaggaccagcaaaggtcaggttccaaatgaccagcagatttttccctctataacaacaataagcccttttaataattctagacagaagaaggcagaggaggagaggagaggaagcacggatgtatttacaagtctgcatcttacattgttctaggtttctctctaccaatacaggcaggtggctgaaagaatgatgctagccagagcacaaaacccaaggttattgcaaaaagaaaacctcacaggattgtgcggccgttggtctttctcttggcctcctcccatggcgcctgtgcagaccccatgtccagctctcctccaaccatcaatgccgggaggccaccatttgcagtggagccacccatggtccctccaatgccaagcccaaggaagtccagagtggcaggcttgggaccgtacagtgccgatggtcccatcatcaagtccggcaaccctgaattcccagtgtcataggtgagaccaaggccaagaccgccaggtagcatcggcccaggctccatttccatttgctggttgctcctatggtgccactgttgtacactgttatcggtgaacattcgatgtggcagcttggctggcggtggcggctgtgggacgttatccatgaaccttccttgaggcggatgaggatgcggatgtggatgtggatgtggatgagatgttgttggtgtgttaccagtagtgaacctcccttgggatagcttggatgggggagacgatgaggtggaggcggcgagcccaaactccttcaggaaagatgagcttgattgcgaagcaccaacctcagcagccttctgcaggagagcggttgcggacatgtgcggtgctggaggtggagcaaaggagcaggggtcacttgcatttgtctgtgggaagagagaagacggcgcaccaattgcaaggcagaggaatgtgggatcgacgccgatgagatcgcggagggatctgctttggggagtgctgctcgttgtgaccgacgcaaacagaccagcgaacgtgctcgtcgtcgtagctggagcgatagcattggtaacgctgcttcccgtgccgcagctggtgctgctgccatctgtgccaatggcctccgagggcgagggaaggaaacaaggcagcatcggagtgtcattatccagcaggtttgagtcctccagttcagcatctttgtatcgatccacttcctgaaagcaaacctcctcatctcgctcatcttccacctctatcttggcaatcactgctggcttagcaaccacctcttgctctgcaaatagatacaccagaataggatggaacatgttactcctcattgttcagctaaccgatcaaatgaccaaaccgaatcgggaaagaaacaaagacacatgcattgctttcttgttacagtagtaagattgactaaatgagctccaatttgccataaatctcgtctagtctatctatgggcaatatgacaaacaaacaacaaaaatgtgaaagaagcataccatccacatttggtaccactgccaccaccggctgaggatgctcctgcagtatcggaggcggcggcggcggtgatggagcgcactgctgcggcacctccgccaccgcctggctgggctgcggctcatcgacctcggccacaggtgaatcctcattctcctccagctccttctccttctccttctccttcacctcctcctccttatccttatccttatccacattctcctcggcctccaaatcaggcgggcgaggcgacggcggcgcaggcacggcgagcaccctgcccgtctcctccacgagcgcgccgcagaaggcgcgatgcgtcacgaagctgtccctcctgaacccgaccaatgaaaatcaaggcaagcaagaatggaaattctttgttgcccccaagggaccatggggatttggggtcgagggtagcaagctatacctggtgaagagggtgccgcagtcgcagcggtactcgcgggtgccgcaggtcttggtgtgcgccttgaggtcggcctgaacggcgtagcgcttgccgcagcgctggcatgtccagcgcttctcgccgtgcttgcggcagaagtgcttcttgatgccggtgaggtcgccgagggcgcgggtggggttgtggtgcacgcagccgggctccgggcagacgtacacccggcggcgcggcggcgccgcaccggggccgcgctgccgcagccgccacggcaggttgtggccgcggcggtgcagctgcaggttctggtctcgctggaaccccttcccgcacacctcgcacacgaacctgttcgtcgccagcagcgtccccggcgacagcgcgatcacctccgcgtccggatctgcccccgcgcacaccacccatcaaaccacgcctcgaagtagtagaaagcatagcacccaccaccgaaaccccaaaggaaaaaagcaaccccgcgagcgcgcgctctcacctggcgttccggggagattcctcttcttcttgaccaccggcgccgcccccgcccccgccggagccggctccaccgccggcccgggctccccctccgtccccgtcggattgggtggcatctcctctcgatctgccgccgccacagctccacccccctcacccgcagctcccccctccccctccccctccccaagaactgcgctactgcgcggcggcgggcggtggacggggcgaagaggaagggaagggaagggaaggaaaaaaaaaacttttttttctttctctctctctctctctctctcgcagtctccctttgcttctctcttctctctctaattttcgcttgcctttctattgggggagttgcggtgggagtcagagaggcatcgggatgatgaggcggaaggcccgcgccactgtgggtcacactccccccctctcgctcgctcgctggtgccaatccggcacgttgccctttccgctgcggggtggtggtgggtgggcgggctaccgtccgatcccgccccgcgattcgtgcccacgtgccacgcccttttttacaccacaccacacgccgtgtggttttcacgtacaaaaactgcgtggcgagtggacaacacacgggcagggggcacaggcacggagcggcggtgggattggattgtggattttgcatccccccggtgttgataaggccgggccgcggggggggaaaaaaaggcggcagcggcggctggcccaggccaacgcagcgcaaacgcctccgatcgggcgagcgagcgatcgatcggcgtcgccgttatccagccagccacgccacggtgcacgcgttgcgttgctatactggttttgtatagtacagggaagggaacagcgtgagctctctctctcgtgcgaagtcggcgagctgatttgctgggactgggactgggagatgagttgacacgggtggagagaaagcgatcttttttttactgtttgttgacgtgtcgtcggtgttgtggttggggatggggggttggatcgtcgtggggttcttttttttcttcttctgctgctgctgctgctgccccggtttggttttggttccgtcagaacggggtttactttgggtgtgtgctgtggagaacacgtcgctggtgaggtaagagagcggcgtggggtcgcatgtagacccgcgtcttatattgtgctggatctatcagcgcgtacggaaagagagcgcagtaagcaacgacgattgccagctgggatgtggacatggattggggtggtgcttatggtgaccatctctctttctttttcttttttttagtttttttatagctttttctagttggagatctagaggtttttcgtcctcattttttttaagtatataatcgtgtttttgtcctaagatgtgtttttttaatgaggtaggctggttacggtgacaaacacacattaaaagtctaccatcatattattacaggagttcgtatcaagtggattttttatataaaaaataaaaacagaagtttccaaattgttctctctatgtcctttgcatgtatttttgcgaatggatggattggtttgttcttttgggatgaagggagtaggcccgaacaaacacctaaaaaccgttaaaaaccttttccacgtggcctttgttgagttgtgatctaaattcatttgcacttaatgaaggccaacttctgccgtagcggagcgaaggctgatcatcatcccttttagggttccaccattatatacctcttgtaagccgtcgtgcggcgacgtaacctcacctcagatatagtgaagatattttgctggctggcgcccgtggttttttctctcctgttttgggagggttttccatattaaacctcgtgtcttttgtgattgatctattgttttttatcgtttgttcgcatatcgtttcctaacagcctttgctaagtgagtaacttcaattatgatgaatggaagttgccaaattttgatctcttcgcgtctcttttcaaatcatcgtgtctttttgcaaagtaatgcatgtctcttagcttatgacagaataactacatcactagaagccatttctatgtgacaattaacaaagcggatagttttacttgtgatctcctacaagaagtggaatttaccaaattttcgcctctcaccttctccaatgccatatctttataactcatcttgtccttttgtgagttgatgtgtgtcgcttattatgacagagcaattacaaattgtttacttgccctttcatagatagcatctcctcgaatcaacgtaagttaccaatctttcatcttttcatgccctttttcaaatcaccgtgtcatttggcaaagcgatgtgtgtctcctgagccctaatagaatacatgctactatccaaaaatgtttatacatttttttatcatataaactaataaaaagagtaaaattttctgtctctctctctaccttctgtaccacgttctattctattatttttcataaaaattattattatttatatttcttatataccactaaaccattttttcttgcttttctatgacacccaggtcttccaatgcatcacgacctaggtactactctcttcgcccctaaatataagggattttggtacgtgggttaagaggtgaatgggctcatatgttaatggtagtaaccggtgttctagtgactgcatcggatcggatagttccttatcctttgctaggctttcttattactactcgaggatcagctagagcgctgctatgagccatgttggtcaagttcgagtaccattcatatatctggagagaaggagcaaaagtttttgctattcattttgcagttcacttaaatcatgggtcaagtagaaggtggactaacaacagtgccatataaggtcaaaaaatgatatctcagtgctatataagtcaatgcatgttttcaatggcatataaagaaatttaacaattttaaattctattcaaggaattttctctaataaaaaaaacaaaataccacctctctagggaagaaatccagagcccttgtctataataaggtccacctttccaatggactaccaaatcccgaccctggcagtacaacgtttttttaccaaattttgatgaaactccacttgtgtttactgtggtaaatttgaatttctcaaataccataaaattgttcaaattttctttcctcccgtgttgaaaccttgaaattttgtggttttttaaacgatctgtatacactataaagggtgctcaagacacaatgctctcggggagcaggtcatggagaactggataccgaaagacggacaaacagtacatgcaagaaaaaatggatttattaagatcacaattcaatttattaatttgacttttgttgtccttgtaatattttcttgcccaatcggcctctaagagcatccgcaattgtaaagtaaggtgctctctataaaacatgtatatctcagtaataggctagattaatagtaaaccacatcaatagtatgtctacgtgggtatctatagctctctaatgcattgtctcgtttttctctatagactatctccaggttagtagatagatttgttctctttcttcatttaatctctttcaagtaggaaaatatgctgacatggatctcttgtagagagtctatagataaccattgtgggtgctctaacgtaaaggatttccaggcatgctttttataactagacatgtaagtaagtaccaaaatcggagacacttctaatgaacaggggggtgatgatgcggtaaaaaggttacacacttccatcttggtttgcatactttcatggttggatggtcggttctagctctcacactcctaaacagtgtgcacgtaccccgttgtgcctgtggtcctctccacggagatatcttctgttcctcgtgtgggggtgctgggtgttgccattagccaacttgccacgaggataaaaaggtagcaatagccaatggggattatagggtgaaaagtcccaatctgcacgtttggaatgctaaaaatccatggcaagtacttaactaaagttgcatctcagtagccaccaaggcagctgtgcattgagggtagctgtattattaattgaaaaaaaaggaaagtaggagtatttttttagctcaggggagtgtattaaaaaaatcagctccggaacaaaaggggaaggataaatgctaccgccaagcagaaggagacaaatggagcatatgcagcatttcaatcattcagtgggaggcgatcattgtgccccttgagtcattttcaggcaacgaaaaacataagcaacattctggccatagctaccggcacctgtagatcatactagtacaggtttagcgagagaagcgttgcacttgcacatgcccggaatcatttcagtgtcatggatatctccaaatccttctgctcgtacctcattcaggagaggtacttgttggctcaccaactctggttccattattccattacatcataatcatatacacaacctggttccgttcaccatcgaccataaatcttcatttttattaattagatccatgtatcattatgaat

SEQ ID NO: 24637 - DNA, 11365 bp, Oryza sativa
tatataaaatcggatccttgccactttgcaagcatccgacgcatttgaatcatgttatgctgccgtattttcgtatgaaccgaactacccgtgccccgatccccactattatgggaccgcatgtcactcaccctcaaccataaccttatcggagtacatgcaaatgtaagaggaaaagctacagttacaaaactgtaccgaaatacccctcgtcagttttggttggaccagagaaatccgaacaacagcaatccaaatgcccgtgaagattagactagactgcagactccgtggccgaccagagtatatcgtttgctcagtgagatcagactatcaacaagtgtccgtgcagccaccattgcaagccatcctcgcccctgatctcctaagatcagctggagattggaaacgggaagatacgtgcactgtaatctcccaagattgcattccgaaagaagccattgctccagtggctgttaagctgctaatggtcaatgacttgtagtatacctgaattacacaagcataggctatccattacgctatcagctggtcaatggtaacagagtttttttttaattaagaaaaggcaaaaggagtgtctcggataatcggatgaaaatttcggattaacgtctgcgcgaaggaagcatgttgtgattcttgacctgaaaagactagaccaataatcactataaacatgtaatagcatcgcgtatgtcggctaggcctgattggttgtttttcttgaagcttctgaggtatatgaatggaggtgtcgaagatctttcggaattactacgggattcatgacaaagaccttccacttgtgctgtaagcggcctccttttccggatggcaacctgtgataaattccttaaggataacatataatagctagatcctgaaatagccatggtgacatccacatcaggcgataaagctaccagattctgaagggacagggcaccataatgtcccttctgaaataaggatcgacaccgtgcgagacgaataaaatacagttcgtgtgctgcagtcacacgctggcagcatcataggtataccgtagaatggagtgttaacaggtgagcgtgaaaacggagctttgatgggttcaacgataagtatttgctgctagcaactcccagtacatgagaaatcatatgtacaacaacaggatggatgctacagtgaaacaccagaagttgatagctctgccctaagacctgcaagtgcggtatacctcaccacgcatcacatcaattggtccatggtcaagtgcataacgatctgggccaagatacacgcctgtcttctcaaggagagctaaaccttcctccctgccgtaccttgacgaataaagcttcaggtattcgatgtcctgcgttagaacatcagtaaggaacaactgtgagcagagtcaaccgtgaacaaattgctcgctgatggagtttcagtttttgtactatccacagccgagaactgtggttctggtaaccaaaattaaactataagactgaaagtttcatttggtatattcaatgaaatttcctgctaaattcagtgaaattggcacactctaatggcctgtttgggagagcttaaaattctgataagtagctggttggtaaccaccttttgagaatatggaaaaactaggtttttcagcttctgtcttctagttctttttctggattctacaactacatattctcagaatctgtaccaaaagcttgactgtttgggggaacttctgattctggaagaagctgcagtagctagaaactcccccaaacaggccctaagcactggtttgttcaaaagaaaaggtctcattcatgcaatattccaaatgtcattggcttcatagtttataatatggtgtactgtgaacaatcaaaggcaaaggtgggatttaaatgacagcttaagtgattcagccatgaagcctctttcagaataagtactttgcacttaatttcaatctgaatagttctaacttagcaaacatatactagcattgtggacgaattcatctttcatatagaggctggatttacttccattacttttaaaaaaaacatatactagcattttgacagaggcaaagcattccaaaaaacctcacctgcatgccactgagaatgcgctctagcctagtggacgcaaccggttcatgtgatgaagaaaacacttcaccaggatagaacagaaccccatcgccaggaggaagaccacgtcggaaacaaatctgcagtcacgccaagtaagacaatcagatgagcgtgatgcaaattgtagaggccgatctatcaagttgaattttactgtagtattcaatgtaatacaccttcatagacattggtatcacattgtattaaatggttcccgatgccacatcatacctcagcacttggaatcatagccttctcgtagcagttggtaccccaataaaggaatcctgttccaccttccttccacactctccacatcactgccctgtgctgggttccacgcatcccaagatgccagtttggttgaggatcagaaggccccatacacacatatgtccaccattcctagataagattgaaattacttcagctcatcaagatagaaaaacagtaaactataaagggctccataagtccatatgcatgcacaacagtaaacggatggcgcaccagagaacagtactgtttacatagagagcccacttttataaggcgcgggtgctattcaagattcaaacatttgtaactttttgcccacacctggtctcattatatgtaggtgtatggaaatggtagcactggatttatatttgataatatttcttgtgattttcccattttgggtagttatgacaatatatttaacggaaataataatctgagttcaattttaaagatagtgtcaagtcaaattgtgccttagaaaaagacattaaaggagagagtaacaggaaaacaggcacaacatttcataagattaccgattacgaaaccctatgtgttcttatccaactaatttttttttaattctgactaatattaatcttagaccaaaataccaacagattcaaatcaccattattcagaaaataaatgctctaagccatgagctcttccaagcacggcaacatccacgctataacctaaagcacaaattcaatgcaagtacagatgttgtagaaagaaaatgaatgttgtccatactatttaaaagaacataatttgctcttacttcaccaagatcaggtcgtagttcagcaacaatatccttcaccaagtcctctctcgtgccaagaacccattcactgtataaaaagaacactagatcaattggatatactacatctgattttgaacagtgtatgaaaatgattttatgcaccaagctaccaatacttctactggcctccatgtcgcatatccaatatccacacagtgccaaacatttccaacatgtatcagagttgtgaattccatcaaattgccaatgtcgtatcatcataatgtcagtgccttgtgagaatggaaaaaattctttcagaccggcattgataattgtatctatcttgtttatgttacaaattaggagtagtttctaatatctgaacctagctctgaatttatttgacaagataatgtaagacgtagaaaacacggtaaaaaacttaaaagttttgaaccttatgttttttttgttgtagaataaagcattacagtccatcattttagcatcagtattgagcagctatcggagtgagtccacaaatgggtaccccttgacccactagttcaactaaaaatccttttttttttctttcttgctagtgaaaaggtgcaattttagttaaactagtgcaagtcaatgggtacccgtggattagcccactcccattcctagtatagatctatgctgttgtatcagtttttttggaaaaattataagcgtagcatgctatgtcagtgtgaaacatgtgtacatattgtaaacagggatatggacaccgtatgcccacactatttcagctgtttagaacaaataagaaataccagcaggagtgcaaaccttgtgcaaaatatctgcgtatgtggacgtagaacatttggaactttcacaaaggcctcaaatgtagaaggagccagttcagaaccacttgggcctacatgagccatttgcatttaaaaataagatatatgcttaaaagaaactcaagacttgccaagtgtgatcagcttctgtaggtacataaatgttatcctgacttgaagaaaaagtaggaccaaacagggtgatagaagatctatgcatcgtaagcaggtaatccatatggtcattccatacaggatataaaaaacaccatacctaatggctaaacaataaaggaagttattttatgatacaccaatgaccaatctaaatatatgctaattacaaattcaagtagggaaggatgttgtttaacacgcaccatcactaagggagattagatggtcttactcaccacagtaataagttgtcaaaatacgcacatcaaatgcatatgaacgcaactcattagaagatgctgcccccatgcagattacatcatactgttccatattcagtggctgagaaaaataaaaataactgttagatcataaggtagctcttctttaatactgaaatgaacagtataaattgatgttggagcgtggcccaaagagtacccacgggttggtccgtgcctatccctatgttctatggagcacacatgtagctattttggttatttcaggtgtcatgctttattgagcagtgcataaactggttggtctcatcattaccacgctcacaatcatgtatctacaaaatttttgcatgtgaaagatgcagttacggttatacttgctggtttccaattttatgtgtgtgtttacgatataagaatatactggacatgggatgttcaatgtactccgtatcactttattgttcgtggtatgttacatcaggacgcattatattacaacagaagttacccttatccgattaagagaatagatctaaacatcagtaagaattaaccatatttttctattcaacaatcaacatagatgtataattaaacctgataatctaagactgctattattcataggaataatgtaggtccaactgcatatagctattagctaggcaggccataatggaacctacaaattgatatggcatcataaagaacactacaactaaggagaaacttgcattttgtgttgtagagacgtgtaactgagcaatgacacacctcatcccacaaatagaagtaagatttcgaccaatgagcctctgatttcaagatttcaacctctcttcgcagggaatttttcgcagcatcagtgctgttgtgaataaaaaaaatgagccaaaaacatatatagcaaattggtataaaacttggcagaaatttgagcaataccttgataggataggtgcatatggtacagcatatgctgctagtcttggatcagagtaatattctttcgcctttggatggtcagctataataataataaacaagtgagaaaaaaatcacactccatagcagcagattgttttaccaacaaagatggaagtgttaccaggccaagggcatgtgtatgctagaatgcgcatgctatctccccatctgcagaaaaatggactgattctgtattggaggagccacctgaagtgatgatcgagtgcatcataccaacctttggtcccatgctccaagcaaaaccgatcttcaatcacagtttcagatatctgagtatagtcaatgatgaacaaatccataaaagtacagtgaaaatgcaaattaatgatgactacaacgcaaggacagcatagacaattcagtcacaaattcccaactgtagatctacaaagtatgtgctgcacaccagaaacaagcatattgaatccttattatatcttaaattatccaaacataacagaatgaaagagaatagtgccaggatacgccaaaaacagcaggtaaagaaggtgtcagtgggagagtaaaatcccaaacagtgaggctcaacttcaaacgaactgccacattgttcataatatcttcatccatcatatctcctaatccattattctcttggcagtcctggaatgatggaagagctaacatcctcctcagtgtggttgaagcagatgtaagtctttgtacctaaaagttgtagaaaggaatattgatataaaaatgcaacatagcatgtccgagaaaatatagcatcagaataaaataccatttcctctgatgacgagtagtctctgggttcagtgatgtcaatgcaatttcttaattctttgtaaagctggtacctttcagattttgtcaaggattctcctctggacctgccaccatagttaaaagataaatgccagtcaaacgcagatgaacatatgggtagaaataaaagaaaaatatcacatggacagttgtgaccacctccaagcatcaaagtggacactggacatgcattctgaatatcgatgtttgtaacttaagctgtcttgtttcaggatgagtgtataagataaaatgattgtttcataaccccaaccacttctaaattttgcaaactatttaaagttatataagaagattacactagtttgctcacactagactctgaatttagcagctcaagacatacagtaacagtgtaacatggaaagttcaatgacttgggcaaataaaggagtctcagatttcaagacacaataggaaatataaatataaagcctctgattattacatagttttcatgggaaacatgcatacaaaacattggttttaactctgtatacaatagtgcatattacttcgaatatatgccgtgcttttactttattatatcaaccagagatacagaaagcatgcaatatggacactggtgtcaataatagaatctgatgtttctttttcatgcccaaataatactaaatactaatcagattatacaatcacttgtgacagaggcactgaaccaacttaaagcatgcaagcagcatagtcaagcttactctgcttctgccctcacagcactaataaatatttcaccctcatatagacccggctgttgtccgcaaggaacatttagtgagacccatattgcacttgtctctctgtacaaacaacagtaaattagctatcacgaaaaagagaaaatgttgctgtgcatgaatcatagttgcctaaatcacagaggcaataccctggaagcaggtttatttgtgaattgagtggatcaattggcacaagagcatctggtacacctaacataggcaccacacgtcgcaaggttacagattgaccaaccactaacctggtacagcactgtcataatcatccaatgtagaagtgtacaaatgaaggtatctctcaaagaatggatgcaagatttaaataaacaaacctgtctccagcggaagagcaaagatcagtgcactgaacctgcacagatcccgcaataccagaagtggcccatgatacctttggacgtaaagcaatttgaaaactttccctttcatttcttgctgccaaaaggttaacctaaaagaaagtaacttttaaatatttttggaatgaactgtggtcgaaaaatatgataaaatcatgtacacatcagcctataatgagtaaatgctggaagagaaaaaaacactgcatatctgatggaacagagaagtggtatggccttaaaatattctgcatattgaagtgtcaaagcaagagagttcttgcacttctagcagtgctaataaatgcaagtataacttacatgttccagaggtcgaggtgcttcttgttggctaacatttgctgtgctcggcatagaccagacatgcaaaagatctgctgagtgtatctttgtaggatcaatagcaccattacctaaactcgacgcctgtaatcctccatctacccatccataactagtccctcctccagctacaccttccacaggtggtacagaactgttctgcgtcttatctgctgcggtcagaggaaggaaaaggattaagtcactggaacttaagctccaaagatttatctctgatgcatgtaagtcaaaaactcaaaatcctaataaataaataaaatatctctctggaacataaaaaaatatgtatattaattgttatcgaccagcaattctaaagatgtagagggcttttccaagccatgtgatgtgatggattcacaacagtcctggttcttctagcctgaccgatttcttattttgcaactgtcttcctattatgcattttctcatacctaatccatcatcccgtgtgtatgtagatatgacttccaggcagacgcaatcactgcagaaactaccagaaaagtctcttcacttagctcagaactgaaactagagatgggctcaatcaattccatccatgggtgagcttgagcatctccatccaagttgtggtcactctaccgtttaacaacacagaacggccagaccaaaaaaaatctcagaaccctatccgattgccaaatgacagtctcgggttccaccgatgaccgattaaccccctacaagcaaatggcgagcagactggccacattggccccgagaaccgcacaacgcgagctcaactggagctcccgggcacctatacccccacctgcccccctacacaacccgagggagagcagcgctcccgctcagcacgggctcactcggcagcacgcgccagcagctcaagcggagaaaatgggcagaggatgatccgggcgggaggatccaattccacccccgggttggggggcgatcgggccgctgttccggacggcaatccagttcgatcgggcggggggggagagcagcgaggcgagcacgcacctgcggcggcggagttgggttggccggattccatggccacggcggcgcgggagggggagcgatcgatcgatcggggggagggcagcgacgacggcgaggggagcagcgctggagtggtagtgggagaggagaggagaggagaggatgatgaggcggaggcgagagagagagagagagagagagggagaggcggtttctgtgcgtggcccaagtcccgagaccccctcaccagtcaccacctcgcctcgcgcgcgggggccgcaccggtgaaaggcgaggcgaaggcgatcgagttggggaccccgaccccggaccccgaccccgacccgggcggccggtcgtcgcacgcacgccgcaggatcaaggtgatcaacctggcgcgcgcgcgcgtgttgtgcggccgtgtggtcgttgcctcgttgcaccgtggcatcgtggcaacgagggaaatgttaataggagaaaagaaatcgcggaggcgcggacgtgttcgcctctccagaaaactcatttcggttcgagtgtttggtttggttcagagttctttggatttgacattcgtgctggagacctggagtataaacattgcaagtatagtgtgcagttagaagatcatagtcgacacgcggctgctgcatcgcacggacacacggctgaacacctgttgtgaccttgtgaacaaacgtagccttactgcagtttgtcaggaacgttatcttgttcggctcaatcagaccattttgtttagtgcttagtacctagggcacctttttaacggaccacacaatctcatgagtaacgaaagacattagcaaaacgcatagcagccacccagaccacacactcctactctgttgtgagtagtgacacaaagatatactattagcgaacgactgctccaggccaggaaacgacaagatacattcagttctgaaatcttagctacagcactaacacagttcactgcagccacagagcaatgtttgtcagggtaactcatcttatgcataccactattcatctagaagagcaatgagtaccaataatgaaccttaaaaccaactcagctgtacgtaatactgtcgaggagtgaccctctctagcgagagatcgtgaggcctcctccctttgtgagttcggccgggggaaaaaacgcgatgatcaagagcgtacctccacctatgacctaactactgatcgctcgcaagtccgtgtggaagacaagggattacaagggttcgggcgctggaaagcgtaacacccttctcctgtgcgtgggattatgatgagttcttacaaggggtcttgagctcttggggaaatctagctgttctttctctagcgctcaagctattgagagtcgtccctttttcacagtgagcgagatcatccttttatagttcaaagggataccacatgcaccgtttatacctacccctccacgggaggggggcccacatgaccctggtcatatcactatcctttgcttcaactggaagcaatgtggttgcctcgcttcaggtggggcccagcgccgtcccccgcctgacacgggggacatccccgtcattcctcattcattgtatggagactttggcggctcaccatgcgcagggagcgctcctggcagtgtaccaatgggacggggcatacctgcccccactccacctgacacaggacggaacgtgggggcactgccacccatccaatcgcctgtgaccagtcacagaccggtcaagctcgattgatatgggtcaatcaggcagcgccgcccgcccgcccacgccgcattaaatgcagcgtggaacgattgggacgccgcgcattgaaaacgctgagcggcgctcctgctccgccgctcccctggccgagcgagggcctcggggcagcgcatgctgagggcctaaggagcgtgacatggcaccccgaggccccctggccacctcagcgttacctgatcgcccctcgagggaccgggggaaagccaggccgcgcggccacgtggccagatgggaaggtgacttccctctactgtgcgtacccccggtcctatatcaccgacaaatactctatccgtttcaaaatatttgacaccgttgactttttagcacatgtttgaccgttcgtcttattaaaaaaatttgtgaaatatgtaaaactatatgtgcatataaaagtatatttaacaataaatcaaatgatatgaaaataataaataatgacttaaattttttgaataagacgaatggtcaaacatgtacttaaaaagtcaacggtgtcaaatattttgaaatagagtgagtatcgtctaagactgcatggcattatctcctccttcacctggcacttcattgaacatgtactggctctgatactccatcaagtactgcgccgatctcttcacgtccaggcagagctggtagaccctgcttatatcctccatttccacg

SEQ ID NO: 24638 - DNA, 9374 bp, Oryza sativa
ggattgcatacctcagggccgtctccactccaatctttgtgagcaataccttggcatatgcagtaaacatttccacatcttcttcatcgcacctgatgtctaggaccttcgggatatcatcctcggtgtaaggctgtgtcgtgatgattaggagccgattaaggaagtcaggtggtatcccatgtagtgattggtagtttatcccacgtatggatgtgatccctcggttggttgcaatgactagaattggagtcacgtcattttccaatgcacggtttagaaaggagaagcattcgatatctgcatgtggacttcatcaacaaagagaacaccagggacaatctcagccttcccttcctccctccactcagcaacttttgtatcaatctgctcccgagcctctgcacgaatttcaccagtgtcaccagtgaaaagtgcaagaaaaccctgtgtcctggacagcaataacaaaaaacaaaaatgagtttgcgcaaacatagctcacttaaattttttctatggtagttagaaaaccacatctgaaagccaataatcttcgtctagtgaccaaaaaactaccaagccagttataagtaagattttttggtgattacgaaatggaatgttcaaaaagattcaccaaagaatactatttaaaacacatctgatagttgtttggttgataagatacttacagagacagagagagagagagagagagagagagagagagcacatcacaatcacgatcagttcatgtcaaactggttgaaacatattcatgtaccatcttggaacatggttcatttatgtgcacataataattgctaagttgtaccaaagtaccaataggcttgactaattttcatcaaattatacccttagcaacatcgtgcaggtccttttttcacaagagttacaagaggaggctgctctccatcattatttttctatgggccaaaagaaaaattagatcttccgttcaaaaaaaaaatctccgttcaaaaaaaaagggaaaaattagatccgatttggacggctgaattgtatttcagctccaagcccaacaagatcatatatgccatccagtagaccatcttttcttagtattagctaactgagtagatgtggcagttagtagggacaaactgatccagctagggctgtccaaatccagtttagccattttttgtcaacctgcctttgacatgtctgcaggtgaatgaatgagatggctaggtgtgatgcagttgctggaacactatggttagctatgatttggccagttttgctgatgcaggaatgctcaccccttttgatctagttctagcgccattcaataggatctgggtggggctgagaatgggtcaggggttgtacagtacaacgcagggactggcagctaggcaagattaaccaatttcaaatttattatttgattctcatcactgcatatacacatgacacataaattattttccattcaggctcggaagcaaaatacaagattacaagacagttcttaatttggatttttgagcgacaagttgacaagtgatcctttattcctttgttcagatagtaagttctagcaaacgttagaacagatttttcaagactgacaaaaaaaaaactttggtggctaagctaccacaatggtaattagcaattaaacatacaagcaagcacacagcacatatgtccagggtagctgaaagtcaatgtgaaataccagggctgatagaatttgaaatacttgagttgattgtttcagttgtatctatttttcagttgagtaatatgtgacaccaaagctcacagagtttcaccctttaatctctagtcctctactatgtcaaaactcaaaatggttcaatacttccttgtcaggtatgaaatattgctttattttatgagatatctactctagttatggaggaatttttggcaagggaatgtgaatttaccggctattgatgacatcaatttcatgtaaggttgacacaatgcacgacctcctcgcacttctggagctcgccctcagggcacttgacggacttggtctgaggacaaacagcatcgtaatcccggcatcccgcgacctcccaattgagcggccaagcttggtcaccttcccgaaggccttgtcaagagcaaccacatccatccccgctctgcaacttctctttccccagggcctcaatcatcttgccgccgagctcgtccacggtctccatgtccgtcgtcttcagcgtgagccgcccaatcttcccagccgcggcaacaccggaaggcgcggagctgccgccggagacggggcggtcgattgagatttcaacgacctcgccctcgattatctccgcctccgccttgatgcggacgccgatggagcggtggaaggcctgggtgagcgcctcctcggtcttggagaggtcgagggagaagagctcggacgcggcgacggaggcgaagggcgtctcggcgccgagggactcggcgatgcccatggcgagtgcggtcttcccggtgccgggctgcccggcgaggagcacggcgcggccggcgatcttccctgtcagccagctggatggatatatgaagacgaagacgaaaggggaaacacggagaggtgttgcatacttgcacttgtgacatataatgggctgttactagttgggccagatgcaattccaatccttttttaggcctgtttggaaccagagttttttttttttttttgaaaagtgattcttagaggtccttcttagagtcggaggtctgcaatactttggtattttgggcttgtttgtgttgatgcctaaactagccgttccaaagaattggcaatgccaataaatttggatggcatttaaatttgtttgctataaaaaagggcaattttgacaagaaaatcaagcaataatttaggcacttctaaaaatttggcatcaaacaaaaccactgccgaaaaagatggtagggtttaaaatggccatgaaccaaatagacactagctttagaggaatggaattattgtatttggattcctttgtaaaggaagcaattcctcattttcatatgaaaatgaacatctggtttgacagggaattcttttatgagtggggacaaagtaaatcattttcctctgatttttttaatcgacattcgattagcgtcgatacgtagcatgtgcgtacacgggtaactatatcaaatgcaattagtggagaatgcatctatttaagcatgtatatataggtgtgttcggcaccacatgttcccaattcttcgacctcatgttccgcgcacatgttttttaaactgataagcggtgtgtttttttgtaaaaaagtttctatacgaaagttgtttaaaaaatcatattgatccatatttttaaaaaaaaataataatacttaattaatcacgtgctaatggaccgcatcattttccacgcagaagagaggattgacgatgttggtacattgcattaagcacatttacaatggcgccacgatcagtaggtaagacaggaatattcactgcgaaaaggaaaagcaactggtactactaattgttactagcaaggtttcggtttaaatggttcagactttcagtacatcctatacatggttagaccgccatagttgttgggatcattagttggttaggttactgtcttactgatcactaattagttgaaaatcaaacttctcggcgtcgtgttcatggaggaaacccagcttgatcggtgagtactgtacgaccttggtgcatgcaatttaactagtactatatcatcttcttttggtcagtacaaattgtaccaaccgttgtcatcagtacgcacctctgcttctaatcaatatctgtccatcacatgcactgttacaattttttttcctctcattgtcgccatatatattactacaaatcattaactagccaaagagtaagcatataccaatatgaaacaaccatttccttcggtttccatgaagttgaaccataaatatatttcctcttgcaaccatttcctttgtgatcacataccagattccaaacgattgtaatttacaaatcaatcaccaaggaaaaaggctcgcagtcgcaggctcgcagcccttcatgataagcggagttgtgtttgcaagctggccggtgttcgggccaagctgcgcaatgcgtgccagcctttgtacccctttcctcccaaaatcttgccaaactcaaccggcgtctcttcgccgtgcaccaatacaccatgcgccgacgcgacacatcgttgccacggtgtgaccactgaccagggccggccgggtcggcgcccgggcgtgcatgcccttccaagatttggaacgtgacgatacgagacaaaaatccgcttgtccgctccgcgcgagaaccccaccatgtcccacgccacgcgcgcgcagcgacacacacgctgcttccgccaacggcggggggcgactgccccccccccccgggccccccatggccccatcacaccataaccgtacgtcatccacgtcccctccggcgtccgtcggtgcctccgtgccgtggattggagtatgtatagtagtactgcctacggcgaggaccgcatcaccacggcatcgttaatcacggcgacatcacgggtgagacctcggagcacccgtaatgttagagtaataagttattataaaatatgtacatctcagcagtaaactatattaataataaatcaattcaatggcatgtctacatgggtatctatagctctctaatccattgcctcttttttctctatagactatctccatgtcagtagatagctttgctctctctctttatttaatctcttccaagtagaaaaactagcatggtggcccgcgcagattgcgcggctagcatcattatattttctctcatataatagcatatagtatgttttctcattatattattcaaatatattcaaatgacaatataattttaaattttgcaataactttacaaaactattaaggtgtaatattcatattgtattttatatacgtgttagttattaattatttttaatattaaattttagttatttgtaaattatatatattcctatatggactctagactcgttttttaatatttttttttctttaattccgaattttctgtaaattgtatttctatatagactctatgcttttcttccaatattatttatttttatttttgaatttttattatttctaattgtatttctatgtggattctaaactaattttgaattttgaatttcagttacttctaaatttcttcccatgtttttcttaatttcgaattttagttatttgtaaattatatttttatacggactctaaactctacttttaattttattatgtttattccaaattttagttagttttaaattcctatttggactctataccctacttctaatattccttattttttaattccgaatttctattttttttcgtaattgtatttctatatggactctatactctacttctaatattccttatttttaattccaaatttctattattttataattgtatttctatatggactctacactctacttctaatattccttatttttaattccgaatttcagttatttcctaatcgtatttatatatggactctatactctacttctaatattccttatttttaattctgaatttcagttatttcctaattgtatttctatacggactctatactctacttctaatattctttttttttaattccaaatttcagttatttcctaattgtatttctatatggaccctagtctcctcttctaatattccttattttttaattccgaatttcaactatttctaatttgtatttctatatggactctgtttttctttttctccgattaatgtgagaatttctagaccatgagagcgaacgtagaggcttctttttctatttctttaataatataatagatagatatactgacatagatctcttgtagagagcctatagataactattgcgggtgcgattttgctatatctcactcgaaagatttcttcttatctctcactcgattttctcactcaaatttacagtgtgttttcttgtaaattacagtgtaatttatgaaacttacaccgtaacttttgtaagttacggtgtaatttttgaatcttcgcatgtaagttttgaaatttatattggatttggtctttttcttgaagatatggtaatttagtgtccattatggtgtttcttagttgctttttgcattttaatgtgtccattggattttaatctatagattaaaaatctgtgtgatatgatcataaaaatctttcgaaagatgcataggtactcccttgcgggtgcccttagtagcacttgtcactaacgataggtcgtaaccaagcaagctaccgatggctaagattttaggtttattttctgctcgtgattgggacattgtacataccgatatctgaaagtgacgggttgtgcatggttgggactttgggagggaccttctcctcctcttcttcttcctcctgttttttaatatttgggccattgactctttccacatggatcaccaaccaccgagcgtgtaacaatgaataaactgatacctaccaccgggatattccgttgccgacgttgattatgtaaatttggtgaagaaaaaaccctgttgtgctggacatgcggctatatatcggaaagcactccctctgtcctaaatccggataatcttttgtctagattcgttgtactagaaaatatcatatttttttctaaatttagttttttttggaacggagagagtagtcttgtgggcaaagatccgtgtagatgcaatcttttctctgaaattttactgattggaatcaactcttaaaaataaactagtgggagtataaataatcggcggtaggcacttttgttaaggcaagacatgcactcgacatgtatcccttaatctaccgtcatttcagttctgtatgtgtgcaacatgcatgtgagcttttgcttgattaaggaatgtgcttgccaagtcaaatgaactggccactacttcacgctgattaagctaaaatctggtcaaaaggctcacggaaatgggactcgatccgaacgaactccaaagactttgctttcgcaggttctgtaactcttgctcccgtgtacacggtcaccggcctaacaattggtgaagtgtaacgtgccagaactctcttgccgtgagagtaatggtgggccaccaccgtgtctacaattcaatcatgttggccatgcatgtacctgtcagctggccctgttgcttgacagagtgacaagtgctcccaaacgcagataattccagtactttaatttgatctcgaaagccatgtttgaattgtcgctccaatcagtccatttgtctgattggtttagatcggatgacgagatcctttcacagattagcacgcatcatatgccttcgaaatggacacccaacatccaagttcagagcccaatttgcacactttggcctggtttagttttcaattttttctttaaactttaaacttttacaatacatcaaaacttttctacacacataaacttctaacttttccgttaaatcgttctaatttcaattaaacttctaattttagcatgaacttaaacacaccctttgttaaactgaggaagccgtcgagcagggcaccgggatctcgaggggagtagggctcactatgagcaaatgctaaagtaacggaccgtctaatatatgagtatcatatgtgatgcccccttgacaagaaaagactcgagttctttccagccttgcttgccatggcaggaaaggttattcagtggcgtagtcctaagcttcctgcggactagtatgtgctacacaataacactaagtgtattatatcacacaaagcgcacgctgaatggcacatgtacaagtcatgcatgaccatgacgatgaacggatttgtctaatcgtaattactgcttggttgctggtgaaattcagtcaaatatttgctgaaaattttaatttagttcagtttttaacttagatcggtttaccaagtggtttctcgatacatactgctaaatccccgacccctagcggtataactttcaaccaaattttgattgattttactgtttcaatttaaattcttgaaaaccatctaaatttttactcagagtctacttttgtcccaatcgaaacttcaaaatttcatggtgttcgatcggtttttgtcgaaaacgtagacccaaaggcatttgtcaacttgtgtcagatgaaggtggaacccataacggttttgctatttcacttgtgacatgtttttggactcttgtattttgattttttgtccataggatcttacattaagattcgtgtttgtatagatccaacttgtagttacactcttacaaaacacttatatttggttatagagcatttacactcagttacaatgcaccaaaattagatttcacaactgcatttgtttccagatttacgattttgacatatttatcctcttcttctatttaaagcactccatccattaaaaaaaaagctaacctcacaactagtataacgaatctggacacacatcctaatacaatgaatctaaaacctagatatactttatatacagattcgttgacacatcttactaagaggttgttttttttgggacagaaggagcagactgtatccattagttgaaaattttaactcccaacctatccaaaaatcaataggtaggtgatgttcatttatcctgaagataaagatgaagattatgttttttttgcaaaacgagatggtattaatatatgattgattaagttttaaatattataaatttgaaaaataaattaatatgatattttttgagcaacttttatatagaaagtttttacacgaaacacatcgtttaacagtttaaaaaacatgacatgaaaatcttaatattcatccagcttttattggagaaaataacaggaccgtagtcacgcacaaacagtctgcagctgcattgcaccgcgtggctgataagacgaagagaggagagccttgggcccctttcacctctttaaccccagccagcagcagaaccagtcgcgggggggcctcgcgggcgctttgaattgaactggccacggggcgagaactcggcgaaatccatccacaatcccgcacggcaaaacgcgcaaaaagaggggaaactgcaatgaaaaaggggccagcatgcgcgaacgcacagcccccggccgcgcccagatcccgctctgtcgccgtcgccgctggctgccacccttccccctcccctcct

SEQ ID NO: 24639 - DNA, 14195 bp, Oryza sativa
atcaggtattgtatatttactaggttgcccatttgcctggaatgtttgtatatgccgtcttgtgctcttgtgtggctgaaggtgcgaaacctctgcaaacctgtagatctcgaaattgagcatgatcccggtggtttgcttgatggaatgggtgctcaacagcaagcactacaccaccaaggttatatcggccgtggtcgtcgtggcggcgggtgttgggatttgcacggtcacggatgtggaggtcaatgccaagggattcatctgcgcttgcgtggctgtcttctgcacgtcgcttcaacagattgtgagtttttctccccccttaatcctgatactggacctgtgctgttatgcatttcaaattcccctttaggatgttaaaaatactagttatggatactgcaattgccaactactcaagcgtttttttgttaacactataggcttgatactcttttgaaactgaatcatgttgctgaggatgaaaaaaatcagtttttttttattgaacaatggtgtagcaatgtttttgtggtggcacttgtttttcaatcttctgttaatttacttaggacattctgttgtaacactattctgaattgcgatagcattcaaactaaagtgtggatgctagaaccttgccattgagtcctcagaatacagaaaactcagaaacagccaatctaaactgtagaatagtaatgctggccatagaattgtacatggaatgtttattttcgcatcataagctgtagatttgcaattctcacgagtcgtgatagactatttttatgtaccccttcagccttgatactttacattgtggaatttacatgctagctgtgaatcactttgaagatttacgaccaagctgaagcaacttttggactatttaccagtttctaaaacttggatcaggctgtggtccaactagggcaaccggggacggctccttttaggatactactagagatattttttgggggtgaaatggactataaattattttattagattgtccagctcaggatttgacttagaatacgacctgcaagctgcaatatccatcatgggaacatgtcaataggcaaaaaccaagctgggccatcacccctctattgctaggatgggactatgggaactaaagcctatataagtgttgaacaggatcatataactatgagttgagattggattcaacataactcaagtgataataactactatattattgaaccgtagacagacagtttgaagtggcagtcggacctgtgaactggactgcaagtggttcaccggccagcttttaaaaactatgcctatgatgtttatattcctgtaatcttattgcattggacagtgataaatatttatggctcttcgtacggtaataattttgatacataagttggtttttgaaatttgtggaagatgattacttaaatctgaatgctgatggatccttctttgtaaattatatgctgagttctgacaatgcgttacttgtccttgtcccagacaattggctcctttcagaagaagtacaacatagggtcatttgaacttctcagcaaaactgcaccaatacaggctgtgtctcttattatacttggtccctttgctgactattacctcaatgggcgatggttattaaactacaacttctcaactggggcaactgtaagttctctcgcatgtgcatgtcacaattttctattcatgacagcactctttccaaatgaatgatacctttgccatgttattgtatcttctactctagatttgtgctagtactattgagtattttattggaatgtttcatcaatgatttctcccattcttcatgttgagtggacatccccgcatcagtacaccactagtaaattgtcaactttgtttcccattgaaatattatttgttttgcctaatgttcatcccaagaaaattgttgaacgattagtttctattctatgactacagcacggtgaaactggaatttactgctaaccaaacagaacagttcctatcatgcagttttcgtgctgtggtctgttttaatcattatgcacttctccttgttgctttaatactcctactgggaattcttaaaacatgttctaacaacttgctatgttaataactctgcagttcttcatattgctttcttgctccttggctgtcttctgcaacatgagccagtacctctgcatcggccggttctctgcaacttcgttccaggtcctgggccacatgaagaccgtgtgcgtgctgattcttggctggatcctgttcgactcggccctcaccgtgaagaacatcctcgggatgctgctcgccgtgatgggcatggtggtctacagctgggccgtggagaccgagaagaaggcctccgccccaatcccccggaacaagagcgacatgctggacgactccgaggacgttcccctcaaggccagggtgagcggcctcccctcgtccgacctcgaggaaggcgagatgaagagctagctaatgacatattatttattcattcttcttgttcctttcttttttgtacgtgttcaaatccatatattgcccccattctgggggaagttcttgaagctatcggcacttgtgttaattttgcctcctcccttgttcctggggttcatagatgatgatgatgctgatgaaccccagccggtctcgacgtagatgaccattttagaagccatgttcttgatggcgtgttgttattatagatgacaagacttataatggaatacaggtgtttatccgttgtaggatgattctgttgaagctgtcgatattttttttcttcttttttgcttgaggtttggctacctgtctgcttgtgctgccatggtggtggtatctttcgccatgagtgctatgcgcatcggcatcgtgcattttgtcggggttgcctgcctcacatgggagatggtgggattggacagtggcacgtggcgaaggccggcaacgaggatgtcgacggcggccggctgccggcccagcgaggaaaagccacggccaatgacgggaatactaccttcttgtctttctctgcatgtgacgtgtgaatagttttgaactttagatgtttttattatactctcggttttggtagttctttgtccaatcaactttgtagatataattggagaatattcgtaatttgatgggtaatgggttctgtggagttcgattcagttggcttcttgtaaagtataatccgcctttgggagtttgggcgtgacaagtggcgtaatcatcaaccttaaaacgtgtaaatgagtcatgtgtcatgctatacatagggttcaacctctatgagggtaggataaatttcaagtcgagttgcctaattttccagtcagggtactgggtaaccccaccttcataaacaccatgataaaaaggagtactaatcacaagaatgcacaatcacacaccagtccatgcacgctttgcactggacgatatcaccacatacatgtccccctcttttgtttgccatcaactttgtccaaactgccaccatatgcattggaaaatcccttgcctatccggttagtcttgtagactccaatcacctggctgtcttgacacggaactcggatcaagctgctgattccgaacataattaacttattttagcgaaaagtacaaaaaattaattatgtttcacaatacaattgaaatatatatacactctccgtaaaaaaaaaaaaaactagaagtgaatgtgatatgttcggatttattgtactaggatatgtcacatacagctgtaggtttgtattttttttttacggagagagtatgtttgattgaaaataatgttaatcatcatcctattgaaaataacaaaatggaaagaacttctccaatttgtttatttctaaaggaagaccccctttttgtcagcttccttccttacccttgaatgttctcatcaactgctcctacagttctactgctattatactgctaccagtacattcttgacagtctttccacccttttgcctgcatgtgttttgaaattcttcatttcttcccgggcccgtggtctgtgaagtcaaattggatcgtttagtttatctgttttacttatcattcacctgatctcctaaacactagttggtccacgcatgtatccctttaacttgcacagtcgcggcacatgatctacccactgggacttccaaatgcacacacatacatgtgctttgaaaacgaataggcgaataactaactctccacgaccacgtctaccagtacgtactacttgatgtttttttttgctttatttatttttcctcgtgtgtgataggatattgagcaatctcatcgtcggtactttgcagaaataacaaggcaatatatatatacacgccgtgtcgtacccaattgctgccgaataaaatcgttggcaatatcataaatcgatagtactcgaaaatgtgtgatgtgtggttggtggcttggtgctaccgtgctaggatgatgccaagaagtacggttttctttttttggaaatctattgttctatctgacaaatcggattaaatcaagataaattatttttccgacaattatcgcatcccacgaaatttcaactattactattttacaaataacattgcaaagtgtagcacccttacattatttcttcggtataagaagttttggccctcgatatttttttgtctttctcttagctctagttaatatatatatatatatatatattttgtcttgagtggtttggggttttgtgctattgggccacaccattaacttttttttttacatataacatcaatgatactccaaatcatttgaaattcttttcattaaggttttgtgccacgccattaagctttttttatatacatatagtcaatgttagcttatctgaaattcttttgaagtgtatcaaattataccatcatttgcaccaagtaggtataatgcgacatcaacaaaaagcaccattaaaaccatccatcatccatgcgtcaaacatggtttgatggtttaaatatctcacgggtattcaaaagtttcttaaacaatgttaccatacactatgcaaaattgcaaatgaaaccaaactatatagatttcaaccatctaaattaagctggccactcgtatactcccttcgtcgtaaaacaaaccaatagatatgatatattataatactatacagatttgtggggttagatttaataagtctcagcacagcaactgaactttcatcctttcgttcctacagttcgtcagttcgtcacttgtcgccgagggagactggaatgcaaatcaaacgcacacgccttgcacgacgcactcatgcgcacctgctccccctataaatcgagcacaaaaagcctgtctctcctccccacaggtagtggaacggagccaccgcccaactcgcccccaaagttgcccatctagataagaagaagcgtcgcaactcacggtcgcagtgccacgccccacttcatatcctttcccttccccaactgaaccaaaaaaaccaccggggaaaacttcttccttcttcttcccctttgaagccatgggtggctttcccccggttggcggcttccgggttcggattttcccttttattcccgccggcgggaaggctgggacagcaggggcggcggcggcgtcgtacgcgcagcaccggcggaggttctgcgccatcgtggcgaccgcggcggcgtcaccggtgccggccgcggcggcggcggcggcgacggggtttgattttaacgcgtatatgggtgagaaggctgcggcggtgaaccgggcgctggacgcgtcgatcccggcggacgagccgcccgcggcgctccacgaggcgatgcggtacgcgctgctggcgggcgggaagcgggtgcggcccgcgctgtgcctggcggcgtgcgcggtggtcggggggcgggaggcctgggcgatgcccgccgccgccgccgtcgagatggtgcacaccatgtcgctcgtccacgacgacctcccctgcatggacgacgacgacctccgccgcgggaagcccacctgccacgtcgtctacggggagcccatcgccgtgctcaccggcgacgcgctgctctccctctccttccaccacatggccaggttcgactcctaccctccggacatcgacgctgacaagcaccccgcccgcgtcgtccgcgccattggcgagctcgcgcgctgcataggctccgagggcctagtcgccggccaggtcatcaactcgtcattttctattcgattccttattcgagctaattaagaaaatacaaattaagcaatgcactaattatgtggatcatactctttcctaattgctatgttttgtattgctatctgcatacgttttaattagatgttgttaagcaatgcactaattatgtgaatcatactccttcctaattgcgatgttttgcattattatctgcatcgttttgactagatgttgtaaatactcttaaaatagaatgtgacttcgagttgtgtcgttgctgaaaattgtttgttaaattttggataggttgttgatcttgagatgactggatcgaccgaaactgtacctcttgaacgtcttgagtacatccatctccacaaaactgctgcattgcttgaggcatcagtggttattggggcaatcttgggaggtggctctgatgagcagattgaaagtttgcgcatgtatgcgagatcgataggattgttgttccaggttgttgatgatatacttgatgtgaccaagtcttctgaggagctcggcaagacagcagggaaggacttggcgagtgacaagacgacatacccgaaattacttgggctggagaaatcacgggagtttgcagaaaagttgctttctgatgcaagggaacaactttcaggatttgatcaagagaccgcagcaccacttctgcacctggccaattatattgcctatcggcagaactgaggtgatgggtactccattgattattgttgatttgtaactttgtaagctcattaagattcagatttgaggaatatctgaattatcttgtgatacgtgctagttgtagtttcttatcttgagaagaatatctggttgacaaatgtcaatttcctagttagtcagtcaaaacggaataatgaaaatcagcctctctgccctataccccaattgcttgattcttgacaattgaacacatcatatcataaaggaagaaaatattttatcttcattgttttgattgattatcatagttcatgttcatacctgttttagtgtttatcctacgcaattgatttcgttttatgtgattgtatcaggttcgttttacaatgagtgtcaatgtaagctttgattcagggatgagcttgtcttggaaattgttctgttgaacatgtgtttcagtgatgttcttctgtttacagcaattgggatcaatgtttctctaacagctatatatatgtatattcttggttccaagcatgcagaaaacttcaatcagagaaagtgtttagttacagtgccgtagtaaataaatcggttataattgattcctgtctataggtgtgcattcagtcttttggtcaattcgctttgtagcaaaattcagttagtcaaaactcaggaatgaattgttattgggaaaaggcaagaccgaaattcggttaatcctgtctattgctcaaaaacctatacaagcctttcatagtgaatgtagcccctgcataaggtttcctgtacaggtacagtaggaccttgactaaatgtttttcattggaataatggaatggttataagctgcacctttcttgttcttttctagcttcttgcgcaaacttattgctctatcttcttgtctttgatctcattgttttactgaaagtactgggattcaggtgatatggaaagcacaaatgggactaaatttggttccccggtccagtttggctgtccatatgtggttttagtttccaagttgtttgaactgaaaagagtagtctgaaaaatttccccatcatgcatagaagttgagctgcaagtcaaatggtcactggtcagtttgagcgtggtattctttttcctaccatgtgctgtggtggtcttctggtcactttgccagtgaccgctgtaatttgtaattttgtatcatgagctccttggcatcccagtccgagttcgctttcaagactttccagtatctttggtcggaagaagaaaacaaaatcatttgttctgacgtttcctagtactgtcttctgaatttagtaacctgatggatggaaaaatatgaataatgtgttttgacgtcgaaacatgagtcctcggcaccccaagactgaatttgcttcaagaattttagcatctcgttggaacgaaaaacgaatcatgtgtttttgacatttcctaattgctgttcttctaatttcgtaacttgatggatggacaatacgaaccatgtgttttgacatttcgtaatgctgtttcgtggaaagggcatcgtgactagacaacatcttgggagagaagtagggagtagaagcaggcaattaacacttgattgaacgttcttaatagttgacaccttgatactaagtctgaaagtctcctcagttgccctaataaatcaaagtaaaagcaaaaatttaaattcaaaattgattttaagatatttttaacataattatttttagtgctgaattttaagttgctacgaaaattatataaaaattttaccaataaatccatcatgaaacttgttcgatgtccgtatcccgaactctgtaccttaaactatttcatactctggtcgtttggtgaagttgacctactgcagcagcagcagcaccaccatttacggtgaacatactactcctacaaaagaaaactaagaagttttaggctgcttttccacccccccccctaactttcccaatttctactcacttattttctaggatatttaactttttatcattttaagatgcggcaattaaaaatttgccactcgcagtaaatgccatgttggtccagtggcaagtccttaattgtcacttgtaacagtgacaaatagttaatattcccttattttccacgggcatgctccacaaagtgttaaacggtgcatttcttttaaaaaaattgctatataaaagatgttgtaaaaaaatcatattaatttattttcaattttttaagctaatagttaattaatcattttcgtgcgaagagaaaaacttcctgcattttttctccactttcttaacttctccttcatcgtttttcacgcacacgcttttccaattgctaaactgtttcttttaaaaaaatccattggaaatttgtataaaaaattaacatataggcaaattttgctgtatgacactgtggctttatggttttaggtttaggacatgacaaaattcgatctttggggaagacattattaaaatatgattatttgctgcaagacgccgcatgtattaatatattattttttggttgaataggagagataaatagcgtgaaaagtcaaaaatgcccctaaccctacttgttatatactttctcttcctcttcctcttcctccttatttccccttcctgacatcgctgcacgggcacatcactagggacatccaagttaaaatccattaaaaggaaaacctttgaaagtctaatatttcgaagaacaaatacatggaaatctagaagaggaaaaaataacgaagcactaatctcatttaggccccaaataaacgttggatttaaagtttatatgctaaattatagtggtttaacattttatattatatctaaaataaaagcaaaatgattcatccaaatgttattaaagcaatgacacatccagatctatagatttgtgacactagaaatatccaacttcaaaataaatcctaaatcgaagttgtgacaaataggtttaccgtatctatggccatcaaggaacaaacagggtgatgagcagcactaccatcgactcggatgattggggcctgggggtactggactacatcctccctcttaccagatgaactctttccaataatgtgattgccggtgttgtatctatatccggaggctcgtgtcagatcaaagtaacctaatgctcaacatcataaaaaagaaattaaaatagtactaaaagcctttataaaacatgtggttttagaagaccatacgcggactaattggtggatgcatgaaccgacgtgtcgattttcaagtatgtataaaatcaaatggcccaactcaaaagacggcggccagaggtgcgggcggcgcgacggccttcgtggatggcggcggcggcgcatcctggcgagggcggccgggatccggcctccctaggccagatctagccgggaagctgccgggctagcggcggctgcggctggaggtggcgcagcgcggaggctgcggcgcgtcagctgcggctgcacggcgtcggcatcggcggcgctggaggtggtgcgacgtccgggcagctggacgacagcggtggtgccggtgccggatgcggtgcggtggccgcgctgctggacaccggtgccggaggcggcgaggcggccgggcggctggaggcatgaccggcgatgctgggcggcccgggtggccattggtgggcggcgaggtggcggcggagcggtggcttcggcgaggccgccattaaacctggcggcagggtagatcgcgctggcggcgaggtcgtcttccttgtgggtggctaggcgttcactgtgtttggggagctcctccccttcttcgtggggagcttttaggcacggtggaggcgttggccggcatacagggaagactcagtttgccaaagcgagcttgttcccgttccggtcccataggtcggattcgacatggaggccgacggacggcgtggcggaggtggcctgggtcagcgtgcaagggagtggaggcagggtaagggcgctggcggcggggtcgtcttccttgtggtcggccaggctaatcctgtttggggaactcctccccttctctgtggggagcttctttgcaggctggaggcggtggtcagtctacaaggaaaactcaggttgccgaggcaatgttgttccttgtctggactcccttgggccgcattcgacggggatgccggcgtgcagcgtggcggaggcggcctgggtcagcgcgctggcgaaggtgggtgctgtggcagtcttgtcattggcaggacgggaagccggccggcggaggggcgtcggtcgggtgtggcggaagccatgtgccgccgatgtttagttggtggtttcggatttggcgacggaccatggcggtaaggggttccgagcgaaagcttagcccaatttctttgggccaataatgacttcgctttcgggcgtggtaaccctcctgagggcattgttgaggtaccccttatccctcgacagggagctctgggtgaaaaccttgtcccgtttttgggacggatgacgacggagtttttggcgtcgcaaccctcgtgagggcgtcattttagagtcttcgcgttgtggtggtgttattggcccggtggcgatcggtctcgcatagcgacggccggttcggtgctcggcttccctctctgtagcgtgtgtttgggcggttggcacacgttcggggtgtgtgctctggtgcacttccttcctcgacagccaactctgtaaccttttcttccaatcttaattacattgaatgacctcctttggtcattccggcaaaaaaaaagatggtatttacttagcctcggcagcctacaaaatgttctttgaagtcatgttttcgtaagctgttttggaaggcaagagttctaggaaagtgtaaactttttatgtggttggtgagttagggaaggtgcatgcttgatggcagataatctgcagtggcgcggctggcctcaccaggccctgtgttcgttgtgccaaacggacaccgaaacctgcaatagtgcaatgtcatgggctttgagctgggagtcctaggctcaatgggaacgatatccccatccccgacgataagtacttagtggatagagttagatcactgttaggatcagattaaggagtttgttaggattaggttaaggagtcctccatcaatataaggagggatcatatcctagatcagttaggtattaaggggttgtttggtttgcaactaaatttaccacatctaaccttaggcaagccatacttttagttgatagtgtttggttcctaccacaactttatattgcctaactcttagccacctaatccacatgtcataaactctattttcttgcctaattttgtctaagcttagtttgtcattcatcttcatattgtttgtcacaaaagtgtggcaagactattagtcaccttagtaaaaaaagaatgtgtgataatattagtccccaaccaaacatactctaaatcaagatttatcttagtgtccattgaccctgccttctcggtgcgacggagagcatcgcgctgtctaggttatctgtttctttctctattataatccaatctattcccttcaccccgtctcatcctaaataatcccagcacgtgacaacatggtactaggtcgctgtgccttctcgttgcaaatttggttgagaatctgccaacggataggaacggtgatgttttcacaggagatggtctcttttgctgggtgatacgaagtccggaagaaggttcacaaagaacagagaaaactgcttgactcgatggtgatcctcgtcgcatgggagatttagaaagagcgaaatgccagggtactcattcgtatttggaaaagagttcaatacgtggaaattagctggcttaatccggtcttgaatgtatagcattagtagttaactgttctcactactaggaccggctactcctggtgatcagcttgtatatattttgttgttcgtagcacctattttgtgatgtacccttctctccttccgccgttctggcgaaaagagaaggtaacacaccatttattttcagaagttgtccatactcctttgcgaactggagcaactttatgtaatccttggaaataatatgcccactagaaaaatgttgtaccaaaaggtacgatgactgaatcacgccattcctgttcgttcctaagaaccaatatactacgacattgacaggagctccatttcatatacaacacagaaacctcaaatgagtgttatagtcaagcgatcaggtaatacgttgaattttgctgatagacgacttctgaagtttggtatataatggagagccacaggagatcacagcacatcagtatccagctttctgtttaattatatcaggtgctatctctgaagatcttttcgcctttttttttttatctttcgagtcactaagtcaagtttggtgggcggctttcttgcttgttatcctgatctgagcacatttcatcaattcatctgtgtgtctgaaagtctgaatgtctgattcgattctggagatacactgcgcagggagcaccggcgggatgcccttcaagacgggtccaacaagcacatgcgcacatgccggctgatttgccgatcaactcctggacttcgaaccgtactgccatcgaatattgttcatagccactgaccacttcagttcttcgctaagtcaaatgccagcaagtccaatcctggtcgtaggataagagaaaatgatggaactccagctctgctgttcatgttacttcacttaacgttcgctcaggaagatgaaacagcgaatcgtatgtgtttctcctgtccgttcgctcaggctttgtggacgcagatcaacgttcaaccgcaagctcaagacgtcacgcagttccatcgtttgggtccaactacgcaagttccggcgctacactggcaggtcttcttcctgctttgcatgtgggctatttggaatcatcgacacgatgttgttttccgggggaaaagcccctcactaagagcctgcctacaacgatgcatcaccgaggcagctctctgggcagagaacttaacggaagatgatcgatttgtaatctctgttgggaaacaaatcttctcctccccattacaatctatcaatcttttgtaatgaacttcgtacctctaattgcaatgacaaattcaggtgggga

SEQ ID NO: 24640 - DNA, 8659 bp, Oryza sativa
tcccccccccccccccccctatttagtcaaaaaaaaaaaaacttcacttaacagatctgagacaagacaagtgactcattgcagaatcgttgcaattctcacacaaaggtttgcagggaaaaaaaataaaattctaggttttaaggtaagttgattggggttgcaaaattctaggttttaaggtaagttgactcgttttaattttcctttctatgtttggcagcaatggcggctgccaaggtggtcgccaacttgcagattcttggcttgtgtttgctccatctctgcctcgccgcgtccgccgccgcgtactatccggacatgttgctggagacgtcgttcatcccacgcgactacgcccgctacgccgacgagctgtcgccgttcgatcccgtcggcgccggcgtgctggctcgcgatctgtccttcgccaatggcgactggggccaggacgccggccgcgcgccgctgatgccgtcgcaaggtggcgactcgccgttcctccgcctcgcgaccttcgccgtcacgcacatcgacaccgacgcgttgcggcggcggcggcccgcgatgtccgccgtcaacgtcagcggggtgctcagcttcacaatcacccgcaactgctgctgctcgtcggagtatgcggtgccgcaccggcaagtgtcgccggagttcaagctccttcccggcgcttcgaggctcactatactgttcgagggcgtgtacaccgagacgaggtcgccgggtaacgacgacgacatcggcggcggcgagagggtgctgtgcatggtcgggaacggtgttctccccatgcgcggcggcgacagcgcggacccgtgggcctgggcgaggaatgccggcgacggcagcttcgaaccgccggtcatggccgacggcaacatggtgctcatgctacggtacccgaaggtgcacacgttaacgacccgagcggtgcgtggcgagctgacgagcacgagcgccgcctcgcacaatgcttacttcgacgcagtccggctggtgtcgcggattggccagtactccagctacctgttccggccagaacacggcgagctcgcggccaacgggtgcagcaccagcacgacgcgtcccttcgtctgtgacgacggcgtcgagggcaactgcgccggcgacctgcacggaggcgcctcgttctgtgacatcctcaccgagttatctcccggtgaccatggcgtgctcgccgtcgtcccaaactggaactgcaactccaccgacgagttctgcagccagctagggccgttccagactggcggcggagccacgaacacgacggacaggatgctcaccggcttcgccatcgcgatgcaggacctccggtgcgagccgcacggcggcgagaagccggccgcgagggtgtcggccgtgttccgtgccgtgtcgccgtgggaggaccagcagctggcggtgaggcggaccggtctgggcggcgcgacgctgtcggcggagggcgtgtggagggcgtcgacggggcagctctgcatgacggggtgcctcggcgtcatcgacgccgccgccgtcggcgacgaggcgtgccactaccgcgtctcgctccacgtcccgacgacgttctcgatccgccgccgcagcatcatcgtgggacagatcaccgccggcgacggcagccacttcccgctctcgttccaccagagcgtgcctcccaaacatccatggaaccggttcggccgctccgaggcgtcgctgcgcgtggcgtacgactacacgaaggtcgagaacgccggcgagctcctccggaggagcgagccgtccggattccggagcagctccattgcaaaagcactagtaagctatccaaggaaagccggcgccgccgccgccgccgccgatgagatgatgagtctctccgacctcgccgacgacctgagcctccacttccaacccggtccaaggctgccgttcttgccggagcagaaagtgtggccgcaatggccggcgttacacctcgatatgctctctgtcgggccgctcgtcggaagctactcgccgccgttgcggacattgcctagtacgacggtggcacgggctgagattgacggcggcgtggagcaacagcagcatcagcttctgaacgtgtccgccgtgttgagcttgtccgggaagatgttcggctggagtccggtgatgtcgctggagggcgtgtacaaccaggaggacggccgaatgtacctgatcggctgccggaacgtcgaggcgccatggcgaatcgtgtcgacgagcagagacctcgaagacggcatggactgttcgatcgaggttagggtggagtaccgccgaagacgacgcggtggctgttcagcccgacggcgacggcgtgcatctccagcacgagggacgccggcgacccgctgcatttcaacacgaccgagctgcgcacgacgccgatctcttaccgcggcgggcgccgcgacgcgccgccggacacactcacggagcagaccatcgaggggctcgtctgcatcgccatgctgtcgggcaccatcgccgccgccgtcggccagctgcgctacatcgcgtcccacccggacgtcgcgccgtacgtctccctcgtcgcgctcggcgtccaggccgtcggctacaccgcgacgctggtcaccgacgccaagatgctcccggcgtggccgacgtacaactaccggatgtacgtaggccacctccactggaacatggactccaccgtgaaggccctcaccctcgccgcgctcctcctcacgctgcgcctcgcgcagaaggtgcggcggtcgagggcccgggcgcgcgcgcggtcgccggccgagccggggcgcgtcccgagcgacggcgccgtgctcctgcgcagctccggcgtctaccttgccggcctcgtcttcgtcctcgccgtccatgccgtggccacgcacaccagctcgacgtcgaagcaggaggtgttcttcgttgaacagaaggcggcagcggcgtcgcacgcgccgccgtcgtgcatgcgcacgaggggcgccgtcgtggagcgctacgtcggcctcgtgaaggagtggttcctgctgccgcaggtgatcggcaacgccgtgtggcgcgtcaactgcaagcccctcaggaacgcgtactacggcggcgtcaccgccgtgtggatgctgccacacgtctaccgctatctccggccgccggaggtgtacatctaccggcccgaggtgcaggacgacgccatggccttctacgagaaggccaccgacgtggtggtgccggtcgttgctgtggcgctcgccttgttgatctacgtgcagcaacgctggaactacaagattgttggttggtcgttgctgagaacggaagcacgtctactgatcatgacaagaacagtggtctttgtcgctgtagattgttttaagaatcgtctagaagtaaaataattagtgactgttttttttttatcgggaatgctaggggacgggataccgttctccaacgggatagctcctctccacacgcgattcttatccatacactcacttgccgccgtcgccgtcccccaccgctgccgcgcccgtccccgtcgcctcctccgccgccgccgtgctcgtccgccgccgccgccacgcccgtcccccgtcgacgccgtcgctgtcccccgccgccgctgcggcgtccgtcccccgtcgccgccgccgtcgccgccgcgcccatcccccaccaccgtcgcgcccgtcctatgccgccgccgtcgccgtcgccgtcctcggggtgctcctcccccaacaggatgtccaactatatctagtaggaatcacctgatacctggtaggtatcatccaatacctcgcaagtatcatgtgatacatggtagaaatcatccgatacctcgcgagtatcacgtgatacgtggtaaaaatcatctgatacatgacaggtatcgcatgatacctcgtgagtatcacgcgatacgtggttgaaatcatctaatacttgacaggtttcacatgataccttgcgagtatcacgtgatacatggtagaaaatcgcatgatacctgataagtatcacatgatacttgcaggtatcacctgaaacgtgtgtagaatcgtctgatacctgataggtattacacttgatacctacttgggatcatcctgttatgtagaatcgtctgatacttgataggtatcacacctgatacctactcgggatcatcccgttcgaaaacgggataccgttatatagcagcccctttttttagaagagaattagtgactgttaacgacccaaattatgtccagatttatgcagctatagtaaccttaactttgtctccttcccacccctcacaataagccttcgtcacccttgacttgctagcgccggcaagatcacaatgtcggcctccgtccttccccctccctctccctctcccaactccttcctaacctggctgtgttcggtactaggagttgggaaccatctcctccgcacgaaaaacgaagcagtccattagcgcacgattaattaagtattagcttttttaaaaaaatagattaatttaattttttaaagtaactttcgtatataattttttaaagtaactttcgtatataattttttttaaaaaaagtaccgtttaaccgttcgaaaaacatatgcgtagaagacgattgagagggattgggaacctggtgaatcgaatgcagcctcaagcagcagtgtcaaggtgtcccttccccgctatcttcccatcttcgggcggctctcgccactagagatgccactaccaccatcacctactatattataaccatatactctgacttctgtgccaatacccaccgctctcgtctaacccaacggctctggtagggcaacgcgctctgtatttgtagtattatattacttgggggcctctgcaactctcgttccactttgattctgtctttactccaatcaatttttttttggagtgcgtatcgcgtggttgagtctttaacggccctgtttagatgggactaaaaacttttaagtccctatcacatcggatatttgaaaattaattataaatattaaacgtagactattaataaaacccatccataatcttggactaatttgcgagacgaatctaatgagcctaattaatccatgattagcctatgtgatgctacagtaaacattctctaattatagattaattaggcttaaaaaatttgtctcgtgaattagcttttatttatgtaattagttttgtaattagtctatatttaatactctaaattagtgtctaaagacagggacttaagtctgagagatcccctcataatttccccaaaacgtaaccatgtgtgaatagattttgagtaagcagggttgcagccacgagtgagtcttcccttgttattgtgtagccagaatgccgcaaaacttccatgcctaagcgaactgttgagagtacgtttcgatttctgactgtgttagcctggaagtgcttgtcccaaccttgtttctgagcatgaacgcccgcaagccaacatgttagttgaagcatcagggcgattagcagcatgatatcaaaacgctctgagctgctcgttcggctatggcgtaggcctagtccgtaggcaggacttttcaagtctcggaaggtttcttcaatctgcattcgcttcgaatagatattaacaagttgtttgggtgttcgaatttcaacaggtaagttagttgctagaatccatggctcctttgccgacgctgagtagattttaggtgacgggtggtgacaatgagtccgtgtcgagcgctgattttttcggcctttagagcgagatttatacaatagaatttggcatgagattggattgcttttagtcagcctcttatagcctaaagtctttgagtgactagatgacatatcatgtaagttgctgataggtttccagttttccgctcctaggtctgcatattgtacttttcctcttactcgacttaaccagtaccaacccagcttctcaacggatttataccatggcactttaaagccagcatcactgacaatgagcggtgtggtgttactcggtagaatgctcgcaaggtcggctagaaattggtcatgagctttctttgaacattgctctgaaagcgggaacgctttctcataaagagtaacagaacgaccgtgtagtgcgactgaagctcgcaataccataagccgtttttgctcacggatatcagaccagtcaacaagtacaatgggcatcgtattgcccgaacagataaagctagcatgccaacggtatacagcgagtcgctctttgtggaggtgacgattacctaacaatcggtcgattcgtttgatgttatgttttgttctcgctttggttggcaggttacggccaagttcggtaagagtgagagttttacagtcaagtaaggcgtggcaagccaacgttaagctgttgagtcgttttaagtgtaattcggggcagaattggtaaagagagtcgtgtaaaatatcgagttcgcacattttgttgtctgattattgatttttggcgaaaccatttgatcatatgacaagatgtgtatctaccttaacttaatgattttgataaaaatcattaggggattcatcaggacttaagttaagtccctggatgtaaacaccacctaaatattggctagagacgatcgtgcagcatgtggtcagagattgatcataactatcttcaatctcggcttaaagattcggagaagatcatatcagtagctcttctcgtttccaaggataacatgctgcagcctggagaagtcataagacagcttcaatctttcttggtgaaagatttggagcagattatgtcaatgttcatttgtaaggtgtccaattatccattgttattttcatctctcataaaccccaaaaaaaaacatcttgctgttgcagcaacaagatctccggagccgtcgatatgggcacaaatttgctgtttcttccagagttcttgctgtatacgtgcatgatggcatcatcatgttttgcttaccagttcaacccaagcgaggaagcagagcacagctatcttcgctttgccgatgtcaagcggcaatgccggtccgtgctcacctcggcgtccgagctcgccgataacgcgtaccgggtcaaacgcgtgaagcgtgagctatccttcgagaagggcgactggcgccaggacgccggcacggatccgctggtgccattcgacggcggcgacgcggcggaggatggccgccggccgccgctggacccgctccgtctcgccacgttcgtggtcacgcatgtcgacgacgatgacgagcgccgtgcgcgcaatgctgtcaacgtcagtggcctcctcgtcctcacgatctcccggacgagcgcttcaccggagatcgggtaccacgtgccggtcgtgtcctcgccggtgttcgagcttttgcccggcagcaccaagctcaggattgtgtttgaaggcgtgtacacggaggcagcgaggtccggcaatggcggcggcgagagggtgttgtgcatggtcggggccggcgttctcccaacgcgcggcgccgacggtgccgatccgtggggctgggccaagaactccggccgtgctggcttccagccgccggtcgccaccgacgagagcatgctgctcgtgctacgttacccgaaggagcttacactgacgacccgagcggtggtcggcgagatgaggagcacgcgcgccatgtcggacgccgcctacttcgacacggtgaagctcgtgtccgggcccacctggaaccgccagtacgagttccggcgccccgaggagcttgctgcggccgccgggacgtgcaggccgctcacctcgagcgacgacggcggcaaccgcgcgagggatctgtacaagggcaggcatctgtgcgacgtcctggaacgctacatccatggcgtgatcaccgcgcgcccaacctggcgccactgcaactcgacggcgacgggcgcgccgtgcccgttcgagatggaccgcgcagaggacgccgccatcgtcggcatcgtactgcacgacctccggtgcctggggtacgacctcgacatggccggcaaccccgggggcgtgaaggtgtccgtcgtgttccgcgccctgtctccacgggagcactggtacacggcggtgcagcgcacggcgctgagcggggcgacgctgtcggccgagggcgtgtggaacgcgtcggcaggggaggtgtccatggtggcatgccgcggcatcggcggcaaggcgtgccacttccgggtgtgcctgtccttcccggcgacgttctccatcaccggccgcgacatgatgctcggagagataaccaccgtcgacgtcaacgaaaccggcggcggcgcacgctcctcgctgtcgttccggcagcgcatgcctccgccacggctgcagagatgcgtctccggtatactgccagtggtatacaggtacaactacacgaaggtcaagctcgccggcgagtttctccggaggaactcgtcgccgtccgacttgagggagatcattgcgaggtctctacccttgagctatccaaactgcggcggcaatggcgatggcaagagaagcctggccgacctcgccgacaggctcacgctccggtttacggc

SEQ ID NO: 24641 - DNA, 4172 bp, Oryza sativa
  unsure (1)..(4172): unsure at all n locations
ccttaacgggcccaccggttattgtcgacccaattgacctttaggtttgatgggccagaatagcttctttggccctcccggggccaaacctgctacggcgaagtcgtccccctttggcatatgctcttcgccttgagtccttcgcccatgaggcctctagcttggctgcgattccctgcctctcgccgtccttgctccatagtcttcgccaggggggggggggttcgccttgactaaccctgacgtctcgggcttgaatccccatcggtcgcatgctttcggcaggtttggtcgaagggcctcatgccatatcgccaacaagcccctcacgggcaagggtgagataggagcttcggccgagaccgtgcaaaccatgtggtatggtatgtggcgccccctttcgaccggtgctcctgtcgaaacctatattgttcctacaagtaaagtttgtttgtttctacgtttacaaaaaatttctttcagaaaaatctcctcttcacgttcgttgcaaagcgtcgatgggggcttatttagtctcttttattactatgaatagtaataggccctttgggtttttccttctccgtaatcgggctttttactgttcagcaccgtcccgatgggaatttaccgtttcgtctgccctttgacacgtgtcagagctcgattggttggcaggcgaacggtctcactacagggttatatatgcccccaaaccggcctgccatttttcactctccccgtgctcttcccctttttaccgctttacacgctccgtgctctcttcgctctcctgttttttagctttttcgccatcgtcgtgctcctagcctttcggctttttacctctctttcctatgctacaagcctaatggctccccgcaagcctaccaaggccgggtcaactggcgaagatcctggaagccttggcgaaggatggtcgtgcttccttggcaaatctcttgtcaaagaggccgacttgggcgaactggtatcatccggtcttctcatagagggccaaggatcgtgtgggggcaaggctgttgttccctcgcctggggatgggcgaccggttgtcttcgccgcatacttcgctgctgggcttcgcctcccatgcgacaacttcttgccttcggtgctttcgatgtatgacgttaggcttccccaacttagcccgtcagcgttcccgaagatggcggttttcgcttggatgtgccggacctgtgggttcgcccctaccgccaagctattcgccgctctgattactgcatgcgcctcgaccaaagacgtgcaaacgccggcgggtccgaggaaaaccgttttcggctgcgtgaacttcatgctgcggccggagcgttcagatgcttggccagtgcctgcatcgatggcgaaatgggacaggaactggatgcagaaatggttctatatcagcaacccctactccaccgaaaatactcaggcaaactggctgctttttgagcgttctgccgtctgcatcaacgcgaagccaaacgtggagatcgacgggactcttgagtcccgactcattctccttcgcaaggttgcccggcggctgagcacccgggatctttgcgaggagttttgtctccttcggatttccctctcgcccgtgtgtgggacgtttctgtgaacgagggcgaagaagttcttgggcttccccgccttgttctccccgccggggtcgaaagtaaggtttttgttttcgacttaggccgcatacttccttcgtggaagcgcttttttggctaaacggttgtgttcctctcttttcgcagtgcggactttggaagacgctgagattgaggcgtcgaagatgatcggagctctaaccacagccgagttcgcccgcttgctccagcgccatgttgacggccgagtgaaccgtgtctataccggcaaattgccaagccgatcgaacccctctcgggccggcgatgacgaggctggcactttgaaaaaacgcaaacgtgcggtcgcgaaaggcggccaagtccgaactcgccgtagcgcgaaggccgccgtcgaaagtgatggggaggaggaagaggaggatgcggaggccggttctgaggaggatggctctcatggttatacccccagccctacccctgcgaaatccggggcaggctctcatgtttcgcctacgcgactgcaagatatcgtcgtagcgaacaccctcttggcgatctccagcacagccgcgaaaccggtgattaggtttaggtaaaagttcgactgttatgccggtgaagcacttttccatagaccgaacggcctccaaatacctcttcatcccttcttcttttgcctcaaaggacttgtcgatatggcccgccaccagcttagagtcggttcggattagcaggcgccgaatccccattgctttcgcctttcttaggcccagaagaatggcttcgtattctgttgcgttgttggttatgtcgaactgcagccttgtggcatactgaatcggcacaccacttggcgaagtagtactgccgcaatgcccgccccgttgtgcgaccacgaaccgtcngaatgcatcacccagggctgttcgacgggttcgggctcgggggccagtgccggtgtccattcggccacaaagtcagctagcacttgggacttgacagcagttcgggcaacaaaatgtaagtcgaaaggggatagctctgctgcccacttgctaagccggccagtaacttctttgccccggagtatttcgcccaaagggtactgcgatggcactatgactttgtgggcctgaaagtaatgcttaagcttgcgcgaagccattaccagggcgtaagcgagcttttccatctcaatgtatcttgtcttcgctccttgcaatgcttcggagacgaaatagaccggtttctggcctgaatctgtttcttggacaagggcagcactgactgccactggcgaagctgctaggtatagtagcagttcgcttcctggtgctgggctaatcaaagttggcgggctttgcaggtattgctttagctcgtcgaacgctgcttggcattcaggtgtccagttgaattttcccgcgccccggagggtcttgaagaagggcaaacctctttcggctgcctttgagaggaatcgactgagtgccgcaattcggcctgcgagcttttgtacttcacgtacgctcgacgggggcttcatttgcagaatggcatcgattttctcgggattcgcctcaatgcctctttcagaaacaaggaagcctaacaacttgcctgcgcgaacgccgaaaacgcacttctcaggattcagtttcatacccgctgcgcgcaagttgtcgaaggtctcctgtaggtcggacgcgtggtcgaaagccttgcggctttttacgacgatatcatcgacataagactccacatttcgccccaactacttgtaaaggaccttatacaccagcctggcgaaggttgctccgacattccttaggccgaaaggcatcctgaggtgacaaaacgtgccgaatggtgtgatgaaggctgtcttggggatgtcggccgggttcatgtggatctggtgatagccggaatatgcatcttgaaagctcatgagttcgcagccagctgttgaatccacgagctggtcgatccgtggcagggggaaatcgtccttcggatatgctttgtttaggtctatgaaatcgatacacatgcgccatttgccgtttgacttccgaaccagcactggattcgccagccactcaggatggtcgatctcttgaatgaccccagccttgagcaatttttggacttcgggttttgctgcttcttggcgatcaacggacatcttgcgcagcttctgtttccttggcttggcatccggcttaactgctaggtgatgcatgatgaggtctgtcgaaacacctcccacctgatcggggccccaggcgaagatatcactatttttcttgagtacttcttggatgcttgccgccacttcttcgcccatgtcgccccccagcgatacgagctttgtgggatcggcgtcatcaatctgcatcttgattatcttgccgtgaggggcaggctttggcgcgtgcttcgcccagccatgtggttcggcctcaacattatgtactgttctgttgattatggcaagatcgccttttgaagcggccg

SEQ ID NO: 24642 - DNA, 688 bp, Oryza sativa
gctgcttcacgaggtgcttcaacagctgctccctgctgcagccttggatcttgcacgttgccacgttgccgaatgtttcggcattgctccgtggtgtgcgaagagcgtccgtggaaggcgcagtagaggtcttttcggaccttgcggacaggctgctgatggttgcttgcttgctgggcgtcgaactccttgcggagggcttgcacttcttcgacagccatcacagccttgcccgcacggtcggttctgaacttcctccaggtcatgggggcttgaccttgtcttggcggttgtccttggatcgccggctgaggctggcgaacagcgagaggaggtggttcggcaacttgaacttgtgcttgggcttgggcagcggcgacgaaagccttatcatactcagcttgtattgcttgccgtcgcttggaatcctcttcgccccttgcgtacccgtcaatgatgcgaagtaggtgctcaagcgtctgtggttccttgttggcgatttttcttgtgagttcgccctcaagtagaccggccgaagcggcgtttatgacagacgcctcggttatgtcttgaacttggcaccgggcttgcgagaagcgacgcatgtactcccttatcgactcccccggcctctggcgaatgctgagtagatgctgctgcgtcttcggctcctcataggtgcctcgaa

SEQ ID NO: 24643 - DNA, 1350 bp, Oryza sativa
atcgccgaaagcaagcaaaagttttgaacgatatatcactgcatctgcatggcgaacactacattattgtactactcgaaattgctcgtgaggtgctcggcctacgagaaagatggtagcggcggcggccgggtgagggtgaacggcgcggctcaccgcgtgccgctccaggtcggggctgcgctggagacgaaaatcaacaggtcgctggccgggctgatgaggccgccggtgctgtcacagccgccgacggaggaggaggccgagggcaggaggagccacggcagaacatcccgagtgagaagcagacggtggacccgttccggcaggcggtgatcgtggaggggggcgtgcggtaccggcagacggtggtggtgcggtcgtacgaggtcgggccggacaggacggcgacgctcgagacggtgctcaacctcctccaggagacggcgctcaaccacgtgtggatgtcgggcctcctcggcgacggcttcggcgccacgcacgccatgatcacgaacaacctcatctgggtcgtctccaggatgcacgtccaagtcgaccactaccccatctggtatattatattagtatttgtgttcgtccatggcgtcctgttcgttcagagaggccggggcaagaaaatttatgctcatcaggagaggttggttgcaggggagaggtgctggagatcgacacgtgggtaggctcgtcggggaagaacggcatgcggcgcgactggctcgtccgcggccgcagctccggcgccatcttcgtccgagcaaccaggtatgtcttctagagatcatccgccagtcttaataattagttatactagaaaatatgggtgccagttggcgcgccatttctaatagtagtctgtttagggtaatgtgaatattttaatgtgttttcattttttcagttagccaataacattgtttcgacttaaaatattcctcaactttttcattgatttttataccattcaattagattgacttacgaatacttgttgatttgaccggttgatcgtgagtagataaacttttagcgttattttttacataacatcataacagatacatttaaatatattaaaaatgtaataatacaacttggatgctacaaaatttgattgtttaaattagtgttgatcaaagctcagcacttcaaagtaaaaaccaacaagtattaaagtccaaagtgttttgtgtttttacccttttctgatttttctattggtgatcattagtttgtgcactgtttcctggaattttttttgctctttattgagtggattttataataattggctatagcttactggacgtaaaagataggatttattcc

SEQ ID NO: 24644 - DNA, 895 bp, Oryza sativa
gagaaaatagtagtagtagtagtagagaagagtagagaatactgagcagagatagtactagtatgttcaagcagagaaaagaatctgagtagagatagtactagtatgttcattttatttgtattggtatgatttttcttgctatgattcactcagatcaaatatatcaattaaaaaattacccgttaaaattatatctcttaaaaattatttatttcgaaattttatcgcgataaataataccgttagcatttagtcgttcaaaatatatctcttaaaagtataagattagttggaagatattaataaaatataggaggatgtgatatggatgatttgttagagtagaaagagatatgaatgaggaatcttttttaaatagctatccatatggacatatgaaggatgatatttggatgagctcccgatgctctaaacaatccctttgtattgactagggggtggggtggtacggaaaccctatcaccagggaagaggggggcgggggcgcacagcaaatttcctcctaatccgtttctcccttgggcgatggcttccatcgctatggctgcctcgttgcgaaccttcctccgccctcaccgttgccgtctcctcctccgccagagccgcagcctctccgccagcgccgccccggccggtgccgccgccgcatccacggttatccggcgcagcgtagtggaggtgctccgggagcgggggctcgtggaggccaccacttctgagtctctggggtcggcttcagcgagccctagggagctcaaggcgtactgcggcttcgaccccacggcggagagcctccacctcgggaacctcctcgggctcgtcgtgctctcctggttccgccgctgcggtcacaacgccgtcgcgctcgtcg

SEQ ID NO: 24645 - DNA, 977 bp, Oryza sativa
tcatattgatgttaatgaatgtgggaaatgctagaatgacttacattgtgaaacggagggagtactcaatatacccagaacaagatttcacgaacatatatatgaagctcaaatgaatcaatgaaagctcacggtcagcaactattgcatgttaagcgacttgttaaatctgtagttggtattgctatgcaaaactgtattcctaatctacagtttcattgcgttgattgttaaatctgtagcacgtatggttacaccaggaggatgcctgaagttctactaagtttcttcattcccttcgtaacattttttttctcatgatttttagcaagcagctgtccagttcccagttcaatcgcaacacttgttccagccaaggaaacggctcgctagtgagtacttgaggtaccatcggcaacataaagggagaaggataaggggcacaccaggttgaggagatgggtcctcgagggctgcgccgaggctgcccgacggcgactcctccctctgaggtgcgggcggcgagggacgctccgtctcccggccggctcccccgtcgacggcggcgcagcgaaggtgccggccgtggcgacagctgaggggctcgggcgccggggaggggaggagcggtacgcaacggaggacggagagacggtggtggtgatggtggcgaggagggaatccgccgagccccggaggcgagtgcgagagcagcgcccccgcgctccccatggtcggtcgctcctacacctccgaggaccgaggcggggcaagctggaggcggatagagtggacgatgataattatctcgctcgctagtcgcttccgtgttgcctggcgtgttgcactgttgcttgcgccgcttcacctcgtcttgctctctctgtggaagtgtggattatgctcacgcaccgagtcacacgagtcacgaccacacgacacagcaacagcaaagcagcggcgcaccgttaacgggt

SEQ ID NO: 24646 - DNA, 2348 bp, Oryza sativa
cgcgttcttggccacgccctccgccttaacggtgaaggacgtcggctccaggcagaacttcttcatgttgtgcttgccggccttgaaggcgaaggagtcgacgccgccctccaccgtcgggcactggttcgccgtgccggttcccttcacctccatgtacgtcttactctgaatctcgtcgaaggtaagcctcctcggcacgccctccgcgctggcgccctacaccggccggccaccacatgcacggcgttacatatatagtaattcgatcgtttccaccttggccttggccatggcgccatgcaacatactcctaaatcctaattaaggtcttaccgagacgagcagagctgaggtggcgagggcgaagccggcgagcttggcggcatcggcgcacttgttggcgacctcccggatgtcggactgcagggagcacgtgatcctgccggcggcaccggtgtcgacgccgaacgccctggcgacgtgcgaagacgggcgcgatggcagcgcggcggaggaggcccggccgccgagcttggccggctgcatcagggtggccgcggcttggagcgatgctgccatgtccgctcgctcgcctgctcagctctcagttggtgggtggtgtggccgtgtccgtgtgggttgtatcgtgaagggcgttttgtgagggcgggacagtgttatctatcgcagagcaaggggggcagaggaggataagaggattggataaggcgtggcctcccattggtggcttggggctatggtgatgctgagctggacgtcgacgtggcacgcccaggtgccactccttccccggcgtgtggtggtgggctctttcatttgtggggctggcgctgtgaagatcctacttccagccaacgaaggcttgccacgtcaggaatggaagagacaaacgaacctattctcttgaaggcacagggaacccaaagaaaatgctaaaaattaaagatctcgctcataagaccgacatttgtacgtgttagatgaaacaggaattataaaaaaaaaacattgggccttacatcgttgtagatggaaatggtcaacagctatttgtaaattttcctaactgaatcacattatatatatatatatccacaacaatagagtaatacttttctcatctatactcttctagaaatagacaaacaatagagtaatacttttctcatctatactctatggtggtggctgttggtatttgctacgcatactgataaatccgtaagcgcacaaataatgatgtagcattttctcttagagtattttaagggtatcaaaaataaagacgtgtgtgtactatctacaaacagaattcccccaaggacaacaattgatgataagattggcaagagaggattcatatggacttcactagttgacttaagttaaagatagaactctatcgtatgtttcgcaccggctatcccttaatctgttaggttgagtctggccttgagctatatgatatgcccgaacgtggagggatgcaaagtacgggcagggctgtcaccacctgctacccacctcactttgcgtggagcacacaatctctaaccttccacagaaacttccttctttatagagtcctagtactagagcagttgcaactaagcaacgaacccgcatcgatgagaatatttatcactcaagtaaactaagtaaaaaaaaactttactttgttgtgtgttgtgaagtgtgttgagctcctcctttcatagtgccaaatgatggttgtaatggtgattagtgaggttggtgcacacataacagccatagtcaatccaatggggagctgccacattgaaaggggtagccaggggcaccacggcttgttcagccgaactaggcctccgccttctggccaccgattttggacagttactgatacgtggactcttatgacggttaaagatggtttggccctatctcaaatcggttttgacagtcaggtgggccctttagttcttgtgctcgcgcttgattagtcagatgggccctttagtccttgtgctcgcgcttgattggccagagcttcatttttgtcagatgacggatgtattttttccttatttgacccgcatacttatatgtatcaaaactaatggaaatggttagtagtaaactcctaccactaagttttgatagtgtattttatttttttaacgcaggagttgatggttaaagtttatacttaacgtcaacaatggcagtgaatccgccaccacatcaactccattttattttttttatcaactactccttatgtactttatttttatctaagggacaagtgtatccataattcattcttatccattgcaaag

SEQ ID NO: 24647 - DNA, 1411 bp, Oryza sativa
aaaagacagaaaatctttctatagtgcaaacaaaaccccagctgataagcaatagagatgcatgtgatgctatatgcttggtcaggtcagtcataagacgtgaaggctatctacaactggtcttaactctgtagttatgctaaggaaatctgctctgaatatgtagttcgtacaacggtacaagtgggttccaaatctagtcgcttttgttcttaacccatctttatgatcacccattatagatgtcatttgtataatcacctgttagagttccaacattttataaaaccattgatgatctattatgcatttaattttgttttccttcacttgatagttactatttttgaaacagttatgctaaaattaagttgtcaccttatcattgtatcaggatttagtgaaccatattttgaatagcaatgctatatcagaagggccatttagtatgagaaaagctagatttttaggctctgcttcagcctttagtgttaaacaaactgagtggccatgtgctacaactgactcaaagaaatgttaccgtaagttgctaagcacgataaaacaaagtcagttaatgtgtaagcacatactttcaaaacttcaactcaaagtttgcataatatagtaacttaaacaatgaaatccatcatgcagacataattgtcatttagcataatatattttgcataatatagcataattgtcataatatccttaaatctggaagttaggtaaaaactttcatccaatccacaagccacaacagaagaacccctaagtcctatgtgtgtatgcttccaaacatccacagaagaatcagatgaaattcatcatcaacactagctgtgtcttttgtaggagtaaaggaaacaactggaagagttgaatggatgaaacttatacagttttagatttgttgtggctaaaatctttaggctcaattttctagaagtattaaagaaaaatctatgtcattgcattgtacttatcataactattttattcccattgtgtatttttctggtgataactgctacatttatattcattgtacaaaatgcccttaattagtattatacgttggtggagttcctttttagagtacttgacaactcaaatttaacttgtacagtccaaaatggatcttttggaggtatcacagaggatgaagaacagagtagcctgtacaattttctttatccgagcaaagagctacttcctgatgataaggagatgagtatatttgatcatctagaggaacttcgtgacaggatatttgtctcagtattggctgttggtgctgcgatacttggttgtttcgcttactccaaagatcttattagaattctagaagcaccagttagtgttcagggtgttcggtttctgcagctctctcctggagaatttt

SEQ ID NO: 24648 - DNA, 610 bp, Oryza sativa
ttgcataatctactcggttgccaattggtgttggaacctgtatgcttgaacaaatcattatttgatctaactgtttcaatgctcattgacttgttatctggtgctaatataatcatcaattaaatggctggtgtggaaacttctctagatgttagtgatctgaattatcagtctgatttactgccgaagataaagaaagagaataattgtagcaggaccatctcattagaatgaatatatcccctctcaaagctgaatgaacataatatcttgtatatttttatagtttccatgctattttttccaggtccctgttatccagctactgctggggcaagtcggtttggtttctagtgaccaaatgctttccatctggagatatgttgttgttggcgctgtagttgctgctgctgtgcttacaccgtcgacagatccgttgactcagatgctcttggctggtccgctgcttggcctgtacttgggtggtgcttggatggtcaagctaactggtcgataattcctactagtattttgtattaattagcatcatagtcatggcggtggttctggacaaatcgcattccccattgtaacatagttgggctgcagg

SEQ ID NO: 24649 - DNA, 1633 bp, Oryza sativa
atcaaatcatgcatatatcaagttagagatttacaatcacagatttacaaacaaatgaataattattcaagtcaccaattcatcaagttacagtctcacagatttacaatcagttcaaatcaattcatcaaatgcatacatcaagtcatctactattttccatcaagtccatctcagagtctcagacaatcagacttacagaaatcacataatcataaacaaacctcagaaagttagaatataaaaggggtttatataagctgtgattgtgcaatggctgcctcgttaaaaacctttataggtaaaaactcacacctcgtgagaaaaccctagaaaggaaaagagtacaacccacagctaaaatgttcacatcaattacaatcatctagttcaagggtttacatcaatttcatcatcaagatacatattctcataagcattttgaagctccacattctcagtagtatgctgaccttttgcatctgctagctcccagtccttgatcactgctagaatttccaccagcctagggtttagacgccgccgacggtcctcgatgatcctgccagttaagctaaaagtagactcggacgatatagtagaaataggaacagtcataacatctttagctaagattgaaagaacaggataagttagtttgtgttgttgccaccagctaaggatattgaagtcatcatcatattggttgacagtgtcactgtcaagatatgcagacagttcagaagaattgagattagcagttgaagaagctgcctgaagcaaagcagtagcagatgtcatcctaaataatgaaccagcaccaagcccagcacctggactgacaccagcattaccagcaccaagcccagcacctggactagcacctgcattaccagcaccaagcccagcacctagactggcacctgcattaccagaaccaaaaatcttcccccatgcagtccttttcttactagtggaagggcctagaatagtggaactacgcaatccaacagaaccaaactttctttcatacttagcaaaagtatcagacaatgaagccctaacagttgttaaataagcagagtaatcatcaccaatgagttgagccataatctgaagcactttactaaaccccctaatcttggccctagggtccaagataaatgcaaatgaataaagaattggaattttagaccagtagttcataaacttagttttcatgggaccaacaacatttgcaaggttttgaacattgccatatgtgtttagatgtccagcaatctttaaaatgtgatacatgattaatggagatgttggataataaacaccagacaaaacaacagttgaatcataaaattgttcaaggaaacacaaaacagattcagcacatgcccaatgtaagtctgtgagtaatggatggccattaacaaaaggatgttgtgtactaataaatactatgaatggttccctatgtggtatgagatgcttaagcattagataagttgaattccatctaacatccatgtccaaaccaaacatacgaggacgataacccgcagcaatgcaaacatttttatatgtagcaatacgctgattagatgcattcaagaatgaaatggcagctctaatgtca

SEQ ID NO: 24650 - DNA, 15756 bp, Oryza sativa
aattcctgcagccatgggcgtgaacttgtcaagtccagccttaacaatcaaattgatgatatgacatgcacagcgttgatgcaaaaataaatgggtaatttggaaccatgccattataatttttcaaagtttgagatatgccatcggtatctcaatgacatgtaggacccacacgagtcaatgacatgtgggtcaggatgacatatcttaaattttacaaaattataatggcatggttacaatttttccaaaataaatcaccaacataaccagacagagcaagagtaagggtttccatagctttagaatgagcaaaagcattgtctaatgtaatagagaaaaccttatcagtaataccatattcttcagcaacagcaatcacacgctcagcaatattagcaccagtatgtgactcatcaatgagcctaagacccaagaccctcttttctaattgccaatcagaattaacaaagtgagctacaacactcaaataatcttccttagcatgaccagaccatatatcagatgtcaaagcaatagagctagcagaattgagacgatcgataataacagaacgacgatccttaagcatcttgtaaaaatctctggtagatctctggtagtagtttgtctagagacaagaacaaatctagggttatgagcagccttaatatagttcacaaaagcaggagattgaccaaaactgattggaagatcctctctagcaatcaatctacacaattcaaacctagcaacttcaggactatattcccatggaataacagaaccatctgcactaaatctaagcatggactgaggcaaagcattagacccaagctttctaggtttgcatgacttaatatgcctaagcaaatgtccagtgccagcagaagaacgagcactcaaagttttatgatagtaattgcatttagcagagacttgaaccctatttccaatggtcgtttcataaagttcctcaaagtcatcccataccttggaggttttggtcttcttgttggtacaagtcgcactagagccagtcggcatcccattgccactgtcgtcgaccggcgggtcgtcatcatcgacattcacatggatcgggatgtcggaggtattgccgaacacctccacacgatcctcctccacatcatcatcgtcatcactgtgcatccccatagtcctcaactcgtagttgacggaggtaggattgtcgtccatcgcaggcactccggtccctcaacggcggctgccgctaagcaatgggcttgcaacctgcaagcagccaagaacactcaaggttagggctggaaatggagaaaaaaaaagaaaaacaatgggttccatgcttgtacctacgcagccggagcaccggagttgccgttgaagatgataggctcatggatctacgagaagaccaagggatctggcgaagaagaacaaaagggaaagagacgaagaggaaggctggatctggaagagtggaaggacgatgactcaggcgaccatgcgtggccggtggccctcatcctcatgcgcccctcatgcgagtcaggcgaggcatcgatcggagacgaagaggaaggctggatctggaagagtggaagggatgcgactcggtgagtctcaccggtgcgcgcctgaggccctgagcgagtgagcggcagatgcggagcggcggacggtggaggaggagatctggtgggcggtggaacggcgaaggcggatcggcggaggcggttgagcggtggcggctagggttagggttaggcggagaggcggagagcgagagccgagaggggactgggaatgggaggggcagcgctcgctggcttatatatgcgggcgcacgcggcgcggcctagctgtctgttcggctgggccatgctcgtgcctaccgttggtacgggccgtggtcgtgccgaccgttgggccgtgccgtgtcgggccggcccatcgtgccgacctcggtccgtgccgtgacgggctggcccaccgtgcccagccataggcctaggcacggcccaacagtcgtgccgggccagcacgggcccgactgctaccgggccgtgccgtgcttgggccgggccaaattcccgtgccgtgggccgggccatcaggccttgggccatatggccaactatagtcccatgctaaggcgccctttatggttttcggcattttccgactcgttttgttggagagaaaatgttctatcactcttgacaaaatgtttcatcgattggataaaagttttaatagatgcaacactcgaaaactactccaataaaaacataatgaaacatccaaacacaaccaagtgcaacaaaagcaaattatggattgaaacatcgtcaagctctagaaaaaaaaacaaaactaactctaccttcttctacccagccatctctcgaaactcacgtacattcctcgtcgatgagcttctcgactgtagctagttgttgcatcactttgacctcctttatccctccgaatctcctctcattgatggcggtgccggtggccaggatttgccgcctccattctctccgcgtcgccctgctgccgtcgccgccgccaccaccgtggctgccggtgatgatgactccaccatctcttctcgccgccattgtcatggtcgccggtgaccaagtctggcacctccgtcctctccccgtcaccctgccaccgccactgctatggccgtcggtgatgattgctccgccatgtcatctcgtcatcgctgctatggtcgacggcaacaatggctagctccgttcgtgtgttctctaccattgaagaaaatgtgagaacaggatgagaggataggatgggcaatacttaaatcgatagtggatctcgccttaattaagtgtcgtctgacgtttcatctcctctcaaacgttcgggtacaagcatttccgtgatgatgcacattcatcagtccaattgaccgcatgaattaatttcatatgatggacagttggacatccgatcatcggcaaattatcggaaagtatttagtaacttggcaagaattgttcaatgttttaccattcgataaaataaatatttcaatgagatgtagagcatgtttggtaggactccaactcctaaatttaacatcaggagttgggtctggagtggacttgcggagctacctaaacccaactccatctatctactttattttatgagagcactccaaccagctccactcccatttttagtgaagttgaaactgtttggttggacttcatatcatggtgaggtggagctggagctagagcatgccaaaacagggtcgtaacagttataaaaaattaattgcaacaccaataaccaacatgtgaaatatataaaagaaaactagctatacagtcgttgatagaaaaaattagcattatgatcaaattatagcaacttaaagccaaatttggtcgagcctttcccgcgaaggcctgtctggacaccgttgtgtagctggtcatactgtacaatgaaccacagtcagatcgcggttgtccggacagtcggaccggcagcacaaagtccaattagagttttgttgtgtttttttctttggtcccgggatttccttgattataaagcttcataaaatatagggggcccaaggccgattgaaacaacaatcaatcaattatcaaaatcaatctagtacctctatcatttgtattatacacctccctccctattgctatctatctccaagtctattcaccactcaatccctcaattgcttgtcattcttgtttctacagcgatagaggacatcctagttggcatgtcgagcttaggacaaaccgctgcgtgttaccctgacagggccccttctaggtgttcgttcggtggcatctgctctctcctatggcaacacgtgtccgatgccgttgcgagttgtatataacatgctcaaggtgtggtggcactattcggtgccaacaacaacaaaaaaaatatatattgctgagtaccttcaagatggtggccggagggcacgagatacgcctttaatgaagcagttcacatcatatgcaagtgtagcattcagtcgaatagaattgcactcgaacacaataaagtgcaatgtagataaacaacggatcgcaacaaaaattacccaactccaacaagagctaccatatgttttcttcctctgctccatgatcggctttgccttcttccttgctcctttgactagatttgggcttcccatgcccatagagccgaagcgtgtgctagaggcatacttgaggtcgagcatggtattgtccgggtccatgcacacggggcttcaccttggccccgagccaacagttgacatggtctgagttgaaaagcaatgtgaaagtagatgaagcatgtatgcttcatcaaagcgctccaggcatacggtcacttcttaggacagcatgcagagggaggctattggccgaggcagctggtggggcaaccgattttttctatttggctcggatacctagtggagagcattcttgtaatttgatcgacactatagtacaagatagtgatagaaatttgagagatcccgaggaaaataattaggtttccatctagcataaacaatataatgatgattctagtaaactaaaactacctttgtttaagctacttggatttcttttccttttctttaacaaaacaagatttagttacgattgaaaataattttctttatcttcttccatagatcctttactcatatttttaaaattggatacttaatacaatgcaaaattatgcttcctgactcttgtactcataatccaaatccgatttattttaaggatgcaatttccattagtctttgaatacagacttctacaattatcttatcaatcagccgtgcaacgtagccaggtgcatgcaaattatgctggacttggtagctacacaacaaaaaaaaagtgtgcaatcaagctagaatacatgtgtagaactataacagcgcaaagtgctatataccagcttcggagtctagagtgccggacttatttggaccactcacactcacacttgagacggatatggctatcgggtgacaaaatcgataaccatcttcccttgccaccttctcttgctgtcgacatacatccaagtcatgatcccacacctgcaccactattagtggtggagccgccatggtcctcttcccaaaagctcgggaggtggttccaccgttgactactatcacttccctacagtccactcatcacaatctacatcaatttgcttaaaaccctaacttctctgttgtgcactgctaaaagacaacctcttcccatattaattatatttatttactagaaactataaatattttattaattaaaccatcaaaatgaagtgcatagccttccttttcctcatatacttgattttgtattgcagtaaatagtttcaagcgcctaattttcgtacttttgaatagaatattaaatcattcatattcattttagttctcagtaaaatttccaatggatcaaactaattaagaattatgcagtggcaaactagagaactcgatcacagcatagtggatatatcacaatgatgcaccagtgactgatcaaactggcatgtttgcaaatatgaacttaatctggagttgaaatttcaaatttcaaagcttctgtttgaaatttaattaatactcactccagtccccccccccccccgggcacacaccccccccccctttgttttgcctgtaattacgatattgacacaatctccaattcagttgttcgattactgtttttttcttattgtatgtttacaaagaattaataacataaccaaatgaaagaattttcacaaattaatctactaattaatgtcatttaaaacatcatctttcttaaatagaagaaacatcttagcatgatgcatgcatgtttgccacgcttgccagctagccataataccacactatattttcacagaccttcacaatcaataaataatatatatgtgcaccaaacacccatttggtcgagtgacgaaaatgacgaacaaactagctaggctattaaaattaacttccaaaattcaaattttctgaaacaagcatgcccaatagttggtcgagtgacgaaaatgacgaacaaactatctaggctatcataagggtaaggattgagattgcccatgtggagttactgaaaagctaatgacactatgcattgtgtttttttaagtaaaatgcatgagattattgtgtggaatgcagttaatattctcttgttagaaaaggcaagttaactatttggaacttcatctcgaaagtcgaaatgcatgtgcctccttcccatctactactccccatctacatctcggagtaactaagattatcgccgagtagtacatgcatatacagtactcttcgcatcaagaatcaggactacatactaattaacactaaattctgaagcaggacacaaaatgatatgaacacacatctgatcttttttaagcgaactactaatattaatacattactagctagctggccaggttttgccattaatcactttatgtacataattaaacacacacacttagagctgaccatatcagttcgatcgatcaccatacagcttaattaacactatgactaactaaattccccgcacatgccatcatcaacttgatcttcgttagatcaatccatacaggctgaaccactcaaccacactgttatcagcgtagccgccgtactccgggacatacaccaggtcatcgtctccgaggtgatctccgccgccgaagctcggcggctggcaggtacccgtcgagaacgacgagctcgggctcccggcgacgcaggcgccgctgccgcctaagcccatgatgtctccgccttctccggaggccgtgtggctccccgccgctgatctgagccgcctcacttcctcctcggcgaccaccagcctctccttcagcctcagcacctgcatgccgccatggatggatcagaggaattgaggcagcaataagtatacatgtgtgtacatgcaaggacggacgatgtgttgttacctcgttctcgaggtggcatttgtggaggatggcggcgtcgtgggcgtgcttgagcttggagaactcctcctcgagcagcttgctcttgtggcgggcgcggcggttctggaaccagacggccacctgcttggggtcgagcccgagctcggaggcaaggtgcaccttccgcccggtctccagcttccgctcctcccggaagctcagctccagcatctccacctgctcgtcgctcagccgccgcttcttcgggtcccctccgtccacctcgccaccaccgccgccgccgccaacgcacctcgccccacgcctcctcctcctccgcgctctcggcctctcgccctgcacctcacctgaaaaaaagatcgatcgatcgtggcagcatgatcagtacacagttgacacttgccatgagatggagaggcaagaaaatggcgggagctagcaagcaaaagctaagtagcacgaaccgctggctgctaggagggaggcgtccacgtaggaggcaaacatctgctgctgctgctgcttctcgccgtatcggtccatgccgtctcgcacactagctcgatcagctcagctcagttcagcctttctctctctctctctctctctctctctctctctctctctctctctctctctctctctcttgtcaagcgtgaggtgaggacaggagggagagaggaaactgaactgaactggattgtctctggatggagaagaggaccacgcaccaccaccaccacagccactgcaaaggcacacaccagttgatgtttaagtaaggccgggtgcgtgtctcgagagagagacctacgagtaatatatatagataggagcggtacacacgcagccgctgctgtgtgcatgcctcccccgtttgttgctttctcatccagatcgatcacccaaaagctagcaacgactcacgatcaaattctgatccatcgatcgctaaaaaagacgttatgttcattgctgaacgtagtatataacgcaaggccagttgatgactgggcattgctgtttatctggttgtgatcatgagcactagtgctgctagtgttaccgtagtcatgccgaccgacaaaaagttagcttgttatccccttggaatggatactctgtctgacactgtcacacgcacacttactttggtgaagtaggggccggatgggtgcacgcatgaatgcatgtgtcagtgcataattttgggattagtgggggtagagaatgcacgacgatctaggccagcaagagcacagcacaaagagcggccggccggctcgacaaggtggcacttgcccctggaaagggctctcgctttctttgaaaagatcggggagaggaggagctttggctatagctagatgagattctcgcctgagtcggtagcatgttaattgttcgatccatggctgactgtactagtactaccactagctaactagccaactatttatcctcttttgaattgtactacctccgtcccatattacttgtctttttgaatttttgtttgtcactgtttgatcattcgtcttattcaaaaaattttagaattattatttattttatttatcatttgctttattatcaaaagtactttacatatgacttatcttttttttatatttacactaatttttcaaataaaacgaatggtcaaactttacaaataaaaagtaaaaaacatcacctattatgcgacggagagagtagaaagcttgctgctccatcgataatcggatctagtaccatcgcatataagcactattgttttgagagaggagtagagagagagagggagagagagaactgctgaattatctgagttcgagcacgtacatacgcagctttgatctgaaacatctgttcagaaaatcataccgtacgtgcactcataataaccatacgatgcggtgcgtgcactgtatctgaatttcgaattttcgatcgatcagcagtctgcacgtacggtttaccgcgtcgtcgtgtgtggtgtagcacactgcagatataaggaatatccggagcgatcatgtgtgtcatacgatgatccgatcctatgcgccgagaaccagaagaaggcagatacaaaaccgtgtactggatcagtcagaatgtaggcacacaagtaaagatagctgccatgcaatgcatgcagagagatgggatgagatggtcctggataggggttcggatcgtgcgtcttccaggtagccggaaagaaagcaacagagctagtccgcgcaagtgtgtatgcgagaggaaaggaagcgtcaggtagcgcgagaggagggccgggggcgttggtggtggcgcgcgcgtcgctgtgggtgtgggtgtggggagtagctagcccgggagacaaggggaggaggcacatgggctgcacccgcgcgcgtcccccgtccccgcgggggcgcgcacacgcgtcgagcggcgcggggcttcacaaccgcgggaccgcatgccccttcgcgccgtgacgtgtcgcccgcaccggcaccgcccccccgggcgcctctcccacacaccacccgcggatcgcgaggcgacgaagaagaattaccaccgcgcgcgctcgggtctcggctcgatcgatctcgcggctcgaccaccacacgcgcacgcagcgcctccgctccggggtgggattccgaaggcgccacctgcgctctgctatagctaacgaaaacggtcggagaactcccaaactaaccgataatctttttttcgtacgtgtaaataatatgtttccgaccatttccaatttcttttcttaaacacaataaaaaacatgagttcataatgtgtgcgtactcagctatatataaatacacacgcacagacactattcccatgagcaccttcaaaagagtggagtgatatatctaaagattgatgacgatatcaatatggatgcatcgttgtcgattaatatgtcatctaccactggaaaattagccataaatatgacgattgtttctaattctaaccatatattaaagttatgtttttttcaatttctttcaacgttgtatcagtgtcactactaaatgtttaaattgataaatatggttaattttccaagcgaccaaccgagaatcgtatcgtaagaagcgctactactgttttcatccttacctattgcagcatgctcactgttgccgagagtggatcccactatcagcagggaccatagtaaaaaatcataacaaaattttaatttttagagcttctttggacgcaggattctcaaacacatatgaatagaaaaacctgcaggattaatatgtcaatgcaatcctaagaaatggaaaacgtacacaggaaaccgtttggatgaaacacggaaaaaaaacataggatttagaagagagagatagcacaaaggaaaaaaatctatgagcttggagcttatgctagaaattctccaaaattccatgaaacatgcaatttcattgaaattttaaagaaattatagatacccaatccttttctttcaaaagggcttctacaggatttaaatcctttgaaattaatttctctatttttttctttattttaaaggggtccttaagcatttataatccctgtctcgctgacatgttggtccattttaacgaactactcctcaccgaggatggcatcgtcgtgtgagacagtatcggatcgaaggtcagtacgtgtaaaggcactgtctcctgtgaacataactgcacgctgaaggtattgtcttattggagtttcaggccatgcagtgcattttgatcatcacactgatcagacttttctccgcacaggagatcgaccaaagattacttgtaaaagctccaggcttatcgtcgattcgatcgcaaccagagcccggccggttgcttatctagtcagcaactagtcgccgccggcctatttacggtctcagccgatgccaaattctcccatctgaactgtaaaggttacagtcacaactaggccggatcttggttgatctgttcgaatccaactcatccccaggccgacggacagccgagatctgctcattcatgcacatgccacgaagcatttcttgcagcattttcccctgatttgtatctgaatcctatcagctgtcgacgttacatgcactgacgcagtgagtcatctactcccgtattaggaagctcgcggcactgttcatccgatttttgaccctggctttgcgcatttctggtaagagttatccagttgttccctgtttactttgtttagcaggtcggggcagctgagctgtgcaaaagattagccgccattggtgttcttggcaaaatgtgtaggggccttagtttgttgatgtgtatagctagctatagcagctactggtccacgagaagaaaccggagttgttgggtgcaagcaacacacagcatgtacacgttgtagagtcgtagcttgactgacttttcgatccaaacgatatcgatccatgcatgttcagtgttgtcaaacgtcttggtgtacagtgaattgcaccagtagtgaaggtgtatttggtgaggagaagaagaagctaagaaaactttgacttagctagcttagctaagcattttgctcacacatggtgttacacgaactacatgtgagataatgctgagaaaactaacttacccaatctggctagtcccttttaaattagctgttgatatccttgcaagaaagatctgtttctgcatcttcagaaactttattagtgttctggcaaatttgtaatcctaatttaatgttgttaaattatattaattaattagttaacaatgtagtgtgtatatctatctagccatcctgtgctgcacttcggtgctcacatgggtcattctgataggaaactggccaaccgtatcaagctaggttttaaaagaagagaggcaattctcggtggatatacatgcatgctggggttaaggaaggagaagttatcaatagacctcattagctgagcctagctgtattaaggctgtataatcatgatcctttacactcacatctaggctggtttcaataaagtatagcaatagtactagtattaattggttaactagagatcaaagctaagtaaggacacagttgtccaagtcagagagatcaacatgatggctaggagataaacccaaattctgatgatcatgtgctcgattccctcgcatgctccatgatctccacttgctttatgttaatgcacttactaactacaaaagctgattaaacaaatggaagaacccttactcccggacaagccatgctcctgcttcccaacttccaactaatctccttggatctgcccaaaacctgcaatgatcgtcttaaatgattgtataaagaagattatacatgagattaatcaatggcaaaatttgctgttaagcacaaattaatggccgtctttgtatgactttattcatcaagaattttatatatgctcccgtggaagttgccttaatgcggttgcaaatgcagccttggacacacatggaaagagaaaaagttagcacccattaatctgcttgtaacaaggaacataaggtcgatcattaatttctcctcccaataacagttcaagtcaaagctccatgacaagaacatagttttcacccacaactttaatctttaattactaccctcatgaagaactcatcacctttatccaaactaatctttcacctttccttgaattacgccactaaccatgtgacatgacccactaaaataacaccatttcaatgcctaagcttgataggatgcctgctaaaaaaggtgattactgattagccactagcctgcaggtagtactaagcagcagtagacagtacgttgcccatggcacggcgaaacgtggcagtcatgtagccattccctgcaatctctttgcttgagccgtaaggatgatggagcaattgatttcctttactctccgtacattttgatgttgtctaggccaatggttcagcgataagcaagcgaatcaatcgactaattaagtaattagctacactgatccatgcatacctggtgccaattggaaacctagcaaataaagttgtgtacttgtagaatctttccaataaataattatgtaagaataaccgtctgcagagccggagggcacgctgacatttgcaatgtttaaatttgacggaccatgggtgcttttgaagtgttaggctaactagctctttggagtaaagatcaaccggtgcaagaaaaaggacaggttaattatgtttttgttgaataaagttgtttgcttttagtatggcatattgcaaatactattatgatagcattggctgctataaattaaagaagagtgtttttttttaggaaaaggacccatccaaagttaaaagatagttctcacctttcatcaccatctcaagtttttctgtgaactacttattccaggaaaaaaatatttgtgaactgttcaattaattgagttgatctgctacccaacacattgttagatagaattgttttctaatgttatactgttcaatacaagcatcaaagtagctagggagagttaaaacatttcacatataattactttgaattaattcaattcatcttgtatccccattaagattttttacatggttttggaacgtcatatcatgtgatatacatggttctggattggggttttcaccaacgttaggttcccaccgtatatttacccaaaatcgaaccacttctttctttattgtactgaggaacatacatataaaagcacacaacttgtttttaatgaaattaggcacattgctagctggtactaagttcacacactacacccacacccatctggctcaaaagaaactgcaggaccacacatgaattaagctgcatgatgctactaatttgcaccaaaccaccgccaagaaaacagaccaaagaacacgcaaaacttgcggccatcaatccacatcgtcaccaatagtaaagacgaagaactgaagaagccattaagataagcgagttgcaaacctgaggataacattgattaatccgggagcttagctgtggtcgccacgcgattgattccctaacaaccgaatctttttccaaatccaaatgggtttagttaatctgaagacaaccgtgacagaatccatacatgggaatagttcaagtgacatgtgtcaggacacccgacaccgtcacagctctgggctactttgagcccaaaactaacaccgctaatttgggttttctttagctgcagcatatgggctggaacctgggagaagtttaagcctgtgggatccaaggtccatgtggagttgccgatgcattactactttcctttttttttttcagtgaagtgtagtttgggccatgttttgttacccaagtttcaccttggactatctctaaaccattttttttcctttggattggataattttattgtttttgtagtttggacaactaaggaccccctcatttcgattatgcttatgcttattagctaaaatttgaatttttaaccttaaatttgaagctgattttaaggttttttcatcgaagtttttttttcagcatttgcttttggatcgctaagaacacgcatagaaagttttattcaaaaattactattcgtttgcaaatatatcgttgctgtaactctcttttctatccatgtctaacctttattctggtaaagatatagcctacacatgatagggaagttcgcctgaacttacttgatgtcgctgatgtgtactgaaaaagttattatttgtggtggtccaaattgcaaaagtagtaaaattaccggtccaaaacaataaagattggttaatgatgatacaaagtaaaacttgagcaataaaatgtggtcaaaattactaatgcattatacaaccttaactacttagttatttaacataaactttaatatatcatttttatgtaccaaaaacatatatctataatgatttttatggtcaaagttaacttgcgttgaccatacgtattttaaagagaaaatccataaaatgccattgacaagcactctaatcccagaaattccattgacaagcataacttcctcaaaatgccatcgtacaagcgtttttctcctagaaatgccatcatagccatactgttgttaactcctctccattaagttctccattaagttgtatgaaaatacaatcttacccctgggcaaactttttgctcaaacaacatcattttgtattgtttgctcacacaatatcatttcgaattgatgcatatttaaattcacagacgtgtattattttgctatcaatcaaattatttcaaaattaaattcacaaattttgacatcaaaattatttcagaaattttgctatcaattatttcagcctggggccgacggtcgccgcccggagttgccgtgccgccgcctgggagcaccacatcgcagtcgaggtccgtcgcaccgccgcttggaatccccgcaccgtcacctgggagccccacgccgtcgcctagggccgccgcgccgccgcctgagggccgtgcgccgtcgccgggggccacggcgccgccacctgagggccgcgcgccgctgccgggggcccccacaccgcctgcaagtgccgccgcgccgccgccggggaccctagcgccggcgcccgg

SEQ ID NO: 24651 - DNA, 2656 bp, Oryza sativa
actgtgatggtatgtcagggagaaaaacacttgtacgatggcattttgagaaagttgggcttgtcaatggcatttctgggattagagtgcttgccaatagtatttcatggattttctctattttaaaatgacttgttttcaaaatcagagactgtgtttaaagaactgattattcagactcagccggtgacgcaattggtgggtgacgcgagaaaccacaggtgcacagagcctgaatattcaggctcattcaggttcagcgtaggcagaaaccacaattgcagtcactagtcactactaagatgagatgacgactggatcggataagatgtgcgaaatggattgctgggaaaatggctgcgcaaatggcaaatgtgcatgcatgcacaaggagcggcaatcagacagtcacgatcagacgtatggttccggtgtatgagtagctacagtacatgggtgctcttggttggctgcagcgctggctagcctgtgttttcagctatagcccgtcttcaatactgggccaacgtacttatttctggataagatggtgatattacttcattaactccagcatctgaccagcaagacagcaatgtactccctccattaaaaaaacaacttttatatatatgtacaaaagttttctgaatgcataacttgttcatggataaagatttccttttcctacgatgaagaaagcatgggcggatacagtgtattagcactggtacctcagggtattccagtcaactcatcctaatttatagcaagtgacaccaaaagattaagccttatgacacatgtcaatattgttttttttggctttggctacataagttgaatatagatagctacagcctacagcatcaggtgcatgtcttcctaactctttgccttccgcaagacaacgccaatgcaacgttcaactgtactccatgcttctaaaatagcgtttgtgagttattttttcttgccattaatagccaaagaaatagtcaatttccgatttgattttcatcttaattttgttctaacccatttaccaagttgtccacataattaatttcttcaaacactatgattaataaggtttttttatttgagaacaacaattacttaggctttggcctttcaagttctagagatttgagcatttgggattattctcatgacatatacttggatggcatttttttatcatttggttataagcgatgatacgttgccaagttctgtgggctgaagacttctattttgtccataatgttagcctgttaggttcttctaacaaactagtggtgctatttacttgtgcacgtgtacttttagtaactttagtttagttctttacaatttcgtttcaccaattagatcgataaatataaatatatggtgaaaatatgatatttttttaaaaaaatcaatttcatcttgttgcatagtactattctattacttttcatactcattataagtttgctagatgatgcaattgttgctatgagttaacagtgacaccctcgacctaaaatcctgaatccgctcttggaagagcgtgtatatctatatatatttatatatagatatatatatgtatacatatacatatatatctacatacatacatacatacatacatacatatgtatgtatgtatgtatgtatgtatgtatatatgtatgtatatatgtatgtatgtatatatgtatgtatatatatatatatgtatgtatatatgtatatatatatatatatatgtatgtatatatatatatatatatatatatatatatatatatatatatatatgtgtgtgtgtgtatgtgtatgtatgtatgtatgtatgcatgtatgtatgtacgtacgtacgtacgtatgtatgtatatgtacgtacgtacgtaagtatacatatgtatatgtatatatgtatgtatgtacatatgtatatgtatatatgtatgtatgtacatatatatatgtatatgtatgtatatgtatatatatatatatatatatcatatggggcaccatggtgcccgggcaccatggtatctaatgcacaaaatcactcaaattttttaaaattttcaaattgtgagtatatacctagttataataatttgattcatacctatacttatcaacaaaacaactcaaatttaactttatttcacaatccatgattacatacctaactaattatatgtatggatgctatatacctagaatcaaaatctaacaaaaacaagttcaaattcagttcaaacttgctttaaactagttagtaaagtagttaatgttaatacctaagtaattgaaaaagtttcatactcatttgaattgggtatatactcaatttcaacaatggtgcccgggcaccatggagcaccaaacaaatttaatatatatatatagagagagagagagagagagagagagagagagaacggttctacgtcgaattcgctaatatacgatagggacccggttcctggatggataacaagttcatctttttttaagataatgcacacagcaagttcatgatgcattgggtacacaaaatctaagataagcatatgatacctttctgcttttctttggtcaaaaacagttcgaagatactgaaacagcatggctacatcactattg

SEQ ID NO: 24652 - DNA, 23251 bp, Oryza sativa
  unsure (1)..(23251): unsure at all n locations
ataccactcaaacatgttagcaaatcaatcttctcttctttcgagagagtgtagcaggctggaggaaggtaaaccctgccggattccgtagttatgggatgtagttccgagtgaacacttatttcttccagatctcgtcgggcgttgagaccatcctttgtagtacctgggttaagcagtaatcccgttaaactctcgcatacattcttctcgacatgcatcaaatctatgcagtggcgaacttcaagatccttccagtatggtagtctccaaaatattgacttctttttccacatgctcctctcttttgtcttttgtttttccacatgttcctctgttttttccttcgacatgctcttctcttttgtctttccaattttcctcttttttccaaactcgttggttattcccatcactaagttgtgcacctctgtccctgttagctctgtcgggggtccggctgtatctctgtgtccattgaaattctttctcatattcctatacgggtaataccttgggagaaatctcctgtgacccatgtagaccgtcttgtgtgaatgcttcaaccatttgcttcttgtttcttccatacactccgaacacgcccatttccctttcacagtttagccagaaaggttgccaagggccggataatcgttgatggtacaaaacagcatcgcatggaggttgaaatactcttgtgcatatgcgtcccatgttcgtgtgccctcattccatagcctttcgaagtcatcgattatcggttcaaggaacacatcgatatcgttgccaggttgtctcgatccttgaatgagcatggtaagcataatatagtactgaatctgctgggtgcctcaacacactattgactttccgttcttcggcattccagcgcactagcttagcttgttccttattcgcaaacattctcttcatgcgctccgcaattgggagataccacaccacctttgtcggggcttcccctctttgacttacttccttcaccttcactatttgctcgtttgtatcttgatgccccacagacagggcagacatccaagtcagcgtattccttgtaatacaaaatgcagtcgttcggacatgcatgaattcttctgacctccaggcccaacggacataatacttgcttcgcttcatatgtcgtctgcggtaaattgttcgcctctggcaacaggtcctttaacagctcaagaagttctctaaaactcttgttcgaccagccattactagccttaaacttcatgagttccaacacgcataacaacttgctgtcttgcatccatcatacaagggtatctaacaatcttccaccaaaatactaaacttctcaaaatctctatcgttgtcctctgcgtcttcaatgtcatgcaacattgtagatagacattgagtgtccaaatatatggtctctccacctaaaggagaaggtacgaacatgccttctcgagctgcggcggtgttctctacatcctgatccaacacttcttctgctgcgatatcaggcgcctcttgctctccatgcttagtccagcaggtatatttcttcatgaatccattcattatcaaatgagcatgcacttcatcgctattaacgatcatttgttcattcttacagttcctacatagacacaacatgtgcatgctcatcctactttttctgtcatttttcgcaaatgtgacaaattcagtgaccccctctctatactcggtagatgaacaatgcgcatagtacatccatctacgatccatctgaaatcaacaacatacgaagaaaaatatatgatgatcgatatattaagaatgaatggagaataatgtgttttttaccttaaattttagcaaaaatttaccccccttgccctcccaaccgatttgtgaatagtgaactggtcgggatgaaaagcagttggcggtttgtggggtatttatagacccaacacacctcaaacaggttagattaaaaaatcccgtccaaggtgttggtcatacctttgacgggcttcaattgagttgtccgtcaaaggtattgacctacatatgacgggtcgtaaaaaaaatcgatctgtcacaggtggtggaccaccacctgtgacggctcataatgctactgcccgtcacaggtgagaggataccagtgacgggttggaaggaaaacccgtcacttcctcacctgtgacggcttttccttccggcccgtcacaggtgaggggatacctgtgacgggccgtggccggatgccccaccgatgacggcaaaggtgacggtcatctgtgaccaattcataagcccgtcactggtataccgtcacagatgtagagttgtggcgtagtgtatagaggtgctggttctttggtaaaaaccagcacctatataggtgttggttttatcaccggcactaataacctgggataatcagtcctacttgactggtgtcgactgatcaatctagcaactacggacgattctgatcagccagcaccaactgtcttttttgttgtaatagtgagtgctgcttccggtaaaaaaaaaagaattactgatggtaatttttttctcaagtaagaatttgttctttgttgcagggaaaagtaataatttgttttgcatagcttttatctctcacacagccttgaacgctgtgtcctctttaattgtaatatacatttgttttgaatttcttgctctaatcggttttgtttggtacacctcccttccgatctgcggtttggttcttcatttaatttgttctatttaatagttttccctttagctgtatccacttgctgctaatttactcctagcagttctgtgcgaaatatttgattttctctagaataaattcttcagtagtttagcgtgaccatgtcaatatggatattctttctctaaacaatgggcgaatccccgtgtaaagatatactccctacgtcctacagtataaggaattttgagtttttacttgtaaagtttgaccaatcgtcttattcaattttttttcaaatataaaaaacgaaaagttgtgtttaaagtactgtgaataataaagtaagtcacaaataaaataaataataattttaaaaaaaattgaataagacgagtggtaaaacgttgcatgcatttcaggcagaggatagcacagatgacggggaatggcctacaccgatccatccgttggtacttggtatactggaattgtggcccaaaatctaatatggagcatactctacatttctacaagtacttattttttctttttagatatatacatggtttttacagggaaaaagttcacgtaagatctctcaacttgttgatcatctctgaactgaaatatcggatataacatattcttaatgctataaaatcagatcgtctcaaacgcagtattgctcccggttttgactgatgtgacggctgagacagcgtgagacccatgtgaactcacatgtcaagcgaagcaatcaactcgattgccacggcaactaatgatgccgtcaaacaataggtgtaccacatgattctgttctataagaacgttgcacttgcagttgcagccgttccagctggggatgaatcgctgccatgcctagctagagcggcctggaggacgacagtgggctcgctgagttgttcgtcctgacacttcccacccatgtcgtctcgtcatcatcgtgcaagtgcagggggttctctccgtggcacgtcgtccagcgtgatcgaattaaatttgaaaatatactgtttattcaatttcttctaataaatattcgggatgtaaaattttttgcctaaatataccgtcgatttcgtacaaccgttgcgcgagaatgatacgggaataacgtcgtgggtggtatcacgcagtgaaggcgcgagaccgcacggtctcgtggaaaggtacagcgaggcagaacagtctcgcgcaagcactgagcgagaccggtgccatgctgactcaattagcgactaattatcttgattagcgattaattaataatttattaatttgctaattagaataattagttactaattattattagttaattactaattaagtaattaagcactaattaaatggagccggtggacagtttcgctgtttaattccgcgagaccgaacggcctcgctcttccattgcgcgaaaccgtgcgctctcgtgccttcgccgcgcgagaccgtgcgctctcgcactttcaacgcgcccatgacgtcacacccatctcgatttcgcgcaaccggttgtacgagatcgacggtatatttatagaannaaatttacatctcaaatattcatgagaaaaaattgaatgaaaagtatatttttaaaatttaattccagcgtgatctcccatccagatcctacttttgccatgtctccctgttcttggtcgctgaaaatggcggcgggaagaggtgcggcgtggtccagaagggcggcggccaccctccttttttcctctcttcatcatcgtttcataggataaaaggtgcccagcggaggccgggagacacccgattgacagcggagagaagggcccgtggcgcgcgacggcacaataggttgcttgtcccctgcgctcgatgtcagcgcggtcgccggttccggcaacgtctcctgctcccatacgccatgtgctcgcacgcagaggccactgtgtctccacctcccacgcctcacagtgcgccgatactgttggcccagccactcacttgcacacacggctctctctccctctctctcagtcgatggaactcacacacacacacaaagaagatgcactgacggaggaagaagatgaataaacaagaaatttccgtgttgtacaccagcgcacacaacacaggcactagtatttcacttttggcactgctaacaaatgctaattacattggttaaatagaccacacacacaggttaagccacgtctggccgcacaactcggacagtcactccatcacttaatcgccactaatcacgtctctatacatgcagcccatatctccttacatgcatatcactaacacaaacatgcaacacagctagcagatccactatccatgccactattgcagctacttaactcggccactactccaagccgatatccaccttagctccctacatgcaagcaccaacaggcagattatggactttcttgaccaagctaactcgtgcacgcactaattacaactcacaccaaagataaacaacaagattaagtctaacaccgatctcatcatggcctctctcctcaccggtaccccacctgacccacatgtccagtcgggtgccaccccttcgccctattccagtgccgtgctctgttttcctgctctagatgcacaaccccgaatcgttgccaatcttagagccaccgcacctctccctacctgcctttcgacctttgtcacccgtcgcctgctcccgtcctggatagagagagaaggaaaatgggttggctactggcatgttgggctcacgtgggtataccacgctgactcagtcgggttaacttcaatccagctaatcatgtcagttaaaaccgagaaccaaactagactttcggtaaacggttttgtaagttgagagatatgttatatctggtactgtggttcgaggatgtaattttaacctgacgtcaagatgagggaccataagtgaacttattcctttttgcaaccattaggcaatggctggccaggcctgagatttgtgatccatgattccacgtaatgcatatgggtctccagcttgctgtttaatcgccatcagccgggagcccgggaaaatttgttcggcccaatagaatagtttacggcatggggcagacatcagtgattttggtaaattggtccttttaaagaaacttatttataaaaaccatgttaaaaacgtatttcaaaaattgagcacaacctcaacaccatgtccgatgacgctgagatctaactaatcaacaccatactcggtgatgcagcatgctaaacccccgctgtcactgtaacaccgtgggcgacatcaacgctaacccagctggctgacatgcacctttagttaacataaacattataggcgtattgtgcagccactagtaaaaaaagcatcataggtgccggttcccaattggctattccaaccggcacctattggtcggcactaatacaagcaaccggcacctataggtttgcacgagccaaaaaaaagagccggctcgaatcgagccgaactaataatcaccttcactgcgccatgccccacatctagttgtttgaaatccccaaatccccacatcacagatcatccacaaatcacatttgaaatccacaaatcaccacatcacagatcatccacaaatcacagatcgaaatatattaaaaaaatcatccataaatgaaaaaatatcttaaaagaatctacaaatcatcccaaaaaaatcctcgggcaccgctgcctgcccaccacctcccctcccaccggatccgacggaggggagtgcgcggccgccgccgttgccgtccctgaggtccgccgtctcccatccagtcggatctagaggaggggaggacacgcgcggcggctgccgccgcctccaccggaccgccgccggctatcgccagaggtccaccacctcccctccggccggatccagtaaaggggagggcgccaccgccaccagccgctgccgccgcctctgctaggccactgccgaagcccaccgactcccaaatgccgtcccccacaagctcccctccacgccgccgcctcgcccgtggggtgcccgctgcctcccctcccgccggatctggcggaggggcgggcgtggctgccgcctccggttgccagccgagggggctcgccgtcttcgccgctcagccactgccgagacgcgagagagagaggggagggagagcgtgagagagagaggggagacgcgaaagctgagagagaggagagaggtacgagtagatggataaggcgcatatatatgagttgataaggacgtgcggtaggtgcggtgcttgtagactcggctgtccggttcggctcaaagctataggtgccgggttttttgctagaactggcacctataatgtttaaaggtgtcggttctatgtttttccatcgtatggaggtgggaaaagctccgacacctatgagctgttctctatgaaggtttttgtagtagtgagcggtagtgcatctgtgttgctaaccttgagcgcagggttaagccaaacggtatatttgtaaacgaaaaataatttgtgaataaaatttcacaggctgaaaataaacttccatgaaaaaactcctaaaatcaactctaaatttagaattgaaaatttaaattttgactgataaggataagcataagcaaaaaaagataaagctgctagttcagttgtttttgttttagcaggaaagctactgccacactcaactacgctagggttttgatgcaagacacccaaaacaaaaaggagtatcaacgaaactgccgtatgttttttgagtaaaaaactttcagatgtaattatagtataattgtagtgtaattacatatgtggtttactatattgtaactgcaatatactccttccgtcccataatataagggatttaagagggatgtgacacaaagtgtgtccagattcattgtactagattatgtcacatccctccaaaattaagggagtaacttatataaaacttacattcaactaaaatttggttagctagcactgagatcttatgcaacacttgtaaaaatttctttctagcaatttttctcccttcatgcataaatctcgaggtgatccgatggtttcaaatctgaaagttttgggggcaaaacaaacttggtagcacatccaaacataaaaactcatatttttgttaattattaagaaaccacatccttactgtcgggcctcttttccttcttttttttttaatttttttccctccagcccaccacaccatctcagtccaacccaccccttccacctccagaagctagcccagccagccgctactgcctactcctgcttcggttttctgctgttattttctctgataagttgtagctatgataactctaattgtggagattatggataccccatacccgcatggcgtgtatatctgactgggtatggggtgccatgtatcgatagaatatattcaaagggactcgggttaaattccaaacttgtatgtcaaggaaatactcgggatcctaatcggttacgattgtatcttatctgtaactacctattccgttagggatatgggctgtactttgtaatacggaccctttcccctatataaggaggggtccgggtgcctcttggggacacgatttttctcccagatcatacgatcaattatacactcggcggatcaatccccggacaggtgtagggtattacttcttattaagaaggcctgaacctgtataacattccttgtctctaaacctatccacttttccagcttgatagccaccccttttagtaatgccgaaatcttgtttcgacagttgacgcgccaagtaggggtagcgtcaagttcttcgccgactagggcaatgggtttcgtctccggcatcaacgacttcgtcttccctcctgggcaggcattctggttcggcagcctcaacttcatcaccaacgacttcggcaagatttctatccttgactcggatccgaaccagtcggggagaggccaggtctccgctctgttcgatatcctgaactcggccgaaatctactccaagatcatctcaaccgagtcggcttcaaaccacttggacgagatccaatctactccaacatgacctgatcaagacgatgaggcctatccctcaatcctgatgaaactccccgacgatttggctgctgtcttcaccacaagggtgtcttctccccgtaggtctaggcgggatccagcctcggctccgatccagtctagctccagggaagtcggtgtcatactccaacctcacgggacagtttcgacagaagaattggatggctatcttagctccccaggtgtcgattctcgaccgacagatatcctcgagtacgatgacttcggctaccactacgactaccacaacctcgacgacttcgacgaaggctacgaagacaactacacgcctctcttctttggcgttttcatggccgacaatgagacggaagaatagcgtcaagcctgagaagcagaagaacagcgcacacaacaagaagccgcgcgtcgccgactggaggaggagcgttaagcacaagagcgagaacggctgcagcgtgagcaacaggagcgcgaacaggccgcgaaggaggctgaggaccggcgacagcgcgccttggaggctgggcaacgagcacgagaacttattggacaacaagacgttgaagggacggcggtttttcgcaccccgcagcagaacgcggttgcagcgatcacccttcttgacactctactctaggaagacgcacccaatcacgtcgtcaacatcttaaaccagaccaagaccatgatcgccgcctcagttccagtgaactcctcaagcgtccgtacaccgactggcagccgagttccgcctctttcatctcaagactatcaccaaccaagcctcagcattgccggcgcaggatctagtcgcaggagcagcaatcacggtgaatgatctgttcactcgcctcccgaccgacacagggagcgttgggtcgaatagccgcgctctccacgtcgaaggcgtcccgtcgatcttcgtgatactatcaaccagcgacgtgcggagagaggccacatcccccaccattcactagatcgttacaacgacgatgtggatggagttgccgccttcacaagtgacctgcgttgagtggattggccggccggcttcaaaccgactggaattgagaagtatgacggcacgacaaatcctaagtcaccgtctatggtcttgcaattcgcgcagcaggaggagatagcaaagccatggctaattatctgcccgtggccctagcggactctgcccggtcctggcttcacgggctaccccgtggcacgatcgggtcctgggcggagtttcacgaccacttcatcgccaacttccagggcacttttgaacgccctggtacccagtttgatctttacaacgttatccagaagtccagagaatcccttcgagattacatccgacgtttctctgagcaacgtaacaagatctctgacatcaccggcaacgttatcatcgccgcctttactaagggcattcgccatgaactcttagtcggcaagtttggctttaagcctcccaagacggtcaagcagatgtttgaaaaagccaatgagtacgccaaagcagaagacgctgtcattgcatccaagcagtcgggcagcacctggaagccaaagaaagatgtgccgactacagggggagtggaagtgccaatcacaaggatcgcaagcataagcccgaggaacttgtggcaactactacaccatcctcccgacagcattcacgcgtcaagacattcgacaagatcatgaactcccaatgcccgcatcatccgaattcaaatcacgcggccaaagattgcttcgtctacaaatagttcacagagcaatacgccaagaatgcacgcaagacgactgacggagatcaaagtacgtcgaagaaaaaggatgatgaagatgatgcctcgactagttttcaagactcccgtaaagaactcaaccacatgtttggtggacccctggcttatgaatccaagcgaaagcaaaagctgaccgaacgggagatcaatgctgttcagcctgatacgccccaatatcttcagtggtcagagactgctatcaagtttgaccactcggatcatcctgaccgagtggtccacccggggcggtacccttggtactagacctagtggttcgcaacgtcaagctccgacgatccctcatcgatggtggcagcgcactcaatatccttttcgccaagactctggacgacatgcagatcccttggacagaactaaagccgagtagtgcgccctttcacggagtcatccccgggctatcttctactccactcagccagatcactttgccggttaccttcggtacacgggagaacttccgcacagagaacatttgcttcgaagttgctgatttcgagacagcgtaccacgctatactcggacgcccggcgttacccaagttcatggccgtcccgcactatacctacatgatgatgaagatgccaggtcctcgaggagtcatatccctgcggagcgacatcaagcaagccgtcacctgcgacaaggaaagctgcgagatggcacagactcgcgagatcacgctcgctcgagaggagatccgactagctgcatcaatagcaacagaagaagaagtgcctgcaaccaagatgccaaagagcggagaaggcgacgccaagactaaagccgagtagtgcgccctttcacggagtcatccccgggctatcttctactccactcagccagatcactttgccggttgccttcggttcacgggagaacttccgcacagagaacatttgcttcgaagttgctgatttcgagacagcgtaccacgctatactcagacgcccggcgttacccaagttcatggccgtcccgcactatacctacatgatgatgaagatgccaggtcctcgaggagtcatatccctgcggagcgacatcaagcaagtcgtcacctgcgacaaggaaagttgcgagatggcacagactcgcaagatcacgctcgctcgagaggagatccgactggctgcatcaatagcaacagaagaagaagtgcttgcaaccaagatgccaaagagcggagaaggcgacgccaagactaagaaaaatcctctagatccctcttatcccactaagactgctgtaataggtgctgagttagattgcaaataggaaagcgcgcttatcacctttcttcaaaataataaagatatctttgcgtggaaaccatctgatatgcctagtattcctagagaggtgattgagcactctttacatgttaaggaagacgctaaacccattaagcaatgactctgccctttcgcacaggataggaaggatgcgatcaaggaggaattgaccaagctgttagcagcaggcttcaccaaggaagtcctacatcccgactggctggcaaacccggtcctggttcggaagaagacggcacaatggcgtatgtgtgttgattacaccgacctcaacaaatcttgtcccaaagatcccttcgggttacctcgcattgaccaggtagttgactcaacggccggctgcgagctactcagtttcctgaattgttactcaggatatcatcagatccgtttaaaagagtccgactgcttgaagacttcattcatcatgcccttcggggcttactgctacatcaccatgccttttgcattgaagaacgcatgagcaacttatcaacgcatgatctagaaatgtttttcaactcagattggtcgcaacgttgaagcttatgttgatgacgtagttgtcaagaccaagcagaagaataatttgattgcggatctaaaagagacctttgcaagcatccgtgccttcaggatgaagttaaatcctgaaaagtgcatcttcggagtatcgtcagggaagttgcttggctttatggtatcccataggggcatacaggccaacccggagaagatcaacgctatcctcaacatgaaaccgccgagttcccaaaaagacattcaaaagttaactggatgcatggtggcactcagccggtttatctcacgactcggcgagcgggggatgcgctttttcaagttactaaagaaaaccgacaatttccagtggggacccgaagcgcaaaaagcctttgaagacttcaagaaacttctcactactccaccggtcttagcttcaccacatctgcaagagccgctgttgttatatgtgtcggcaacatttcaggttgtgagcacggtcatggttgtcgagcgtgaagaagatggccatgtttatttcgtcagcgaggttttgaccaactccaagacaagatatcatcaggtgcaaaagttgttatatggtgttttaattaccgtcaggaaattatctcactattttcaaggtcattcggtcacggtggtcacatcgtttccactcggggacatacttcataatggcgaggcaaatggacggattgcaaagtgggccttagagttgatgtctttggatctatccttcaagccgcgaacttcgatcaagtcccaagccctagcagattttgtcgccgagtggactgagtgccaagaagacatgcctttagagaagatggagtattggactatgcattttgacgggtcaaagaggctttcaggcaccggagcaggagttgtcctgatttccccaactggagaaaggctaaactacgtattgtggatacacttttctgcgtcccataatatggcagaatatgaggcgcttcttcatggattaaggatcgcgatatctttggggatccggcatctgatagttcgtggagattctcagttggttgttaatcaagtcatgaaagagtggtcctgcctcgatgataatatggctgcttatcggctggaggtacgcaagttagaagataagtttgatggcctcgagctaacccatgttcttcgacataataatgaggcagccgacagattggccaattttggttcgaaacgagaaataactccttctgatgtgtttgttgagcatttttatgaaccaactgtaccaaggaaagaaacaaccgaggctgtggacactcaagaagtaagcatgatcaaagccgactagagagagtcccttatcaagtttttgaccaagcaagaactccctcaggataaagacgaagccgagcggatctccaggcgcaacattacgtcatacatgagaccgagctatacaagaaaagtccatcagggattctgcaacgctgtgtgcctttggaggagggaaggcaattgctaaaagatatacactcgggcatctgcggcaatcacgctgccgcatgaaccattgttggcaaggcctatcggcagggttttttctggcctactgcggtatccgacgccgataaaattgtgcgaacatgcgaaggttgtcaattttttgcccgacagactcatttaccaactcaggagttgcaaaccatcccgttatcctggtcgttcgccgtttgggggctcgacatggtcggcccattcaaaagggctaccggtggtttcactcatctttttgtagctattaacaaattctcaaagtggattgaggccaaaccagtcgtcacgattacagcagacaaggctagagattttttcatcaacatcgtgcaccggttcggggtacccaatcgaatcatcacagataatggtactcaattcactagcagtgtgtttaaagatttttgtgaagacttcggcatcaaaatttgctatgcctccgtagcgcatcctatgagcaatggacaagtcgaacgcgccaatggtatggtacttcaaggaatcaaagcgcgagtcttcgaccgactgcatccctatgctgctaaatgggtagatcagctgccatccgtactttggtctctgcgtactacgcccagtcgggccacgggtcagtcaccgtttttcctggtatatggtgcggaagcaatgttgtcaagcgaggtagaattcgaatctttgcgatttctcaacttcaaggaggagcgctacggagaagactgagttaacgatctcaaccgactggaagaagcccgtgaggcagccttaattcagtcggctcggtatttacaagggttgcgacgttatcacaaccgcaatgttcgatcgcgggctttcttagtcggagacctggttttgaggaaaattcaaactacacgagatcggcacaacttgtctccattatgggagggaccgtttataatttctgaagttactcggccaggttcttatcgactcaagcgtgaagacggcactcacatcgacaactcttggaatattgagcatcttcgtcatttttatgcttaggcattacttttgtatcttttctccctctttgactgctaacatcaagttgctccttgagttaccagtcgggggctactataatattaatggagcgtgattcttatcaattcaatttgcttacttgatttatcattgccttgttcgattttttggcctagtcaatgaggactgaaagttttcaagaacttttacgggttttaggctcaataaggtttgacaaaaacttttaagaaatcaggagttgagtttaaattatcaaacacagcataaattcatcagtattgtacaaattgtgcctccatcatcataagttacactatacaatgtcaatcagactcaatttttccattatcagaatcatcagacacagtcggcctgagattgttgtctagaaacctctcaactgcatcaacaacgatcttgtcagcagccttctgtgcatcattgatgaggtcaagggcgtcttcttcacttgtcccgtctgcaaagcattcgacagcgtcaatatcgatcctcgggtttaaggacttggtcattgccaataccatgctcgcccccatgcatccagcttccttgatgtttttaaagtatgtatccggagcagctcttagcttgtcgaagatttcaacagcatcgaacgaactcggaccattattattaaaaaacatggcttggatgagtggtgtagcggcgttggcaacttcatccctagctccttcaagcttcttaattttgttgaccaagacgtcgaattgagcctgagatttaattttgcgatctgcataaatggttcacatcaataactgggcacgaagacaagagtggttctggagtttcaactatgaatacattcgacgtctttcagggctgagtcccactgtttggtcaattcacctttgtctttttccagagctttgattcgcttttctaactcagtgatcttggcagcttgcactataatattttccattggtcaattacatacggatagcagcttggggtaagtcaaacaggaataaaggttacctttggatgaaccactcagctcgaaattggaatcttggagctcggcgattcggtcccgaagatcatgtttggttttcctggcaagctccctggtttcacgaagttgggatctggtcgcttccagggttccaaggtgaggaaccagtttctcgagggttgcagtttttgcttcattcctaagatggattctctgcattgcaaattcatctctatttagtaaagtggccgacaggatgagtaaagctatgtgcaaagagacatacatttacaagacgagtggcctgattgagcgtctttgcaagcaaagacccttcctcgtcttctttctgcttatttattacaatcccttgtggctgcatttcgtcatcccaccatttgactaagataggtgggcgagaatcttcagccgactgaatccgaagaacttcttcttcatcaccgatcattgggcctttacatattcacagatgatgataaagcaatcgaagaggatttgtcagagcaaaatgaatttagaagagttgattacctgttatgatctttggttgaggacgagcaggcccttgcaccctatcggatgaactagacttcgggtcggtgtcggtatctttttggggagggctgcttgctcgggcctctgtttccgggatgtcctcatttcattctgtacccaactggtttccagtcgggggctcctgatcagcttcggccgactggttcccggttgggggctcgttgctggcctctatattatcggttgctggttgattactactcgggcgattttcggcggtcagcccagtttctgttgtaggaccagtctccatgctagtcggttcagagtcttttccagaaggatcgatgtcagatggcttcctacagatttgagatatgctattaacactactttgatggtgtatgtttagcgatacagggaagattattaaatgacttgtacctggatgacttcctgatttttggtattggacgactggatgttttcttcttcgggttagcttgctttggttgttttccagtcacctctttgttgccagctttttcaacattgtcaccctcatcgtcactcagtattaatttcctttttcgagagttagactagttagttggctttgagatgcttggctgagcatcagactagattttcggccctccactggcttgacctgcttgccggtggggtgagcggcgttgagcgattgggggatcagatttcatcaaagaaagttcctatgcatgatatttcaagttttcagccaaccttgcaaaagacaaaaggataccatcagaaaggccgagatgtctgttacatactggtggaggagggttgaaagcattgtatggcactactggaagcaggtgtgagtagctaactgcgatagcgttagagaagattttgtacattctctccttcatgattttaaactcaagagattctggatcttcacggttggggtcattcttgccatcaaattcgaaggtagtgcgagatctttctttgattggtgccagccggctcttgatgaaatgccgagtgatttgttccccttgcagaccctgttctttaagtttcaacatgcgttccattagagaaagagcttgggcagcctcatctcccattggaagcgagttccaggtgtgttggtatgttggatgaaggcaggagtactcggggagcgctcgctcaggattttgcccataaaaccagtttgcatgccagcccttgttcgaggttttgaagggcatggagaagtatttctggcttaaggttccccttaactgaaaacctgcccccccaacgacgcatggcttgctcttgtttggctgggacttcaggaagaagatgcggcggaataaggcaaaatgtggcctaatccctagaaaagcttcgcaaacatggatgaaattggcgatgtgaactatggaattggagtttaggtgatgcaaactaatcccgtaaaactccaggatcccccggaagaatcttgaggttggtagagaaaaaccaccatagaagaaatgagaaaataccacgacctcgtgtgtgtcaggggtcggaaatgcttcgccatatgccagacgccacccgataatctccttagccggaagaacgccatgtgctaccatctccttcaaattctcctctgttacatcggagggagcccattgactttcgaagctttctctctcctcagccatgggtgcgagatggatgatgagatttggggcgaggacggcagcgagtgaagaggagattggtgcggtggatgtgcggaagatctatgcaagagcactaagcttcgagaagggtggaatggtgtggatttgcgaaccctagtctccgtcggcgcagtgtttgtactgtagcgggaagtggggaaaatggagaggatcgcggcggggaagacgaaacggcgccctattttagcattttttttcgctagggtatcgggaggtgctaatgggcctgggcctaagcagtaccttcagcccaattttattgtctgcgtggttggttgtgatccttagggacttaggcatatgtttttgctttggcaaaatttgctcacgacagaatagcccagtgctgctcaaatcctttttgatgcagttagataattctttggaatttctacaatgcaaataaaaaggtgcccaacagaaaagtattatattaattttgttggcctttttaggctacaaagctattcgggtcttaatgagatgactgattttaaatggtcattctcttagcatgttatatgcttaccttgataatggtgtgagtcatagcttaggctatttagactcgtcatttatcatgcttcataccacatttgatggatcttttttagagtttttactcggatttttatcatgtgtgttgatttatagagctttagagtgtttctcactcgggcctcttctatatttcttttttggcgcattaaagctaaagcagtcggctggatgttttatcagatgccgcatatgcttagctatatgatcccttgggtgatttggttgagaaaccactcggatggatgttttgatgcattttgactatatgtttagtttttatttaactaatcacatagttgggggttacacctaattaggtgcatctagtcgatgcacctaattttttctattttcagcccttcacagtctttgactttagtactcgggagaccaaggcagaagaagttgaaacactcggattatcgttttgaattacgagagaagactatttcgtcgcctgtaaaggtctcaggggctacggtggagattatggataccccatacctgcatggcgtgtatatctgactgaatatggggtgccatgtatagatagaatatcttcaaagggactcgggttaaattccaaacttgtatgtcaaggaaatacgcaggatcctagtcggttacgattgtatcttatctgtaactacctattccgttagggatatgggctgtactttgtaatacggaccccttcccctatataaggaggggtccgggtgcctcttggggacacgatttttctcccagatcatacgatcaattatacactcagcggatcaatccccggacaggagtagggtattacttcttattaagaaggcctgaacctgtataaaattccttgtctctaaacccatccacttttctagcttgatagccaccccctcttagtaataccgaaatcttgtttcggcactaataaagacataaataattttttagcttttattactatctctattccaaaatatagcaacttttagctatgaatctggacacacagttatccagatttatagctaaaaatgcttatattttgggatggagggggtatacaatgtatcaactatgcatatgtgtactaactactaatatagaaattgatactgcaaaaatacattacgtttccgatcgacaaaaccgggtgccaagaggcacccaccgtgacctttcttaatttttgtttgacaatttacatgtcttaagacttctctctgagtattgaatgacttaattagacgaaagtctttcaacatggcaattaagtcgacaagttgtcacatgcactagctactggttttgttctcaacgttttcacgaccaataactcctccgcttttactgttaatggcagcatgatgtatcgtagaataaatgtatctattaattttatagtttttttagataataattttatggttatttaaaacatttaaatttgagactcgaatatactgtatcataaaatatggctacattttcaagtttagtctagctatattttgagacaaagatagtatatataacttgtaaatacatcctacaatcatgcattttaatttcaaatttatttctatatgtacaaccagacaagtagcaggtatagtacattatatatgatcgattggattcaacggatccaaagcaatagatcacccctaattacaatagagtactgtaaaagggaaatgtttcatatccacacaacccttctcgtctcgtgtatacaatgtatgtacctattaaaaaaacatcaccaaaaattgtagaaaaagttgtatatgtacttttagtagtatcatatttatgaatagagtctcatcttcaaattcattccatatatggtgttaaacaaagataaaattttgatcgatttatacacttaaaactattaaggattttatcttttacattacggctaaaatataataaatttgagattaagactttatacattaagtgtaatgctattaaagtacatgttaaatttatttttagatttgttgatgaaatttgttagttgatgtgcacggtatgtatatgatacattcccctataaaacaagccttactaaattgcaatatgcactggcggcgtcgtcagcactattcttaaaaacgtggtcaacttgactaatcataattccaaattgtctagaaattccatgcatgttatcttagattgatcacatggcttcttaattttcaacgtttcaaaatgaccgtcactgtttgtgatataaactgctaagacttttactcttaaatttctagagacctatcaagtatgaagtatcaagcaataggtaagtcgcatattcccacagagttttagctcaagacgatgacgttcgtggtaaccaagtcgtcgccgtcggtgctcgtccgcccgtcggagccgacgccggcggcgaccatccggccaacctccactgacatgacacgcctgggcatgtcgttcacgtcgttccacgtgttcgagcgcggcgtcgacgagccggcggagaccatcaggcgcgcgctgtcgcgtgccctggtccactactaccccttcgccggccgcctcgccggcagcggcgacgacgtcgtgttctcgtgcaccggcgagggcgtggtgttcgtccgcgcgacggcgaactgcaccctggaggacgtgaacttcctcggagcaccggtggtcatgtcgctcgccgacctcgccgtccggtacggcgggccatgccgggcggcgtccgacccgctgatgatgatgcaggtgacggagttcgcgtgcggcgggttcgtcgtcgcggcgacgtggaaccacggcgtcgccgacgcgtgcgggttggcgcagtttctacgcgccgtcggcgagctcgcccgcggtctccactcgccgtccgtcgtgccggtcaggtacgacgagtcgctgcctgacatcccgcagcttgccaccatcctcctcaagcggctagccgccggcgtaaaatttgagcacgtcgacttcgcctactgcgacgtcatcatcccgtggagcttcgtcaaccgcgtcaaggccgagttcgggagcaggcacgccggcgaccggccttgctccgtgttcgaggcggtcaccgcggcgatgtggcagtgccggacccgcgccatcaatggccacggcggcggcgccctcgcgccgctcgtgttcgcggcgaacgtgcggaagcacgtcggagccaaggacgggtactacggcaactgcatcatgtcgcaggtggtggtcgccacggccgacgcggtggcgaacggcgacgtcgtcgacttggtgaagctgatcaaggacgccaaggagcggatcccggtgctcctcagcaccaagacgcttgggctcgacgacagcggcggcggcgagctcgtcgccgcgctgtgcgggtacggcgcgctgtacgcgtcgagctgggcggggctcgggctcgacggcgtcgacttcggcggcgggaggccggcgcgggtgatcccctactcggaggtgaagatgctgccgtccatctccccgggcgcgccgtgctcgatgatggacggccatggcgtcaacgtggtggcgtcgtgcgtaacagacgaacacctcgaggggttccgggcacaattggcgaggctctagtgatctgccctatttcaaagagtatcctaaagcgatttcaaattttcaaatctttacttttatgaattaagttttgcagatactttttatgtctttgctccagtgaaccgctcgctttatgaaagaagaagaagaggggggggggggggggcttttaactatttgtcactcttacgagtggttcttaacgatttgccactaggcccacatgtcatagacatataagggcccgcatgtcatagacacagtgtggcaaatcgttaattgccatgtcacaagagtggcaaatagggcggcgggctaatgggcgatcgctcgatcccaatccccccatacgctctctccccctttcctcctcccattcttctcttcctactacaccatacatttaaaaaaataaaaaaacaaagttgaaaaaaattatatatagaaatactatattaaaaaatatttgaatttaaattcaaatttgaaacgggtaggtaaacttttgacttataaactttgggtgtacaaagtaagagataatctctgatatgccactgaaaattggtctgatcccttatatgccactgaaaattggctcttcccttatatgtcattggtccaaatttgcgcaccctctcaagccactactgtcagttgaccgtgtgtt

SEQ ID NO: 24653 - DNA, 10126 bp, Oryza sativa
atttggatcaatggcatataagggaagagccaattttcaatggcatataagggatcagaccaattttcagtggcatataagggattctctcaagtaagagagataattgaattcaaattcaaatttaaatcgggtatgtaaacttttgacttataaactttgggtctataaactttaggtgtataaactttagatgtatagaaatactatatataaataatatttgaattcaaattcaaatttgaatcggatataattcatattcaaatttaaatcggatatgcaaacttttgacttataaactttgggtctataaactttaggtgtatgaactttagatgtatagaaataatatatataatatttgaattcaaattcaaatttgaatcaggtgtataaacttttgacttataaactttgggtctattaaaatttaggtgtatgaactttagatgtatagaaatactatatataaaaaatatttgaatttaaattcaaatttgaatcggatatataaacttataacttataaactttggatctaaactttagatgtgtaaacttgaggtgtacaaactttaggtgcataaatttactaaaataggaaagtaatacggtgcctaaaaaggaaaccacgtggaggagagggggtatcagttgatccgatctctaggggcgatcgatcgccccatagccttttcgagaagatcatggattgacatgtgggccggcccaacttatacaattttgttttactagcaaaagtgcccgtgcgttgcaacgggaagcgtacagataagaaaaatatgcaatcaattaaaatacaaattcgttgaaaatttttggtatttttaagtagatatgtgtataattaaataaatttacaagtaaagaaaatttgagaaataaaataacatggttgaatttaattttattaaattctccatgattagttacgctctttagaattttattggaatttttagagcttaattgctaattttaataatacaaacatcatttaacaattatttaatttgaaaaagaaaaataatccttcattttaggtttgattcgaaataaacacattaagtaactataatagtaaatgctactgaaaaaatgaagtactaaaatgaacttcttctctttttcttcggcctgaggggcctaaaatagacttatttttcggtccttgccggtcggcccacggccttttcctcatgcgcgggcgcacttcccctccccaggccgcaacctggggttgggccggaaaagtggcctcgctctcgatccctcttgggccgattttgacccggccaacgccggccgtccgatctctagggttttgatcggacggccaagcgtcgagatcagggaaacaaaaccccctccctctccgcagccaccgaaaaccctagcccatttgcttctctcccttctctctcttcgacgccctccctccgcgcccccgatgctcccgtgcccaagcggcggcggcggcacctctctccccaagcgactgcggcggcggcgacgcctctctccccgagcgactgcggcggcggcgacgcctcaacccccgtgcccaagcggcagcggcggcgcctctcccccagagcccaagcggcagtggcggcgccctcccctcgagcagcggcggcggcggcgccctccctccacgagcggcgacggcggcttcaccaccaccagcggcgcggcggcgtcctcccctaccactggcggcggcgggggcggtagcgctcggggaggcgtcggtggcccgctggcgtccagcggcggcggtgcccctcccctctgccggatccaacgggaggggagctgcggcggcctggcgtccctgcgacggcggcggcggctgcggttcgacggtgacctctcctttgatctttttttttggatatatttgtgtgtataatgcttcctccgattttattttatttgtatgattgattgaattccgattgggatttttttgggtgggagtgatggaattccgattgggatttgggggaggcgagggggacgaaaatcaccatacctatgaggtgacgaacggaaaaatacgaatatctatattagttatagatatggacttggctgactggattgcactgggaccaaaactactttatatggtgtttatcggtaatttatcttgtttaaaaagtttagtggcgaatatcagttaagtggttaaattggaatgctaaatcaatatttagcgactagcctcgtgccccccctctctcccccacgtggttcgtggttagttccgtgcagtacgagaatacatgtatgtaaaaaagaaatgtttatatgtatataaaatatatacgtatgatttttttacatgtatatataatattttttatacgtatgaaatttttacgtgtatatataatatttttatacattgaatatctatttcctactatcgggagtagttatcccctggtagtctaacgttcatctgcttcacaatatatcttataccggatatggtttatgggaatctatactttatataaagttgtagcaccactaagtgtaaagctcaacatgtaactatactacatcatcacccactaacaataattacatatttagcctcatgcaaacatacaacatcttctacaatttatttgattgggaaaattgcatccatgcctccactttcagccccaactgttgttttacctccactttttaaggtttaaacttttattgaaaacgaactagacatttgccctcacttttgacaactagtttgatggtgttagttttagggcaaaagcacatttatacccttggctatttgttgtattttttgcccttacaataaaccataatacatagaaatcatagatatagtagcaagcattacttagtgtcacatagtcccaaataacgaatgtaatttatccaacgaatcaaactgaatcaagggagaaccacaatgataagaatagatcaaattacatgttaatctcttcaagtatgctccattgaaaggatttcctccattgatgcccttcccctaacctttacctcacatacaccgagcctctgttcttcctgcctccaacagagcccaaccgccgccgctgcctgctgcgtcagaaggcctggggcagatgcctgccttgctgcgccggaagccctggtggcccctgccaccgctgcgttggaagccccgccgccgcttgccttaccgcaccggaagccctgccgccgtctgccttcgctgtgccagaacccccgtggccgccgcccgccccgccggaaacctgtcgtcgactcgagccatcatcgcacatgccagaaccgccagtgcctggccgctgctcgccgcgcacgctagaactgccaccgccttgctcccgccccacggccgccacctggctgctgtctcgacggagcgctgtccgacgctcgccaccgccttgcgcatgcctgcaccaccgccaccgcctctaggtctagggtggtctgggtgttcataggcacaaccacagtcggtggggaggagagggattccatctatatccattcattcagggtagaatggtaaattgatatttcataaatctttttttaatttccatttgtaattctaaacacttaaacgtgggacccaccaaacatgcgttacaagtgggggtaaacggctggttcgttattaaaaattggggataaaattgcaaaccctaaaacgtaggggtaaaacaacagttggggttgaaagtaggggcatagatgcaattgtccttatttaattctacaaatcgtagatgcaattgtccttatttaattctacaaatcgatatgtaagtatatccaatcatcacccctcacattatttgcacaatattttcacaaatctatctatcatttttatttttatgatatttaacatatacttatcaatatgctttatattaaagcgtaagtatcatttatttgttttataataagtgctgataaatcctgatgttttgtttttttttctttttactaatagcttgattctcgaaaaaaatatattaaaaattgtttagtaattcctgcagtaaagcgtaggtaatcacgatacaatgaccggttagcatgcagacccggtcatccaactaaataaatttagaacatagtttgtcagtttattaaattgtttggttaatgcaattaaccaagtcacgtaattgggaaatggtttttccaacttcatgattagcgggctacatgcaaaacagaattttaaacttagtgggaaaggaatatggtgaccgatttataatttcttctcttccgctatagaacaattcagttattttattgcgaaactcataacatgcaaaacttatgggttggtactacactttcggcagcaacataccgaggaaattatagtaacgtaaagcatgcagtagtaacggtattgctacagtacttgtgcatagataaaattttaagtcttaatctcgtgcaaagtacatgtgctaaaaagtgcatgtgtatggtcacaagttgacacaggggctaaagtacttctctttgtccacacaaagacacatacaaagacacatagtagcaagtttttcaaactgcttaacggtgggtttcatgagaaaactttttatatggaagttgctctaaaataccagataaatatattttccaactttgtaataattaaaaacataattaattatacgttaataccacctcatatttcgtaaaacacttaatcttcatcttcatctatatgagtttaaacaccacctaaatactattgatatttttagaattctaatcttttaaacaataatatctctgacaccatatcttatatttgatggtggaaatgttatatttttttagaattctaatcttttaaacaataatatctctcacaccatcaaaatttgaattcgttttcgttttttgaactttctcgaaaaaattccattcgacactttccatttctgaaaatatgttcggaatccgaaaacgtttcggaccgttttcatcccatcggtgtgatgtaatcacatattgtatgttttgtatgacctaggagtcgaaatgctttttgttcgtgtgattaactggtggaaaaagttcaaaaacgctatcgcacgagcggtcgtgtgcggcgctcaagggatcacttctgttttccaattttggccagtggtccgatccctctcttttcctatttaggccgtgttggtttccttctgaaattccttcccggcttggcatgtgtttggtttctttattgggcttggccttagtttttctagagtgagctgaatctaagtgggtgtactatgggcctgtttggggagcttctagtagctgcagtttctcctagaatctccagttaccagaaactcctccaaacaatctagctttttacctagattctgagaatatgtagttgtagaatctgaaaaatgaactagaagcctgaactgggtttcccagcttctccaaattctcactagctagctagcttctcagcagctgcttcttaaaattttaagctctctaaacaggtcctatatatccatgtgcatcgcctagtatcgggtggaaggtcggacaaagccaaaattcttttattccattttttaatttggtattaaatttatacaggcaaagtatatatacgcacatgtgcagaacatctacttatcagtaaaaccacctccacaaccacccaggacattatttgcaccggtcttattagttggaggagttgatatagctggttttgtggatggtggacgggaatcgtactaaagcaatagttgagggagtcaaagtatactttttccttttttttttaagccagtataatgcttgtgggcttaaaggcacatgggctacttggcctgcttaggcacacatggatgggctcaaaggcacatgagctgctttccgttttgggagcacttggatatgctctttttcatttagaaaccgcacatctctgcacgcgcgtgatcagtcgcgtcgcgcatcagacgcccctaaaaaagttggcttcgtttggtgatgggcttttcaacaatgataacgtggaatagtctacacaatcacatcagaattgaaatattgtttggattattggaattgaaatatagtctacacacaatcacaaccgttaattgtcgcccggtactgtgccatccacctttgctggctttctctgcggtgagcaaaggaagagaggagaggggggagaggaaaaagtggaaaagtgaaaaaatgtggtataggtgggatttactttaagcaatttgtatcgtggaacatgtgttgatgaaaaacacgaggcctgggagatcttcttaactccagtgcaggtccaaaactcaccttcgggtatgctagcatgccagttgatttgatcctgcaatcagcaagaaataaaggcaaagaaaccgcggttaaatccataaatgacagccgatcggctaggtgccgatgatatatcatttatctttgagccgatgtcatatatgtatcgatcggcagccatgagtaaataagaaggaactaaatctactcgatcggctgtagatattaacaatatatactccttatatcgatatatacttaaatcaaatgattgggatatatcggtcgccatgccgagacagtataaatcacttagattgaaatatatattaataataagactatatatgtttatagcatagccgatcagatagatctagcatgtatcggctaatactccgatactactctatattaagatattaaagcaagcagaatatatcaaacaaaagcctaatacacttaaatgccacaaaatcttaatataaagggcagatttaacatgtcagtaaagcatatataacaagtatagttaaatcaggtaagatcggctgaaaccccgatactaccctaatcggcaaccaagaagcaggctagagattgagattctaatcacgactcataagatcaaacaactgatgcagctataagtatgaaaagaaggacaatatctagacaatcaagccattggaagtttcatagagtggtagatatcatgtacaatctaaaccaacatcgatatttaacctaatcggctgacctctactagtagatgttagctgattgtaggttagatgatgatattgctatagattatataagatatatgacaactcgacggattacataaacaagattagagtattataaagatggaagcactaatcctgagaacgcaagccgacaaaatcagttttacctcttgttgaaaatcgaaaccgatgcagctcaacccgaaagtaagaactcgtcgaaataaaacgaaagtaaaaagggtggcgatgcgccgagattgtattgaacgtgtgtgttaattgattacatggggtacggggtctatttatacccgagaattacaaactatgtccatatcggacacgactcctatctctaacaaactctaagatatcataagtctttgcagacttttgcccaaacatatctctaaggaaattacataaaatatcctaattaatagatacaattaccttctcaagactctatccatgcgtggcaatcatcttgaagcatatcaactcaacccgatgatgtacaccaagttgtattgttggatttagctaaatcggctaacctcgtccgactcgaaatccgccgatcttagccgtagccgattcggacttcagccgatcttactctgttccccgatcgatttccatctcggattctacttttattccatctctatctccgatacttagattaccaaatttggtcgttaacaacatgtagctaacattgttttttttcttaggtgaagggttccgcaaaatttcgtttcacattgtgaacgtcctgaaaaagttggcttgtttggtgaagctaaggtgcttttcgacaatgacaacgtggaatagtctacacaatcacatcatgaattgaaatattaattatttggatctttgtattattctcctaattctgtccaggtacatagaatgatgtcactagcttcagtgcacgacatcaactaattaataaatgtcaggctactttttaaaataatattgcacatataactttcatatttccttacctgtacatacaagtgtaaattaatttttgtgaaaactattatcaaactatagcaaaacaacgtatccaacaaatttcatcataaaggcacaagcatcttattattagattatcaattatatatataacacaaataggagcttgccgcggtggttggtgcggaggtggtgaagcgacgacggtgcccttgccgactgacgcctccaattccaagaaccgccgagctcctgtcgtcccccactaccgcaccgttgacctcaccgtcctccactactaaccatgccgtccgccggtaccacgtcaccgacctcgttgtatcccactaacagccactgacctcactgctgtactggggtgcgggaggggaggggtgatgcatcgacgagtgctaggccccaccgccgcttttctcggtgccatcgccgcttgggccgctcggctcggcactatctctgcccagctttctctgcaatggggaaaggaagagaggagagaggcgagagaaaaaaaagagaaaagtaaaaaaaaaggtattgataggacctactataagcaacttacattgtggaatatgtagctaacattgttcttcttttggtggcatgtgaggttcagaaaatttcgtgtcgcactataaacgtcctaaaaaagtacaaaatcttattattagatttatcatatatatatatatatattcaaaacatattatcgcaaaaacactagctgcaggctgtggctgtgctgccctgctagctagctgtggttgggctagcacgaaaccatagagctggttgtggctgtgctgcaacaatgtcagcgagcacgtgaataattaatatccatacgttcaccatccttgtgtcgccaatcgccattgctgtccaattgaacgaaaaaaaaatgcttgtctccacgtcgaaacaaacacggcatcgaaaccttgtagaagcatcgctatacaaccaacaacacaaacaaaactgtcctcgtaggaacaaccatcacttaaaatttgttgatattggatatccatttgttgatattggatagttgggttaaaacgaaaataaaggcaccggccagggaggaatcgatggatattcaaatttctgcatgcatgtccggccggtactctattttcaaacttttgcatgcatgcacaccagccggtgaggatttgtttgaagatttggagatgttctgtaatatgtaatgatttggatatgggaggggatggtgtgaaatcaatattcaatattaaaagcagaaaaaaaagaaaaaatatctttagtcccggttggtgatgggagcatgacaccaaccgggactaaagattgatttttagtcccggttatttgaaccgggactaaagatagcgatctttagtcctggatttgtagtcccggttggaaaaccgggactacaggggggttacgaaccgggactaaaaagcatttctccaccagtgtgccatgccacgttaaaaatttcagatatactgttttcttagttagtagaagtatatactcttttcactaactattagtatttgttttgtcactatatactctactttgtttagtagtagtatatactatttttttcaatatatactattctttacttaatagtatacactatattgtcaatgcacaactgcacagatttggtgcacaattgaaggaggccatgcatttggtttcaaaattgacaatgtacctatctaactttcctcttttttcaaatactagtacagattagtactagtatatgcagtatttgtttttgtattggtatatactgttttttttgttactagcagtatatattatttttaaagttacggtatatactatttgtcagttagtagtagtatatgctctttttaaagtagtatcggtatatactggctatatttagttgcagaacatactccctccgttttttataaaagaagacgccg

SEQ ID NO: 24654 - DNA, 6934 bp, Oryza sativa
cggcgtcatctatttaaaaaacggaggtagtagtattttaaaagttcattgcagtatatactatttttcagttagtagtagcatatgctgtttttttaagttagtatcggtatatactagttttactcagtaattcaaaagctaactgcagtatatacttattttcagttagtatcggtatatacttcattttaagttagtggtaggtatggggttgatatatagttatgaatcagaacacactgagtatgactgcgaaagaagtatcaattcgctgattaagatttacaaacaacatcactgttacattcagaattatgcaaaacaaatttaatgctctggccgtatactgaatgaacagtatcagtacttcttttccagatcaaaaccaggagaacaagaacgaaacataatactcctacatcgattttaaaatgatttcttgttgcctgacaacatcaatcacccgggtgccgtacgtggccgtcgacgccgccaccaacagataggcagccgtggagcagcagttatgccatggcattcactgaaattcatgagtcgttcgagtcgacgctgcactgcacatcgatatactctgctatcggccaccatctgcatacaaaagaaatcatgtgcttaatcattcaaggaaagaaagccagaaaggcagtatatactatacgtgaatagcagcacggacaagcagaaaaaaggagttcaattaacagatgcatcacgtacgtacgtgtttttaccggacgccggcgttgatgcgttgtcagatttcatcggctggggcaaaaccatagcttaagggaagaggatgaccttacaggggctgccgtctctgatgacgattcgcttccagcaagcgacgtacgaataggccaggggatttgcaattataacactgtaaacattaacctttgctataatggtactggacccacattttatagacacagatagatccatttgtcatccactcgaaatgtcccaatattgtaattttcaggaataggccatagggctagcgaaatcaatcttccgccgcctgctgggaacgacgaagtcgccgtgcccgagagttgaagcacgttgtgcctgccggtgaagcgcgccaggaacgcgccggccgtggtgccgccatctacgcttctccgatggggtggatctgtcagcacgccgaatctccgatgagcatgttgcccctgccgccggctggatagaaccggaatatatatgcgagcagttctacaccgatgccagatccgatcatcaagggataatcaaatattccagcttttctttttagaaaattcaaaatcggtctgctgggatccgatacgcaggaacatgtgtgcaatcgatcgataaggtacgcggatggacggtggatgcggaccaggagtacgtactcccgggagtacataaacatttttcatatatatatatatatatatatatatatatatatatatatatatatatatatatatataaaatcatgagcagcacttaagagtccggtcgtctcaagttagcatgcgagtttttttaaacaaatttcttatatggttccttctgtattaccaaaagtaaacgatgttaaaaaccgactcaaatacggatatgtattttcaaaagcaaacgaacttaaaacccgctcatacatagatgatatcaaaaaattccggcaaaaacatcttcaatttttacaatagtagagatagatttatatccaaaagtattttttcataaggcgttaatgttgtggctattgataatatatatactatgtgaataatcaaagtacaatattaaagatagtataaaaagacaacacgctataattttttccgagcgggtatatttgtgttaatttacctttatatatgaacagccaatatgcttagcatacgtgagtagggatgaaaacggatcagatacggtcagaaactagctctatcatattcgttttcacattttttttaaatcggaatcggaatcggaaacccggatatgaaaacgaaatcgaatattgtcggatacagatatggtgcgaatacgaagcgaaacgaataaggtgacgaatattaatcggaacataaaacccctcaaactaagcatcacaactcaaaaaagaaatataacccgttattttttctaatataacatatcaacttttccaaattttagtgttaataattttgttatatccgattttgtggttgagggagaacgattcaatagtttatcgcactcatatgggcgtcttaaggagctgtatgtgaaaataatatttaaaactagtttatcgcactcatatgaacactaaattggatgattctttttcataaatatttctaaaatcatgctctaacgtgttattgtgttcttactgctattattttggccatagtttcttgtgactttgttttatcaatttaaaatttgaatttcaaaaaatagcaacttcagataatattttgaagcagtaaataattttagctgaaaaagtcatgaacataagagttgtagaattcatcaaaagctacaacttttattttggtcatttcttcatccgataaagggatagtaacattgttcacagaatttatatatctctcttacagcttatgaaaccatatgtgtgatatgtacattttgtaaacaatgttactatcgctttgtcggatgaacaaatgactaaaataaaagttatagatcttgatgagttatataactttgttcttgatgactttttcagttgaaatcattcaatatttgaaaatattgtttgaagttatcatattttaaaattcaaattcaaattgtttaaacaaagtaatatatttgaaaaatgacccaaacaaaagttgttgatcttgatgcgttgtacaactttgttgttgacaatttttccatttgaaatcatttactactcgaaaaattatttgaacttcttatattttaaaattcaaaatttatatagttcaatcaaactcgtatagagaaatgactaaaagaaaattggtagatcttaataaattctacaagtttgtttttgacaacttttttcatatgagttcatttagtattataaaatttaattcgaagttaagggagtacatacagacttattagctaattcttaggcccgttggcccatttagatagagggatatataaacctaaccctacccggccactcccacagtaccactctcccagccgccacccttcctcccatgacagcgtgcgccggatggcatggcgacaccagccttggggtggccgacgtcgtgggctccgcggcgcgaggcgacggcgtgcgacggatggcggcgagcggattcgacggtgccggccccggagcggcccaatctgacgtcgtgagacgatggtgacgactggggcttggctgcgcgaggcgacggcgtgcggcggacggcgacaccagcctcggggtggccggatccggggtcggcggtcccggagctgcaggatccgacgtcgtgaggcgacggcgacggtaggggctcggcggcgcgaggcgacgacgtgcggctgacggcgacgagcgaatccggcggcgccggccttcgggtggccgggtcacgacgacgggctgcggcggcgggctcgactgcggcgacaactacgatgcgcggcgatggcgtcggtgggcggcagcggcaggcggcggatccggtggcgccgccctcaggaggggtcggatccgccgccctacggaggtgttcagctctcggccccgcgacggccagcggcgggcagcagcagcggcgcggatctggcgccggccacgcggcggccggcagtgggcagcgcgaaggtggccggctaaggttttaagggtttcttttttttttttgttgaaaaatctttcttttgctaaaataccggaaatccgatgaaaaatcccgcatagtttccgtcggatatcaaccttactatattagttttggtatccgagaaaaaaaaatccgaattcgtttccgaatccgaaaaatcctggatagttccgaccgaatttttttgaatctaaaaattggttcggacagacggaaacaatccgaaccagtttcatccctaacgtgtgttagagggtgatctcctccttcatggacgcgggaggcccccctttttttggttcggccgggggcagctgtaacatcttgaaaattcccaacaataaaaatcactgaaatttcgaactttttaaaactctttgcatcatgctggaagttatggttgttattgcttgccaaaccataaatcgacgcaatggaaaaaaaatcaatctaaagatttatacccgagcaatagttacgatttacaacgatacgatatttattatcaatcccataaaatatttatgcacatgaaagccaggccaaataaagtacaagtcaattattaaaccctgtggtataaatcacaaatcaaatattaaataatcaaaccatgttgatagcctgatttcatatttaacaaaaggaaacaacatagttgaatataattcacttgaatccaatctcacatgaaatatataagtacacatgaaatgatgatcacatcaatggccccatctataatagagtatctcactagaatatataattaatatttgaaacaccttattaagctcctcatagcatgaaaatcactcatataaaataatggtcatataaataaactaggctttatacataaataagaatatgtgagtgtttaattaaacaattagattaatgttgtactaagtctcaatttatatttatagaatgagtagacccacgtaaaatgcattgttatacaaataagttcattcaatgtgctattgtaataataatggccacattaggatattttaaattaattttagaaccctcaaagcctccaaaattatctaggttaattttagatttaaacctcatttaaataatacaataggaaaatatataaaatatgggtaatattaaattttggtcaactttcatctaaaataaaacatatattgggtaaaactctaattgtgtgaaatctagaaattatgggacaagttttaatagaaaataggcctcaaaagtggataattaggaaaaagtcactgtgcctcgccgccgctgagccgacgcgccccgccgccgcgatgtgcctcgtcgccgcgccgtgctccgccgtcgaccccgccgctgcgtctccgtcgaccccgccgccgaaccagtgagcctccccctcccccaccgcttgccgtcgcgccgtgccgcccgccggttctagccgaggccgtgagagagagaagaaaacagagaggagagagagaaaagagaatggaggagagaggttagagtgggccccacctgtcattaattccatccaatttcccttagaaaaataattctgtagaaaagaaattcaagaccttgaccccacctgtcagtcactatagcttgtggataaggttgtattataaataaatgaattaggaacagtaccattttgcaattattagaactaattcaaatttgaatctttatactagcataacttattcatttcagctccgatttgagtgaaacttgaatctaaattcatctaaattcataagctttccaatgatatataattcactatttgataaaatatatttataaatattaaataattaatatcaagatgatgcataatagtcaacttaaaaatatgctaataaataaaattagtattgtacagtagggtggatgtaataatatttgtctctaacatgtttgcactgtaacaaccacacaaactaattttatgtgatgtctcaaatgaatggatgtataggaaaatactagtacttatttaatattcgatggccatataattaaatccatggcttataggttatttaaatcaagtatagccttatgattatgtaactaaaatataaacacacatagatgaatctttaacctgtttaggagaataataacagagctagatgtggaggaatcactaagtaaattaatcgatgcaataccatatagaatagcatatatatgcctaaattgattaccacttattagtaacccaatagaaccagtgcttaaacttgtcgtatcacatatacaatatcactcatagaaactagctaatgtataattaaactacaatatattcaggaatcacttggagcattgggtagtacactttctaaataagctcatgtacagtaggcgaccaaaaccttatacgttgttgcacacatatattgtacatcccattatagttacacaattaatttatctttttcatatattaaactggggagtatataacaaacatgaatagtagataagtactaattataaatcttgacctcatatgttcatagttcaattgtaactccggattgttcattaagagataatctgtaactataatattataaacttcccgaatttaacatatagagcatggataattattagcccttttataatttgtaatggcaagtaaaatatgttcataattaaagtaaagcttccatcaataaaataataatacaaataattcactgtaattgtttgattgatcctaaatccatctaacaacagaacctctagtatataactgtcctatttatatagatgcatacatagccataatccttcaatagccatttgatagactaaaccaccgattagccaaatatatatgtatcccataaatgctatgttggttaagtcctaaataggccacgatgacaatagaaagattaagaaactttagccttagcatgattgggatccattagcaaacacgaatagtacattttgttgcgcatatttgattgttgtttgaatattggtttttctcgcgtattatagaccttgtgtatcggttagtcgtgaggcaacgt

SEQ ID NO: 24655 - DNA, 2300 bp, Oryza sativa
caagggatgtcaagattgtcaaaagtttgaagcatttcaaagggcaccagcatcggctatgaaccctatcatcaagccatggccattcagaggttggggaattgatatgatcggtatgattaatccaccatcgagcaaaggacacaagtttatattggtggcaaccgattaatttaataagtgggtagaggcgattcctttgaagaaagttgattctggggatgctatccaatttgttcaagagcatattatttatcgctttggtattcctcaaactattacaaccgatcaaggctcgatctttgtgtccgatgagttcgttcggtttgccgatagcatgggtattaagttattgaattattcgccatattatgcacaagccaatgggcaggccgatgcatctaacaagagtttgatcaaattgatcaagagaaagattttcgattatcctcggcaatggcatactagattggccgaagcattgtggtcctatcggatggcttgacatagttcgatccaagttcctccttataagcttgtttatggacatgaggctgttgtaccatgggtagctagtatcggctcaagaagaacggagttgcagaatgagttgtcagccgatgagtattataatatcatgaccgatgaaagggaagatttggttcaatcaagattgagagcccttgcaaaagttactaaagataaggaacgtgtttctcaacatgataacaagaaagtggtagccaagtctttttcgaaaggtgaacttgtgtggaattgattttgctgatagggactcgagacaacaaattcggcacgtggtcaccaaattgggaagggtcgtttcaaatccataaagttgtgtccaaaggagcttacatgttgcaaggacttgatggggaagtttatggacgagcgttaaatggcaaatatttgaagaaatattacccaagcgtttgggttaatgcatgatcggctggtattgccgatacatgatagccgatgtgttcacatcgccttgagatggccgatatagttgtatcgcccttagttattttcatattgtaatccattgtgttttgccgatgtacaatggccggtatggttatatcgcccttagttgttttcatattgtaataggttgtgttttgccgatatacaatggccgatatttttatgtcgcccttagttcaacttataattttatcaatgccttcgtcattataaaattaggggggcacatatacatgtaaaaagttgcaaaattttgagcaaatataggaagtcatattaattgacggatgaagtatcaagagtttcttagccgattacaaaattttcctaagtcctattacatagaaagtcgctgagataaatatcgttgtattgccgatacagcacgttgtctgatttgttccacttcttcgattgcttgggcatcttgtgcatcggttccagggacgattttcaaggacttagtcatatcggcaacatttctgatagccgattttagccttcgggagatcggctagtttcttttgctccaaatctagctcggcgttacattcttcgagttgtgctatgagttcaattttggacttgatcggaccttcagacaagagatcaagcttggacttttattcatgcactaactgccgattgatttggattgtagcctcaatatccttgcactcctgatgatcggctaatctttgcttggctttctccagcttgaattggtgttgctcgagatagacagctagagtaacaacgtcggctagctcatccggaatttgagattggatctcatgtagccgagtcctgattgacccacaatcgaccactagattgtctagtgatgatgcctctagccgatgagagatgtcttgaagttttttcttcacatcatcagaaagaggggccaaagctttgttagtggtgtctttttctatttcatcaaagtaatctttgatatcaaaagaaaacagatcggctagggcctgcaagacagcaatttgaagacagttagatatcaaatggatatagccgatctaagaccttgtgttaaagaaagacttactgggatggcaggagcggctggttgttcctcttcctcaacattatggcttcctgcaaccgatggagttcggtcacttgacgtttgttgtacaggaggcgaagggggaggaggaggctgaaaggacagacaagtgttagttcatatgggctataattagaatttcgaaagacaattttaccggtggagctggtttgagagttgttgctgccgatttcttcct

SEQ ID NO: 24656 - DNA, 41107 bp, Oryza sativa
  unsure (1)..(41107): unsure at all n locations
gtagccgatgactggaggggttaatccaccaccatttggcaagaggcctggagaaaactctatatccctgccactgttgcttttgtgtggaggagaagattctgttgtctgcaagacaaagaaaagtcagtcaagatttaagttggctaacaattattcaagcgaaattaataaagtaaaggtgtacccgagggacaacatcagagaacagatctgtcatatacatagaagccgactgatggaatatatgttgtttccacgctccccaccacctgtcaaagtttctgctcctaaaccttgccagctctatgctctcaatgctgcccaaaggaggccctgggatattgagtagccgattcatcatcagggttgatgaaatttctcctcagcattggattttatcggcaaagaacaagccgattggtagctgtcccattccaaactgtctagcagagctcattgggtggtaaaactcataaaaaacctgtatgtttcttccttgatgaatgccaataggaaggatgcatgggctgatagcaactgagaagacttctctggacttttggtatctctcatgattgatgccttcaaatctgaaatctgctaggagttcaagacttactgagtcttcataagggaaccaaacccaagcatctttctaaaacccttcataaaagctgcggaaccaatccttgagcaactcagccgataattttgctccagcatcggctggtgtggatgcatactctccgtaggacatacacctgtgatgggtgcgttcttctccatcattgtctgtaatcggctccaatcttgggaattcagcttttgtcacagatggtcgattgacagctttcatggctaccagatttagccaagtttgcagcagccatcatggtcctcctgcaccaacgattgagccgacagcaatcttggctgatgcattgttcagtgtttgatataggtagccgagaaggatcttgcgtagaggaaattgcctttttgattctagggcttcggctaaaaactgctaattggttgtagggccgcaactagatccacagaaaaggaacttttcaagtcacatcagtaggaaggccacatgttctgggggagtgacaggtcctttgcccatatatgctgccacataaccagaccaaccacctatgctctaggtcctgaagacgaattggttcttggtgttcaggctcataggattagccgatgaagttacatctaatccagtaatcatggttatgtcgatcagagttggggtcatcggcccttggttggacatgaaggcattgatggtgttggacccgaaataggtgacagcggccatcaagggttcatccttggctgaatttgctatagtgagggcgagtgcctggctgattcgattttatcccagtgagcctgtttgctagccgatacccgtttgaaccaccagcccaacttttttcgggtgaagttttctcaagagatggccaagacttgaaagtgtttttccagtgacctagattggggttggctaatctaaaggcgattctgttggttccggcaatgatgaattcagtggggtcgagctcgccaatcaaaccaagaaagtagtggttctcgtgtgatagactgggaattgctactagattggacaagtgctgcagacgcagatgagaatagagaagaagaaaacaagatgagaacaaggagaaaatgatctacagcatgagagaaggggatctagccgatggatacttacctctacctactcggccgacggcgtggtcgacgggctggcggaagtcgacatcaccgggagcggaaatctggtcggaaggggaattgcctcgaaatcgcgtggtgcgtcaaggggatcgccggagagagagaagacggagttggcttgagcggtgtaaacggaagtgacggtgtgaagtttctcgggggcaactgttagtatttaaagcagagcgataacggtcgaagaaacggcaagtgcgatattctctcggagtggagatatggcaaatccgaaacactatcaaatattccggacatggggggcatgtgttaacgaccaaatttggtaatccaagtatcggagatgaagatgggatcaaagaataattcgagatggagatcgctccagaagcaaagaagggatcggctgaagtccgaatcggctgcgaccaggatcggtagagtccgagttggacaaggttagccgattgagccgaatccgacaatatgacatggcatacgtcgtcgggttgagttgatgtgcttcatgaggattgccacgtatggatagagtcctaagaaggcaattgtatctattaattaggatatttcatgtaatttccttagagatatgtttgggcaaaagtctgccgtaaaaacttatagtatcttagagtttgttagagataagagtcgtgtctgacatggacatattttgtaatctcgggtataaatagaccccgagccccatgtaatcaatctaacacacgttcaatataatctcggcgcatcgccaccctcttactttcgttttgtttcgacaagttcttgctttcgggttgtgctgcattggtttcgatcttcaactagaggtaaaacttgttatggcggcttgcgttctcgggattagtgcttccatctttatgatactctaatcttgtttatgtaattcgtcgagttatcatatatcttatataatctctggcaatatcgttatctaaccaccaatcagctaacgtctgttactagaaagcagccgattaggttaaatatcgatgttgacttagattatataggatatctaccactctatgaaacatccaacggcttgattgtctagatattgtccttcttttcatacctatagctgcatcagttgagtttgatcttatgagtcgtgattagaatctcaatctctagcctgcttttggttgccgattaggatagcatcagggtttcagccgatctgacctgatttaactactttttctttatatgctcgattgacatgttaaatccgccctttatgttaagatcttgttgcatttaagtatattaggctttcgtttggtatattctgcttgctctaatatcttaatatagagtgatatcggagtattagccgatacatgctagatttatctgatcggctatgctatgaatatatatagtcttgttgttagtatatatttcgatctaagtgatttatactgtctcggcaaggcgatcgatctttcccaatcacttgatttaagtatatattgacataaggattatctacagccgatcgagtagatttagttctttcttacttattcatgactgccgatcgatctacatatgacatcagctcaaacataaatgtaacgtcatctgcaactaaccgatcggctatcatttatggatttaaccgcggtttcttttactttatttcttgttgattgtggaatcaaatcaactggcacgctcatacacctaaaggcaagcttttggacctgtactggagttaagcagatctcccaggcctcgtgtttttacatcaacaattacatatgtgattgttgttgttgaccaaggaattattttttgttgatttgtgattggattgcacatgacgaatggagctggctcggcttgaagctggcatctctatttttttttaatcgggaagagtacaaatatgtctgttctaggttattggtgctgaccaattagtgctggctgagaaaccgacaactattgccggttctcaaccggcacctatgaaagtttttgtattagtgttcataccgtattttttggagtaaggacaaaaatcctatagcctttggctgataagtacacccagatatatgtcagatcttctttccgaactcttcctctagcttggcaatgccagcagtagagggcgacggcggctgcagggacatattattcaattccgcgggagttttaaaatttaaaaggggtggaaacatgatttcggcaataataaaaaggggtagcacacgagacctaaaagtggatggatgcacagacaaaggatttagacaggttcaggccctctcgatgagaggtaataccctactcctgtttggagatttgaatccaccgggtgtaatatagatctgacgatctagttgtctcatgccccctagagggcctcctgcccaccttatataggatggggggcaggattacaagatagaaaccttaaccaacacggtatcggtttcctaaatctactttacaatcttatcaagccaggactttaggccgttccataatatacagggaaacgtaatacccaagtcatgatctgttacatatttcatagatataagttatcccatataactagtcggataaccatgccgtgtgggtatggggtacccataatctccacagtagcccctgagaccttcacagtcgaaaagataatcttttctcgaactagattactccaaagccgagtgcttcaatcatctttgccatgacttcccgagtacttttaccaaatctgaagactgtggagggctgaaaaataaagtcaggtgcatcgactagatgcacctaataggtgtagcccccgactatgtggttaattgaacaaaccaaacatattgtcaaggaataaataatctaaccaaccgagtggtttcgataatagcatatgatgtgtgaatccctgaataatatgatccaagtgatataccgactgctttgtaaaatatgatgcgtgcaacttaaagtcgactacattattgaaaattcacatagcaaaacagctataaagaagcttgtatgttgtgaataaagaaatttccaaagtattgggcatacgccatgcgcacactgctttaacagatgtgcttaagtccctaaaagacacatggtttcaccacacctgaaaatatatggcatatgtggtgtaaaatccgagtaaataaactcataaaggatttaccaactgcctagaaaatgaccaaaatatataatcagcccaagccataatattggtcaataaaagtgcacacttacgtggcaaaaaacaatgatattttatccaatcaattgctttatgaacccaaacagcacctcgacttatataaaaaaagtcagcgggcagctatataaaacattactgtttggcaccttttaaaatgcattgtaccaactcctaaaaagttgagtaacggcggtataaaaggattttaaggtattgggcacataatcacgcgcacttttgcctaagcaaaaagatgcctaagtccctaaaagaacgtgacaggccacacctgaaaatatgggctgcagacatattaggcctaggccaaaacatatgccctcgacaccctttaaaggatgacgcatgtaacatgctcccgagtaataaatcttccgggtaatatagaccaagcgtagctcatatgaatagcttctgatctgagtgattatcccttatgggatactccaaaatagatataaaaattgaatcccgactggcgcaagtattcggttgataacccttacggagaataataaatagtccagtctttgagcatagaaaatagacccatgatcatgaattcatgttgcatgtaaccggaacaagtccaaattgaaggtatgatacttgtgtttgaactagtaagcccctgagcatatagcttgtccttctgtcgtagtcacaattgtccattgatggtagctgacgcagttggcatagagacaagacgaccaatatagagataatattgcccaccagaggtggcaaaaatattggtggtagtgaagataatgataccaatcaaaagtgatgaagttgcacagccgtggaagcgaagaaaccagtcggcagtagtcaggtcagccattaatgaagatgaaagcgcccagcgataaagttgtgtagccatggcagcgaaataatcagtcggtgacagacgaggcaaatcaaaggcgatgacgaaatccaccaatcatgaagatgaagaaacattatgggtacaatccaccaatcatgaagatgaagaaaatagtcggcgacgacaaacgcaactgttgtccaactcgtctaaaccgaaatatttgaagttgttgaagtagaatgtctgctccgaagcaaagatgaagataatgactcctggagttgactcgttggctgattaattgatttcttcagcttgacataaaatttgtcaaattttgagccttgtatttgtgtagcccccgactctttgattagttgggaaacaactgaacatagagtcgagaactgtagcttcttgtcgttgaatagttattgcttgattgaagatatgtgttgaagatgtccaagtagaaatcatgaatgttggagagccacttgttgtagtaaaataacacagcatcgcatgccgagatgtcgagattcacaaagacgtcatggttggtgaagtagcaaaacttgtgaagtagcagcaatagagtttgctggtaccgaagataataaagatgaagtcgctccaccatgatgacaaagttgcgttgccgtgatgaagtgaacacgagtcggcggcaacagaagcaaaccggtagtgaagacgcgcagttgtgaagataaaagcaccagtcggcggcggcataaccagtcggcgacggaagacgatgatttccatcagtagtggtagctgtataaacaagacgtagaggcgagggcactagtcagcagtagacgagacgaccggcgatgaagaagataaagccaatcaacactggcggaatcatgcagccatggaagtgaataaactagtcggcagcagatgtagacagcttgcgttgaagatgataacgcctattagcggtgacggcgacgtggccagccgtgaagaagatagcatcagttggcgtcataacaggctagccgtgcaggcggtgacaccagtcaacaccagtcggcggcggacgaggcggccggtcggtgaaaacgtagacgcccaacaacggcggcataataggccaaccgtgcaggcggaaacaccagtcgccggcggacgaggcggccggtcggtgaagacatagacgcccaacaacggcggcataataagccagccgtgcaggcggaaacaccagtcagcggcggacgaggcggccggtcggtgaagacgtagacgcccaacaacggcggtcataataggccagccgtgcaggcggaaacaccagtcgacggcggacgaggcggccggtcggtgaagacgtagacgcccaacaacggtggtgtgaccaaacaaccgtataggcgaagacaccagtcggcggcgatgacggcaagccggtggtgatgttctgactgatccattcctggagcgtaagagataagcttaaagccatgaatcccttttgtgcatatctggatctggatcctgcagaacaaacatataggatgagtaatatctgatataaatataatactcgagaaaaaaatcaagtatttaaaaatatttataaatatgtatttctcctcttgtcaattttgatttccccgagcagatgactctgtacgtttaaacactctgtccgactagtcatagcccccaagcatcgggagtcggcctaggcatttcccaaacatgcatatgactgacatgagttcgtcattaatggaacaaagtttcgcggatcagaatttactactcaggtacttttgcaattattaagagcagaaaataaatttatctcatctctatgcttttgatttattccgaataatacttagcaccttgcgttactcggtccatccaacgagcccccgggtgctaggaatcggcccaaaggcaaccatccattggcaaaccaaacggaaagcataggaagatagaactccataactcgataggtacttttgtactcagattatgtcgcaagcaatcaagataaatattataaaaaatatgatataacatctgtagcccccgactcactactcaatggaagaccaattggtgtagtgaggcagaggaaaaggaaaaatatcatataaagaataaaataaatgatgacttagctttgtaatattccccttggtgatggcagaagtggccaatgtgggaacaaagtcgtccatcaataacaatgaagacaccagtcggcggcgacgaaggcggtcgacggtgaaagcgaagatgcccactaatggcggcataataggccagtcgtgtaagcggaaacactagtcgacggcaacgaaggtgagccaacggtgaagatgtagacatccaacaacggcggcataataggccagccgtgcaggcggaaacaccagtcggcgaaggccagccggtcagtgaagacgtggacgcccatgaacggtggtgtgaccaaccgaccgtataggcggggacaccagtcggcggcgacggaggcaggccggcggtgtagatgacgatgcccatcaacggtggtgtgaccaaccgaccgtataggcgaggacaccagtcggcggcgacggaggcaggccggtggtgaagtcgtagacgcccaacagcagcggcataataggccagccgtgcaggcggaaacaccagtcggcgaaggccagccggtcggtgaagacgtggacacccatcaacagcggcataatagaccagccgtgtaggtcgaggcaccagtcggcggcggggaaggcaagccggctgtgaagatgaagatgcctagcaatggttggaaaatgctaggatatgtcctcacacatgtttgctcccaatctgctcgcacgcgtgtatatatgtgcatacggcagagtgcaaattatgagtgtgagcagctcgctccagccagatcagggcgacgtcagccggatggataggccaacgatgattaatttgcatgtccatgcatctgaaagtattgcactccactgtgcttgcatctgcccctgtaaccaacagtccttcagcatgatgccgtcgtcggaggtaatcatggagccgtcaaacgccagtatatgcacgcgagagaaaacgaagaatcaaagggcagatcaatctatgattaaaaaaatcataattataataatagattggaacgataaattagccgatgccggatagcagtttttatccatgcatgcatgtgtttatgcgtgtagatgcagagccgatccttgcgtgtccaagtgcatgtgcggacggatgattgctatcccggcgagtagctgtcttcacacggctgatagatggctgcggtggatgacgcactgctacacgcctccgccgaggcgccgagtccgcgtcgaactcgaagcgtccagtttgatctcagcaatcaatctcaccgagcataacagaaaacggcgatgacgacgacgactggatcggaggctcgattgctatccggtgcgtgtgaacatccatcgctccagcatgcctgtccagatagcagtggtgactcccgtggccgacctccatgcagagcagtacgatcaagcagggttttgcaggctggtagctggagacgtggccgatgatctcttggatacagatgatttttttttggctacggactgtatagcagctccagccggcatcttggcgagctgcatcttgaggattcaccaccattggtgacgtcggagattggagtgatccaacttgctgaggttgattttccttgctagattgaatctgattcggcgccttctaattggttccatctcacttctcgtagataactcgacgcacccctacctggcgcgccaactgtcgaaacatgatttcggcaataataaaaaggggtagcacacgagacctaaaagtggatggatgcagagacaaaggatttagacaggttcaggccctctcgatgagaggtaataccctactcctgtttggagatttgaatccaccgggtgtaatatagatctgacgatctagttgtctcatgccccctagagggcctcctgcccaccttatataggatggggggcaggattacaagatagaaaccttaaccaacacggtatcggtttcctaaatctactttacaatttatcaagccaggactttaggccgttctataatatacagggaaacgtaatacccaagtcatgatctgttacatatttcatagatataagttatcccatataactagtcggataaccatgccgtgtgggtatggggtacccataatctccacaagaggtaccttaaaacaccactgaataaaaattaatttaaggggcatccacatttattcaattttggaaattacaatcgtctaccgtacgtctacgtgccctgtcctgggccatgcgtgctgcacgtggatttaaccatttcctagtttaattacttcggaattagtgcaagaaattagttatcgttcccggcctgaattggttaaatatgcaactctagaggaattgggaattgggatcacctgcagtggctatagccactacaacctaagcacttttgcagccaccattggattagaaaatgatgttgtagatctaatttggagtactgtttacagaagatgatacaaagctttctcctgtagcaggcactatagccgttactgtttatagcggtaagccggtatccgacaaggtgataaggtggactgctccaccattaatgttattactagtagcaaagaatactttgttgacagattaacctacttgcacagaaaacggagctacgaggtggtatgcaatgcaccagaacacgtatgctggatgaatatatatcatgttacctgtgtatcctttattagtttctccctccattctaaaatataaaacattttcagacttcgacgtagtctttaagatagtactagtttaatcaacaatatctacaaaaataagatattttaaataaaaagaattgcatattatgatagtttgtttaatgataaatctagtagcattaattttacgattgatcttttttatatttttgctattaatagtcaaagttaaaaatgtttgatttgacactatgctaaaaatgcttatattttgtgacggagggagtataaactatgtactagttttttttcggtattcaaaatggaactttgttacccatgttgaattattttttcatttttctttttgatattgtaatggttgtatgcgtctgtagttggtgcgcgtacgtgtgcataatgcatgtaccatgtatgtggttacactttatattatatatggatcaatgtcttatgtgcacgtttggattttattgatcattatttttcatggtaacacataagattaaatctacagttattatattgtaatccatctaatcgatgccatctttctagttgttatgagagccctacaggagacgtgtaattagaataggtatttatatactgaatatataatatttgctcgacatataaaaccttagaaatggaaccacatttggtccaaattcgatgaaaggattttgttgtgtttgaaagcaataagacgtacagtactcctatattttttgtgtgcgaatcatgaacagaaaaaatatacgaggcgacaaagcatctattgatctactaccgagttttaaagttgttttcacctaacgacgtcgaagatgggaactgttgcgtcagaaatttagagtcacacttgtgaacttcaagggaaaaaatatactttcgtcaataaatgtatgcatggggtagtcatgggggaagatggatgcatgactgtatggatccgagaagagtgagcaaggatcacgttgaggtccgtccaaagtcgaatggctcagcgctgcagcagctcagatatcagtacgccggcaggttacccattgccgatctgctggcaaccacactagctagcatccagtactatcctttcgatagcatgcacagcatcccgagagacccacaagagtgttcactgttcattaggctgttctctgctcaactgaccacgtgatgtgcacgggacagaattaaaacacaaatgcatgtttattatatgatttatttacgatgttcgatgacatgcctatttcccacagttaaaactgttgagttgtgatccaaatttatttacctttaaaataggccagcttctgttggagcgaaataaaggtatagatcgtaatacattttagggtttcaccttttatatatatatatatatatacatctcgtaagctgccatgcagcgttgtaacatcacctgatatagtgaaaaattttgttggctggcacacgtggttttttctcctgctttcgcagggttttccacgttaaatctcgtgtcttctatgatcgatctattgttttttatcgtttgtttgcctatcgtttcctaacaagtggtatcagagcttattctcatattagggtttcgcgatggcatcgatgaagtatgatctagcgctgctagactacaagatgagattctcgctttggcaagttaagatgcgggctgttctggcgcaatctttggatcttgatgaggcgctggaaagcttcgggaagatgaagaatactgaatggaccactgaggagaagcggaaagatcgtcaagctctgtcgctgatccaacttcatctatctaatgatattttgcaagaagtgttgtaggaaaaaactgctgcagaactttggctcaaactggaatcgatctgtatgtctaaggatctaaccagtaagatgcatatgaagatgaagttgctcaagcacaagttgtaggagagtggttctatgttgaaccacatatcggtcttcatggagatcgttgccgacctagtatcgatggaggtacagtttgatgatgaagatttaggtcctctaatgttatgctcactgcctagttcatatgcaaattttcgtgacacctgttggcaacttttttgacaagttgacaagcacgatcgtagcacctaaagctttgtggtgacagtagaatcgccaatcaccctaatctagcaaacactagattaagatgggttttgatatgctaaattggctagcggagccggtctagatgaaaccatggataactacacgtctcgtgggcaaaacggaaggttttcaggacaaatctacaaagaggtgtcgcactctcgcaacggcggtggacgatttacagcgcaaatcgacaaagatggacaaactaaactagaactagaagcaaaagtaaagaacgattcgattgattgatttttacaatgaacaagccttgtcccttatataggggttggtcttgccctctacaggtcctcctccatgtccaactcgggatagaaaccaaaggaaacccgagacataacttcccaagcaaggaaaactcgagacccaacgaaacagtctcgggctcggactctgccggtcagaccgtccacatgccggtggtctaactggggttcaagccgcggtctgaccggcctatacacggcggtcagaccggcctcccagaggaaacaccggtagatcgtccaactttggcaatttccctattttaatcntaggtgccaaatttgggtgtaaacaacaccatactataaagccgtgatgatctaacccttgcggaagtttatgaggtactccaaaacagggagaagatgaaaggtatggtttagtctcatgcatcgttctccaagggcgaagcattgcagattagtggcagatctgagcagagaacctacaacgacagcaatgatcgtgacaagagccagaacggtagaggccgttcgaagtccagaggtaaaaagttctgtaagtattgcaaaaagaaaaatcacttcattgaagaacgtaggaagctgcagaataaggagaaaaggaaatctgatggtaaggcctctgtcgttaccggtcctgaaaactctgattcaggagattgtcttgtcatttttgctggttgcgttgctggtcatgatgaatggatacttgatactgtatgttcatttcatatctacattaatagagattggtttagttcttacaagtatgtgcagaatggagatgttctgcgtatcggagatgataacccacgtgagattatgggcattgtctccgtttagatcaagacacatgatggcacgacacacacgctgaaagatgtgagacacataccagggatggcgagaaatctcatctctcccagcacacttgatgcagaaggatacaaatactctggttcaggtggagttgtaaaggtataataggtgatatgaattctgctaacttatatgtcctcaggggaagtacattacatagttctgttaccactgctgctgtttctaaaaatgaacctagtaaaactaacctgtggcatatgtgtcttggacgtatgagtgaacttggtatggcagaattgatgaagaggaacctgctgaatggctgcactcagggtaacatgaagttctgtgagcactgtgtttttggtaagcataagagggtaaaattcaatacctcaattcatcgcaccaaaggtatacttgattatgtacaagctgatttgtgggggccttcacgtaagccctctcttagtggtgctcgttatatgcttaccattatcgatgattactctagaaaagtgtggccttatttcctgaaacataaagatgatacttttgttgcttttaaagagtggaaagttacgatagaaaggcaaactaaaaaggaggtaaaagtacttcgcactgacaatggtggtgaattttgtttggatgcttttcatgattactgtaggaaggaaggcatggttaggcatcacaccatctcatgcactccacaacagaatggtgtggctgagcgcatgaacagaaccatcatctccaaagctcgttgtatgctgtccaacgctcacatgaacaagcgtttttgggcagaggccgctaacaccatctgctatttgatcaacaggtcacctactatcccaattagtaagaaaactcccattgacgtatggtttggtatgcctgctgattattcacagatgagagtttttggatgcactgcttatgctcatgttgataatggaaaattagagcctagagttattaagtttttgttccttggttatggttcaggagtaaaaggatacaagctatggaatcctgaaactaataaggccttcatgagcagaagtgttgttttcaatgaatctgttatatttaatgacagcttgtctacagatgtcataccaggtggttctgatgaggagcagcaatatgttagcatgcaggtggagcacgtggatgatcaggaaactaaaattgttgataataatgttcatgatactgttcagcactcacctcctgttttgtagccacaagatgaacctattgcacatcgcagaacaaagaggagttatggagctccaatccgtcttattgaggaatgtgatatggtttattatacttttagttgtggtgaacaggtggagaatattcttgagccggctacatacactgaagatgttttttttgcggggatacacttaagatgttgtttcttgtgatcgtgagaagtggatctaagctatgcaggaggagatgcagtctcttgagaagaattacacatgggagcttgtgcacttgccaaaatagaagaaaactgtccgttgtaaatggatcttcaagaaaaaggagggtttatctctcagcgagcctccgagagttaaggcaaggttagtagcaaaaggtttcagtcagattgctggtgttgtttataatgatgtgttctctcgtaaagaatagttcaattcgcacattctctagtattgtttgtatgcatgatcttgagcttgagcagttagatgtgaagacagcattttcacatggagagcttgaggaggaaatatacatggaccagccagaagggttcatagtaccttctaagcaggattatgtttgtaagttgaaaagatccttatatggtttgaaacagtctcctcgtcaatagtataaaaggtttggttcatttatattgtcacatggctttaagagatctgaatttgatagctgtgtgtacattaaatttgttaatggagcacctatatacttgttgttatatgttgatgatatgctgattgctgcccagagcaaggaagaaatcagtacattgaagaaaccaactgagtagtgagtttcatataaaggatcttggtgctgctaagaaaattctagatatggaaatcactagagacagaaattctggtttattatttcttagtcagcaaagttacattaagaatgttcttcagcgttttaacatgcatgatacaaagcctgttagtactcctactgcacttcattttaaatcatcagctttacaatgtgctagtactgatgaggatgtagaatacatgtcaagagttccatattctagtgcggttggttttttgatgtttggcatggtttgctcccgtccagatttatctcatgctatgagtttggttagtagatacatggctaatcctgacaaagaacattggaaagctgttcagtggatttttaggtacgtcagaggcacaactggtacttgcttgaagtttgtcagaactgataaggggcttgttggctatgtggattcagattttaatgccgatttggataagacaaggtcactcacaggttaggtgtttactattggcagttgtgctgtgagttggaaggcaacattgcagcctgttgttgctcagtctaccactaaagtagaatacagggctattactgaagcatataaatattcagtttggctgaaaggattgtttttgctgagctttgtggagttgattcttgcattaacatgttttgcgacagtcaaagtgccatatacctcactaaagatcagatgttttataagaggacaaagcacattgatatcaagtaccattatgttcgtgatgtagtcgcgcaaggtaagcttaaggtatgcaagacaagcactcatgataatcatgcttgtcggtgatataggcctgggggtatgcgaaatacgggggagttaccttcccgtccagccacgaggccctacagcctggccctccccccacacctcggaagacgtagaggcagccagggggcctcggggtgccacgtcacgcccctcgggccctcgcgctacctcgccccgaggccctcgcccagctaccacatggcgaggggagcgagtgcggcggagactcaggctgaaccgccatcaatgcgcggcgccccaaccgtccctcaccgcatttaatgtagtaagggcggacgtgcggtgctgcccgattgacccacgtcaatttggcgtgattagactgtgatcggcctgtcgccagtcacatccgatcggacgggcggccgtgcccccacgttccaccctgtacccggcggagtgggggcaggtatgccccgtcccattgaagcgtcatccagagctccacccacgtgagaaggactgccacaagtcttcattcatttaagagggaatgacagggctgtcccccgtgtcaggcggcgggcagcgctgggccctactcgaggatggacggctgcttagcttccgggcgaaggcacggatcgtggtctggtctaggtagagtgggtccccctcccgtgaaagagtaggtagaggtggtgcatgtggtatccccttgaactataaaaggagaaccttgcccgccgagaaaggggacgactctcagtaagcttagacccgaggagaggaagagcgagagtggtccctggagtttaggaacctttgtaacactcaaccataaatcacacgcaggagtagggtattacgcttgatagcggcccgaacctgtataatcttggcacccgcacgcggtctcaaagatctccaggcggatacacgatctcgacaagcgtgccttttccccccggccgaactcacaaaagggggatctcacgatcacccgctagagaggatccgtcctcgacaatgctgatatgatgacaaagcctgttcctgttgctaagtttgagctttgctcaagctaagttggtagagtggtttagcccaagaggctatttggcaccgaaagtgtttttgtctttgttgtgttcagggtaaaggattgattcatgctgcaagaaggaatttgtctcaaggtgtagtttgctgggttgtgatccaaattcatttgcacttaataaatgcacttaataaaggccagcttctgccggagcgaagtgaaggtacggattgtaatacattttagggtttcacctcatatatatatttacatcttataagccgccatgcggcgttataacctcaccccgatatagtggagatattttgctggctggtgcccgtggttttttctctcctgctttggaatggttttccatgttaaatcttatgttttctatgattgatctatcttttatttgcctatcgtctcctaacgaaaacaaatcgactcatatgatgtgattaacgactatatgcagacaggctaccgcatatatagcagataatgacatatatttcatgcaccaatgagctagttagtagctacgggcttccacaacacattgttacattgctgatccatacatcgatcccaaagctagctagctcaccttcagaaactacaactcctcccggccggactctgttggtgcgagctaggcagcagctcaggctcagcccctttatttattcagatgagcaactacgtacacaacactgctctgcatgtcgatcgccatgatcagtgattttattgaaaggcagctaagctgaaaagccctgtacgccgagaggcatacaaagcagaaaacgctcatggcgacgatcgactcatcgatctacacaagctcagccactgactcgatgatcccttcgaaagagacgctctggttgttagccaggatggccgccatgccgtcgccacccttgtagcagccgccgctctggcagccggagccgcagtagttgccgccgaggccgcagtagccgccggcactgcagcagaagttgttggggcacttgtccccgccggcctgcttgccgcaccgcttctccgggcagcacgcgccgctctggcatccgttgccgcagaactcgctgccgaggccgcagtatccccactggctgcagcacatgttgttggggcagagctcgccgttggcgttgcggccgcacttgatgtcggcgcggcacggcccgttctggcacccggagccgcagtactcggagccgaagccgcagtagccgtactggctgcagcactggttgttggagcaggtggcgccgccgccctggctgccgcagcgctggctggagcagcaggcgccgctctggcaccccgtgccgcagtagtcgcggccgaggccgcagtacccgaactggctgcagcacaggttgtgcgggcagatcatgccgtcgttctgcttcccgcacgtctgcgcgttcgtcgccgcgacggcggcggcggcgaggaccgccgccgccatcgccatggccttcgtcgtcgtcgacgtcatggtcatcgtacgtctcttccttgcagctccgttcttggtactggatagttagcaaaatgtagctcgatgagtgcctgagtggagtagctgagagtgaggcctctttatatatacaggcggcgagagatgagacgatgaaattaatcgatggatagctaccacgtgtaagatcgatcgatgagctgcaggggggccgggttgcacatcacatgcgagcttgactgctcgtgatttcatgtggtatattctacggctgcagcgaggcatatccgttgcgttacgtggcgttcatgcgtgatcaaagtcagacaacgcctacgattgtggatcggatgcaccgagatccatgacaacgtgtttcttgtgtctctttgcatgcatctccatgcaacggtgtcggttttctgcgtgcatgccattcatgagcatatattttattatattaagtctgccagtgtatttatgaaacttcatttgatttcattttatagtagtatagtatagccaactactagcttcaatttatttataactaaactaatagcttattaataaaactaggaagttagcccgcgcattcgcgcgggcgggcatcataggctacggttgagacacttatgagtgcggaatactaatcaaagaatatctggcatgcttcaaaagtataatttctccataaattttcttctcagcattgcttaggtaaaatttctaacctattagttagttgtttcaattatctaacgcaattgttatggcagtagccttttcaatctaagtgaaatgtaagaagcaaaattttctaacttttttctccaattggttagatttactctctaataatatttttctattttatttaatacaactgcaaatataagttcaaaatttgtgatattatgaataatgatagagcattacacctttcatctcaactttgagaaaatttcaatcacccttggtgatatattaagtagttaagactgatgtgggtcctcattctttattaacaataaacacatgaattggatggtatggatttcttcaataagattccgtgctgtgaaacacatctatgaatgtatcatgtagagtatgcggggcttcacgcaccgatcgtaaacacaatcgtacaactaaatatatctaactgtgcatgcatcattatattggaatgtaatgtattacatgcttctatgatttgtttggttactattgatttagtttagctatatatgtttatagagtgacttataatgatataatatatgctggcaattttttttctcgtatttcattgctatttggatgacatgcaaagtgcatgggtcaactgtggatcgtgatgtgcacatgtgaggggagcagaatgtgaaggggactttgcgtttctaatttttagtatacgagtgaaaactaatgattaggtgctttattttttcttagtttgacggtttaaggttttcctcaaaatatatctaattgctgaaaataattgatcgctcgaaaatgattagaaaatagatgtagtaagtgaaaactgatgctaagatgattttcttttaatcttttcttagattttttttctaatttaacgtgagatgtcttaagagttatttagatggtttttaatgtatctttattacatataatgatttaagattatatatgtaacctttttttgttaatcattcactgttatttggttgtcgtataaaggataaggatctgtgatgtaattcatttttatatactatggtaatatagatctggatttatttatttaattataaataatataccagtttaaaccaatcgaatgttatatattagtttccatgcaaattaaggatatggatctataatttattccaaattttgtatagtaaaatatgagtaatatgagtattggattatttagctaccaaattataaattagtagttcaaatgaataaaaaattagatcgattgtttttatattaatgtgttagttagaaaataggaaaaaagagatcaactgaaaagtagagaggtactcaggagaatcgcatatatgcatgcatacgtacggcagtcgacaggaggatacgtacatgcgtttgttttgtttgcagatgtattcaatcggtccactatcaggacaaatagaggaagagcgtgtatatgtttaggtgggctggtgtgggagaggaaaaggacgcgaattgtggagtctttttaaggataaatctaatattctatgggtccaccagtttattttattagattgccacttgtcagtttaggagcgtttataggagaccatgtggtggcttgagagcgtttataggaagtttaatagactttcagtatataatagatgatagatagttacctataaacatatcttaaaacattaatatatggtcccacctcccatacactcataatgtattggagtccgtgctaagctggctgtaaatttatagctcgctttccttctctatcttgtcatctctcctccacatgtgcttacagctgacttgtagcctactattgtactcgctctaaacccatgcaagtaaaatcagtattagagctatccttacaattaatacgtttcttacaaaccgagctaatctagtcttgagttatttccccaactttcggaactcatattcctcgagttccacgcgcatgtttttttaaacggctaaccattgagttttttttaaaaaaactttctatacgaaagttgtttaaaaaaatcatattgatccattttttaaaaaaattagctaataattaattaatcacgcgctaattaatagaccgctttgtttttcgtgcgccgaaaatatgttcccaacactagaaaacaaacacagcctatgagtttatttgttttaaccgtaggaaataggcatatcaaacatcgtaaataactcatataataacctgcatttgtgttttgtgtccggtgcacatcacacgtggtcagttgagcagagaagcctaatgaactgtgaacactcttgtgggtctctcgggatgctacgctgtccaaaggatagagtactgggtgctagctagtggttgccagcagctcggcaatgcgcaacctgccggcaataagcagttgcagcgctgagccatggtgactttggacggatctcaacgtgatccttgatcacttctcggatccatacaatcatgcatcaactcccccataaccccatacatttattgaagaaagtatattttttcccttgaagttcacaaagtgactctaaaaattatttctgactcaaacagttcccatcctcgacggtgttaggtgaaaacaactttaaaactcgttagtacatagatgctttgtcgcctcttatattttctgttcatgaatcacacacaaaaaaaaaatgagtacgtcttattgccttcaaacacaacaaaatcctttcatcaaacttggaccaaatgttgttgcatttctaaggttttatatgtcgagcaaatagtatatattcactatataaatacctattctatctaattacacgtctcctagggctctcataataactataaagatctgggcatcgattagatggactataatataataactgtagatttaatcttatgtgtttccatgaaaaatagtgatcaataaaatccaaacgtgaacatgagagattgatccatatataatataaagtgtaatcacatacatgatacatgcattatgcccacgtacgcgcaccaactacagacgcatacaaccattacaatatatatcaaaaataaaaaagaacaaataattcaaacatgggtaacaaagttccattttgaaattaccaacaaagaaaaaaaactatataggagtagtttatactaatcaaggatagataacatgatattcatccaacatatgtgttctggtgcattgcataccacgtcgcagctccgttttctgtgcatgtaggttaatctgccaacaaagtattctttgctagtagtattaatggtggagcagtccatcttatcaccttactatgtgtttaccgctataaacagtaaccgctatatagtgcctgctacaggagaaaactttgtatggtcttctgtaaacagtattccaaaagatctacaccatcaatttctaaggttgtgtatagatccagaggtaaatttttttaccgtgtcacataggatacatagacacacatttgaagcattaaacgtagtttaataataaaacaaactgctgaatctgcctgtaaactgcgagacgaatttattaaacctaattaatccgtcattagcaaatgtttactgtagcaccacattatcaaatcatgtaactattaggcttaaaagattcatctcgtaatttacacgcaatctgttaattagtttttttttctatatttaatacttcatacatgtccttagcgatactttttatgtcttcactccagtgaaacgctcgctttatggaagaaggtcatgattgacatgtgggccgggcaaacttattcagttttgttttattcacttggctgactggattgcactaggaccaaaaccactagtactttatatggtgtttagcggtaattcaccttgtctaaaaagtttagtggcgaatatcagttaattaaggggttaaattggaatgcaatgcaaaatcactatttagcgactagctagccttgtgtctaggggtggatagcaagccagcttggctcggttcggtaaagctctttaggataacgagctggctcggctcagcttgttatcccaacaagctaaaaacccagctatgtgcttcaacttcgggaattccagtagtacatctcttggatatttgttagatatttatggtcaaagcaactggctccacagggaagatctgtctgaattcactacaacagatgatgtcaaggatctctaaggcaggcaagtgcgagtctggagcaggccactataatggaagcacaaacatgagccttgggcatgagtgcaggtgtatactccatagctttgcaaaggagaccatgtcccaaccaggacttgttcttcctctgctccaaatacaagttgccatcatgagctcagatgctgaaaaggcctccagtgctcggaaggtatccaaaacataatctggggagaagattgtgcctaatttgcagaatctctccgcttgacacatccttagacgagaccttcctgttgctcttgtcaacgttagtctttcagggataactttggagattgaagaattgtcatgcgtttgcaatgactcaacatagtccatcacaaatgctatagcgttgattacctgtggactgactgcattgacataactttctattccctccccaatctccacatgaagatcttgtggcttaagctgtggtgcataaatgccactgtagttagaagtttttcctcaatgttgacatcactatagctatagtaagtcttgatgattgatgacctttgtgaagctgatccgacaatatgttgagtacttgagtgctagaagggcccattatccccttgttttgagttgtatctttgagggcaggagagatgcggcctctcccctctacccgtcggcgcctctccacttccgaacgctgcttgacctctcccatattccccgccccggcgatgatatcctatcgcatctcccctcccactgccaggagctccgcggcagctatgcaaatcgagtggcaagctccacattgggcagagcggtgatggcagcgacatcctctccccttccccatcccacggtgacgagctcggtgcagttgccacatctagcccggtgtgaggcggtgggggcgaagttggagctcggtggtgcatatcgggtcggcgggttgacgagctacttggcggcggcaaggagcgggggctgcagccaacatcgagcgttgagctatttcgcagcggtcaaggagggtttgttcccgttctcctcctccttgctgcttcttccgatccggcgaccttggtggtggatgtgctcagagcggcgtccttgacggtggagcagctgcgcgtggtgagggactaggcatggcgaggggcgggggagctgctttcgaggaccgatctatgatttcatgtactatgctactcccttttctagtttttgcaggcgaggaactcgccccttagttgagggacgagaacctctacaaaggtctaggggcccacaccctctctcccccatggcatcaagtagcctacgtggcgcaatgaatccacgcgacatggtggtgcactgtgaacggcctaaatagaatatacacatgattttgcttgaaattgatcgtttagagacacctagctacagaaagaaaaccatacaaatcttggatgaggttgcctttccacaatgcacaaggtaaagttcaatataagattttaccttacagttaaaattgtcaataattgccgatggctaacaatgaatgactttgggaagagccctaggtttaccatctccatatgttccgttggtgttgacatcgctcttataagccactatatgctctatttgggcttaagaagattccatggtattgtcagtagtcatatacgcgtttcattagtccatctctaggaaataagttttcataagatttcattctatgggattctagaaaaactctccgttccatatatcacacccatttgaagaggatatcttctcatagttagaaaatctagaatactagaccaaagtacaaatattttgcctcctaaacatacacatcacttgctagcagtacctatggaatttcgaccatcgccatccctatggatctactccctccatcccattttaagtgaagccataagtttccatgtctaaatttgattgtccgtcttatttgaaatttttttatgattcgtatttttgttgttattatatgataaaacatgcatagcactttatgcatgacttatgctttttttattttttttaaaaaaaaattcaaagaagatggacaattaaagttggatacgaaaactcatggctgcacttaaaatgagacggaggtagtactatggtaccaatattatgtttggggttcctctccctctgctttggcaaccgggtgatggtgagctcaaacaggccaagaatcctaatttgtgcgtgcgcgctggcagcgcgcactctcggcccatacggcccacgcggcgcgcgcgtgcaattttttcttcgctaaccaccaccattttcttttttttcgctttcttttttttccgtgatttttttcgctttcctttttttttttgcgttttttcctgattactttttaatcttccagcagcaagtgttttcaattttttttgttgaaagatgaattaaaaattttcaaatctcgagttgaaagttttcaaatccgagttgaaagtttttaaatccgagttgaaagttttcaaatttcgagttgaaagttttcaaatccgagttgaaagttttcaaatcttgagttgaaagttttcaaatctgggttgatagttttcaaatctgggttgaaagttttcaaagttgagttgaaagtttttcaaatttgacttaaaaaaatttaaatttcgagttgaaagttttcaaatctaggtttaaaattttgaaactggacttcatatgtagatttctttttaatttgttagttaaaaaaatcttatctactaccatcattatcctaaattgttattatctaatatactagtagattagtataactacttaggccgaaaaaacgagcgtcagccagctagccatgccctagacaggctcggtgttaatggcaaactggttccatttatcaaatctataagagacttatagatacactaattagtgtagctagaagataattcactgagttttgaatatgtgtagctgacaagcgacaagtgaatctcaatcaagcaatcgattgaaatatagctgaaatcctctatatattttcaactcacagtgaatgacagatgggcccctcttatcagtaaaagagaccttatacctagcaacatttttggcctgcagataagcagcagagagaaggaatctttcatgtcgcaccatctatcatcattattgcaaggataagataagtagagaaaaactccaaacgcaatgagagatgagacatgagagattagccacgcttggtccccatgcaaagcacaatcgtccttgcgcgctctaatcatgcatgttactagctatagcctctatcaattaaacaaacaccgatcagaaaagaaaaggggatcatgatatttaaacaaagctagcagctagcagcagtagaaacaagaacaaaaacaaacgtctcgatccaggacaggaatgaaatctatcaatccatcggacatatcattcaggcctgggcatcgatcgatcgactgatcatcctcgtcgtctatctcgttggattcatgctactaatattattcagagctttgctccatcactattctttcagagtttcagacaacagcaggtgatgcagtacagttaattaacgatgtaatagcttaggcatcagtgcagttgtatactccgcagcttttttgcatttcagtatacaagctagtatgcaagacattcttttttgcacttcagtagatatacaagtgcaaacaaatttcgacgtttcttacccttcgtctaccttgttctccagtatagctttgtacttaataacgtactccctccggttctataattcctgatattttgaacaatgatatggtctcccaaatatatcattaactttgtttttattataatatataatgcatgtttacttttcttacaacactttgaatgacaaatctatatatgttgttatagttcctttaaacaaaataattttaaagttattgataatcaaagttacaaaagtttgatctcaatattgtccaaaacgttaagaaatatgaaaccggagcgagtattatacaacccctactacagagtactccaacagggttgtataatctaaaagtaaagtggagatactgagatttaggctctgttcggcaacttgggttgggaacccatgtcccccgcacgaaaaacagagaggtccattagcgcgtaattaattaagtattagctattttttttcaaaaatggatcaatatgattttttaagcaattttcgtatagaaactttttgcaaagaaacacaccatttattagtttgaaaaacacgcgcgcggcaaacgagaaggggagttgggaaccggggcaacaaacaaagccttttattttgcatcacaagttttcgcaaaccacttctattttgcaaacatgccaacactacgtgttggattttaaaatggtttcgcaaccaatttttccacatcgacaaacaagtttggtgtgagtgggatcattggtactaagcccgagagcatggcttccgtggaaccacggggtgaagcatcatcaacatcctacatgagtaatgcaattattgggtagatctgtcggttcgtcacacgaaccgaggccagtcaagttaacatgcacactagcaatgcaattttgcaataagacattttggaaagtagaagcaatatgatcaaatggtaacttacatctgtcctcatctttaaaatctttaaaaatcctcatccaaaataaattctgttgtagtcaactattcgcaaaagagaaaaaccaagcaaactactaaaatgaaaatagtattattaataactactagtccattaggtagatctcaatttagaaaaaaaataaagacttgaacggagtagatcagagttacggataggaaattatgaattttttaatttaaaaataatttctagatttaaaatgggatttatttaaaactggaaaggaacatgtgtcctcaccttagagagggttttttggctttaatgaagatagttttgggcgcaacgtcttgctcatgctgattgtgcagattggatcttgcgaaggttatggtatagttactatcaatctatgtctaagtttccatgttcgaaaatgaatagtaattggcgtcaatcatttggaaacgattatggagcgctcctttttttacaagacatttctgaatgaacatttaaatggaagaacaaaaacgagccccacttgtgcagatggattctaatcactcaggtggatgtccacccgtttattgcatgtcaactaaatgattgaaaaaaattcaaaaaaaattgacaaggtagatttatatgaatagagttgaattcaactgtgagtatatgtatactaattagagttaaaaatttgttatttttgttacaacttgtagaagttgaatttaatgtcgcttgtttgtggcgtgacatattacatatcaatctatcttgtcattttttttgaaatttttgaaaagagggtattttaaggggaactatttaatttgctgatctgcaagaaggaatttgatgtagctagtagctactgaacttgtgttgaagatatgcattggtctttgctcttttgttcttcgcttgagcctggagctaacgaataaagatgaaagctaggaaatgtactcttgccacacacacccaaagaaaaggtgaatccattaacttatcgatgatcaaatggttcagatcagtaacttcttcatcgttagacactgagggcttgttcggatcacaggataggaaaaacataggaataggaaaaacacatgaataatataggattgcatatgcaaaacgtaggattgaaaaacaaaggaatttgatggtaataagcattcggaacactacaagaaacttgttaatccatgacgaattctcggtgacggatttacagatcgtcactgacaaacgtaatccgtgacaatattttgttttttgtcacggatgagcccagtggatattcatggcacactaactcgtgacagttttatcaggactgtcacaatgtatgattttaaattcgtcatactctaggtagcccaaaacaataaaaaaataaaacatatttagcgcaaagaaaaataaaaaatgtgattgcaagaagaatcaaacccaaaatacgatttgttaaatttgaacaaaatagttttgttaatatgttatatgtatatgatgcataatatggcaaactaaaaaaatatggtgcgcatgggtaaaaatctgcaacatgtgggatttgaacccacactaagctgaaggtaggaatgtgtcttaccatttgaaccacttgttctattggtcccaatgtgtacttaaaatatttttatttgccttttatttgtcccaatgtcactcgagttggcccaggatgttgcccatagcgtggcccagcaactcagagttggcgtttcaaaaaggaaaaaagaactcgaattggtaaaatagaagttcaaaaaggaaatattttttaaatattctacgtgatctaaattattctttgaaatttaccgtgaattttcgaagctcaataactaattttaataccacaaagttcatttactctattaaaataaatagaaaacaaattaaaatttctctctctgcacttgggccttttttggctcaagtattaaaatagaaaacaacttttgttttggtcattttgttatatgactttgtttcaataaattgaatttgaatttcaaattatgacaacttcaaacaacattttcaaatactaaatgatttcaactgaaaaagttatcaacaacaaaattgtatagttcattaatatctataacttttattttggtcatttctttatccgacaaagtgatattaatattgttcacaaattttacatatgtctcttatagtttatgaaaccatatgggagatgtgtaaattttgtgaacaatgttactatcactttattggatgaagaaatggctaaaataaaagttatagatattgataagttatacaactttgttgttgatgatattttcagttgaaatcatttagtatttgaaaatgttatttgaagttgtcataatttgaaattggaattcaaattattgaaacaaagtcatatagcaaaatgaccaaaacaaaatttgtaggtattgatgagctatacaactttgttgttgatgactttttcagttaaaatcatttagtatttgaaaatattatttgaagttgtcataatttgaaattgaaattcaaattattgaaacaaagtcatatagcaaaatgaccaaaacaaaagttatagatcttgataagttatacaactttgtttttaataattttttcacataaattcatttaatatgataaaattcgattcaaagttttaatactttgaaatttccaggttaaatgaccattttgtccaagtaacttgtataataggttttcagataccagggttattctagtaaaatcgcatcaaaattgctactcccctcaaccctagccgattccaaatctgagtccaaatctctttccgcaaaccctcgcgctcgcggctctgatccagcgcttgccaacagctgcgtcggcctcggcctcctcggcggcggcggcgacgggcgtgggtggggtggagcctgctgtgacgctcgaccaggtgccgcggtggagcgaccccgaccagcgcctctcctcctccttttcccgcaccgccgccggattcgacgagagccccgcctcgtccttcctctcgttcaccgacgacggcacgaccgatgtggtcgggggccgtggcgtgtcgcggttccccgtcgaccacgagatcaactcgaagatccacccgtggaaccttgaggtcgatttccacccgtggattctagcatgctttcccctactgatctacattctgtacttgtaatttgtatatgtagttcttttctctacaaattgacattcagatcaaaacattgtaacaaacatgcatgctaggaacacttcatttgtgcacttctgctgggagaggcagctaggattatcagtttattaccaaatatagtgcatctaataagacaccatatgaagtaataaattaaacatattgcttatcatttgttgccttctgcttgtacatgtgtttttttaggtaaatctgcttgtacatgtgtagaagcatcacatgatttctgccgtataggaagttaggaactgtctatatactcagtggaacggactattaattagtataccatgctatcatccatgaccaatattctcatctttatggtcatgcatacaaatctatatgtttaagtactatatgcctatatgcctatagtccgtagaaatgaagcatgcataggaagttactcgtatcataactttagtgtctaaatttagtgctatgctcctatgcattctagttcactttcctgtaccactttacttgctctcatattttttttggtttagtctagcgtcagttgcttgtttgcttggccaatgaaatgaggtgggttggggatagggacattgagttctgttagcgcaatatattatggggacacagattggtgttgcaaagtagccctatcattcaaaaactaatatcttgtctgtagattgtttcttgttgtttctctagctcataaaaaaaaatctaacatttggtattgtactatcaggttgctgggctgaaactttgatggagtggccaaaatgctttggtggctgctgggaattgtcatgtgcttttgaacaggttttaattatgttgtatgagatatgctaaaaaaatgttgtatgagatgtgaaggttgtaatgtgtttttagaatatttatgtgccgctgatgatgagagaatgtaaattgatgataggtaattgattttgctaaaattatggatgaaatatttgtattttgctaaatttagcatcagccgaattttagttgggctgaaatattgcagtagcccaatttgaactgggctgaatgataattaaaaggccgtaaaaacaccacaaaaaaacaaagtggcccaaaacaaaaaaaatccagttggtcataaatgggccgaaagctccaggaacccgaattggaccaaaaacacatgggctaaatcntacgtggcatcaatgacacatcattgtccaccttggcgaacatgtggcacatacgtggtgattcgaatccgtgatcctacgtggcagataatctgtgacggaaaaacatcctatgtgtcagctatccgtgacggttatttttcgtcacaggaaatgggcttggctggactaactaggcctcgggctctatcgtgacggtttaaaaccgtcaccgattctgttaatctgtgatggttttcgacaaaccgtcacgcaagtcaatccatgacgctcaatccgtgatgatttctgaaaccatcatagatgttgtttggtgacgatttttcagtgatccgtgacggaaattttccatcacggatcaacaagattcttgtagtggaatacaggaatatataaaccataggaattttctaattaatattgatctcatatattatagtataattatagtataattaagcaataaaatattagttcccatctagtcactccaacgtgattagcatctaccctgtggtagctaatgataaaaatgaagtgtgagtggatgttcagaatcccgtgaaattcttgcattttcacagggttgctacagtattcgtacaaaattcctacgcgtgcttcctatgaaccgaatgcatgaacatagccaaatccaaaggatttgccaatcctaaaaaaaatcctgtgtaatccctccattccgaaaaaaccctgaagttgtaaagaaatttaattactctcaataaggaggtgtttatattcggtcggtcatgtgctttttagtttgagaggatgttggattgaaaattatcaaatactactcctttcatttaatttaaatgtagagggaaaaacattttccgcacaaaacgtttacacatatctgttaaaaaaaaagctcttgcttttataatagtaggtagttcattattctcacttggtaatacgatataaattcttgagaagcaccattagagcgaactaggaaggtaggcaggtagcccgcacattcgcacgggcatgtaccgtatgtaggatagatttgagaaacttataagggtggtatactagcgaaccaatacctgcaacgattcaaaattgtgattttttcatgaattttcttcattaccattgcatgacaaatttaattggtatttataaaataacatactggaaattggggttggtaacttatggtatctaaatggtacctaagacacataactcttgaagttccataagaaaagagagaaaacttaagttataaaagacattacatatagaaccatatataattaatagctctaccgatttatgtagaaaaatcgacaattaatttattatttgatggataattcctcataggaaattatgaatatgtgtaaagtatagggatacaaattagagaaaatagtggaagttacgaaaaaaaatctgacctttggatatttagatgatctaatatattgtgcacattccaactaaccaatattcgccttccctcaccacagatggtggacatgccaattcgtgcctctagtagcatgctcgcatcattatatcgagaagacaaaaaagtgtcttgcatgtataggcataatatatgtaactatctcatgcccctcttttcatccaagaaaaaaattatatacccagcatgcatgtacactgggatgcacctggctagccccccaatttgtttactccatggatctaatgattagataatttaataaaaaacatacaattaagtatctgaaataaatttttattagtacaatatccataaggacaccccctgtagaccccccctcttcccttcttcttttcttggtgaattatttaatttaatgtccaacttccatggtattaaggtttcccaaccatcagcaccgaacatagcctaagattgttcatttacccataaaaaatcatatctttatgaaagcataaagcatcaggattaagtaaatagcctccacatacatgttgagagatataattaagttggttgagagtcaataggtccattgatgctataattatggttaacacggtttataggtatgggtccattgattttattaaaacaaataaggtggatattttgacttttagtgagatttttttaggatttctttaagtatacaatggttcaaacagatcataaattgaatatataatttaatattcacaactaatgaagattctttatttatttataaaacataccaagatcaacatgcatgagggatattatcttgtccatatttgcaagtgcatgcagtctttggagtgcgatgaaattaagttagtaatatagaagatattagatacccgtaagcctttacttaatttccatagagaaaaaagggaacacaacaaggaaaaagcttgcttgcccttttcatgcttgtggatggaaaaatgtccggccgttgggcaaactcgtccggtctgatggtttttaagttctttttttttaaaaataaatgtaccggtttttgatggtaaaaaattttgggtcccccaattaattaaacccaaggtctttttttttccttaaattttttaggatttacctaaagccccccttgtctttttaaaagcgttttaccttatttaagggctttttagtttttattattggatggatggatttatttttttaggctggggaaattaactttgtaatatatacggccattttaaaggtttggtcctttttgggtggtcaaccaaagaaaaatgatctatattcaaagttaggaaagtgtttttcttatatatagatttgatgggttcaccggtttaaaccatccaaatacgtaaactaatagttggtgtacatgtcggagttatacttttttctatgacaaagtctctcgaccccaatatataaacttctagtaagtggggacaactctcttgttaaatttgttccaacgtcgtcggcgcaagtgtggcgccagctttgtggttctggtcatgtctgatccatgcttgcaagggagagtccttctctgccatggaggatgccggaaaccccacaaccgactccaagttggcagtggtgctcttcgtctagagtcacaaaaacggaacgagaacgatgctcctcaaaggcttctcccggcgggtaaagacagagaagtgcggcgaggaatttgtcgactcagtagtatagccccgatcgagagatggttttgacctcagtgcggggggtagaggtgagattgaagttgccgagtactcgctttatttagctgtcgcagcgcccctgtaagttcgaaaaaagctgcctcaacataggcagctatgtgcttaggcggtggggcttataattgtagtaaaaacggtggcgacaccgatcagctgtatgacccactgtagtgcaaatctggcacacagggttctcagtagacttatcagtatcagtgaagtcataagtattggtacgcccccctgtctaacttagtagctgacacagcattgttccaagatgcaagaaattattttctttacacttcagtatacaagcgcaaacatattttgacgtttcttacccttcttctaccttgatctctagtaaagcttcatgcttaataatgtactcactctggttccataattcttgacattttcgacaatgatacggtcaccaaaatatatcttttactatgtttttattataatatatagtgcatgtttacttttcttatattactttgaaggacaaatctatatgtgctgttctagttcctttaaagaaaatacttttaaagttattaataatcaaagttacaattgtttgacctcaatcttgtccaaaacgtcaagaaatataaaagcggatggagtattatacaacccctacagccttgctacagagtagtctgacgaggttgtataatctaatagtaaagtagagactctgagatttaggatgagactctctttcttataccaatccttggaatcggtccatatatgcgagtacaaagggtctcgctttatatcgcaagttttcgcaaaccacttttattttgcgaacatgcaaacactacgtgttggattttaaaatggtttcacaacccattttcccgcatcgacaaacaaatttggtgtgagtgggaccattggtactacgcctgaaagcgacaaagggttggggttatcaacatcctacagtagtaatgcatatattgggtacatctgttgatttgtcacatgaacaaaggccagtcaaattaacatacgcactagcaatgtaatttcgcaaagaaaccattttggaaagtagaagcaatatgatcacatggtaacttacttctgtcctcatcttcaaaatcttcaaaaatcctcatccaaaataaattccgtcggtgtcaactatgcgcaaaacagaaaaaaccaaataaactcctaaaaagaaaatattattattaatataactactagggccatttggtagatctcaattcagaaaaaataaagacttgaacggagtagatcagagtcatggatagaaaattatgaatttttgaagttaaaaaataatttatagatttgaaaaaggatttatttaaaactggaaaagaacatgtgtcctcaccttagagaggttttttttggctttaatgaagatagtcttgggtatgacgtcttcctcatgctgattgtgcagattggatgttgtgaaagttgtgatgtattactatcaatctatgtctagtttccatgttagaatattcaaatggaagaaaaaaaatgagccccacatgtggagatggattttaattacttggatgaatgtccacccggattttacatatcaactaaatgattatgaaaacaattcaaaaaatcgacaaagtagattaatatgaaatatatcactccacagacatcggctcggctcgtttaaaagcttgagctagctcgttaagctcgcaagccaaaccatccaaaaaagctaccattattgcccctagctctcaggaacaaccaacatcaagcatgcataatgatagtatgataaattgttacatgaaaatatcaaagcaacaaatcacattcacatataagtaatctaccaaaagtctaggattaaacacatttcacaagtacataaaccacagtcacaataacacatactgagttactgacatacatcatcagttcatcacatattgacatcacattatcacatattcatagtccacagtccacactcacaagttacaagacataggcagccacatgcacacagtccaaactcgcaattaactttgaaatagttcaacaaaagattgtaattaaacataggtttagtccagtacaaatgtacaataatccatacttcaagttcaatagttcaatacaccaatatttagcataagtgcgtaactagtaaagctgcagcctgcaaggttcatcattttcatccaacacaattgcacataaacacaaaacacaaatagcctggcagctccctttccctcatagtcccacactccctttctcccatagggtgtaggcttgtagcctgcaggtaaacagattgtagagtatgatataaatgggtgaaagtcagaaacttattagatgaatataaattgtccttactagttgcttgccaccacacaattggggaagtccactatttcgatgccatcatctccattttttccctgtcaaaacagtccaaagtgaacaatttatataaaagacttgacacaaataaagaagcaaaaataatcattacattacataccacactattgtcattttgagaggctcttatccagcttgaagcacaaaccaaagcctgaactgcttctggcttcaaagaactccggtagtcatcaagaattcttcccctagtgctaaaagtggactctgatgacaaactgctagctggaacagccaagaacctctttgccatgttggacacaacaggaaacctttggtcatttaccttccaataattgagtaagttgaaagtgctatcatcgagggacacatttggttcatctagatagatgactaactcagactttgaggattctttagcatttgactgcaaaaaggactagaatcgacttggaataattgaagccaatgaggtggttgtagagcttgaggatgaggccgagcgaccattgtgtgggctgttcccaccttggttgtggcgacatgtcacctcataatttttgcagagtttttccatctcatcaactatggcagcaacctctgttacacaccttgtctcatgaaaaagttcactgaagcaccatttgatgtacctcatttagaacctagggtcaaggattgtagcaatggtgatgatattgtttgtgttctcccaatatttattgaatttttcaaacattgcattagccatagtcaccagcaatacaacattaggatcaggttcataatgtccagactgttgccgtaaccttgcagcttctaacagtgcagattatgcttgtgctctagatgctaatattgcaatcttaactttagctatgtatggatagaaaatattggcagtggggtaggttgatagtggggtaggttgatcctgaaaatgcagtggttgcactagacattgttcctaagattagctgaattttctcaaacaaatcccattcagattgtataggtagccactcatatttggtgtctgattcagcataataatgaaaagcatttctatactcaatgcatgtctgtagcatccgataggtcgaactccaacttgttttaacatcaatagacaaccctctaccaactttaattgagtaagtgttgcacacacccacaaatttatacatacaggctagagacttcttaaagtacttcacaatattcctaatattggtaccaaaggttgaattggttgcaggccatcattaacaaccaaattgactatgtgggcagcacaacgaacatggaaataatctggatcaaactgagcattctttctggtagcaagcttagacatcaaatttgaaacagtggtgtcattgtttgaagcattatcaagggttattgtcatgaccttatcctctattttcaattcaaccaagcaatcaaaaatagcctgagctatgacaatagcggtgtgaggaggctccacctcaacaaagtttaggacacggcatagcaaaacccaatgaacatctatgtaatgagccaccaaacacatatactgaaggttttgatttaatgtccacatatatctgtagttaaacttatggtctcagcctccctaagacttttcctgagatgttccttttcagattcatacaatttcatgcattcatttttatggccttgcgactagtgaattcatagcgaggattcatccacttcatcaaggcattaaaccctttatgctcaacaattctaaatgggtaatcatgttgaattatcataagggcaatcaaaagtttagtgtgatcatgatcatactcagtaggatgcaaaaccatagaaccatcagctaaaggaaaataaagtgtaccttgagctttagcctttg

SEQ ID NO: 24657 - DNA, 608 bp, Oryza sativa
aaacacgttaactacaaaatgacgtacccatatgcatgcatataaatttattagttcaaatggacctaatttaaatacaagaataaacacatattagtttaaatgaagcatctctcctttaaccgtggcaaccatactgtgctagcatcattgtagttgttgcgtctgtagatcatctatgcacctttgcgtatcatgtcgacgctgatcgacttgagcctctcaatcccatacctatgagccgcgacgagcagattctgagccatgaacgccgtgtctcccttgtcgatcttaggcagggtatcggtgtagatgaactgaagcatggcccgaaacaccctcaaatccatatcatcaatccgaataacgccattgccagttgccgcagcagcagccttcgcctccttctgatctttcccgccattattgccgaagagctccgccatgaacaccggcgaccgtgccgcgagcacgttcttgtgcgccgcgaacagcttgccgccgaccctgatgcgcacgtcggcccccaccccgctgccgaagagggcggcgaggtgccggtgcaggtccggcggtggcaccgccaccgccgtggtggccgcctcaca

SEQ ID NO: 24658 - DNA, 535 bp, Oryza sativa
tttctgtgcactcgccttgcgaatccggtcgttgccgactcgcattgtcttgatgcattcccaggcttcccgggccgacgctttggtcgccagggtgccaatcatctccggcggcacggcactgcagatagcgtcaagagccatccggtcctcatgcagagggacgtccacgccgtcgggctcgatcgccgcccacaggcagcgagcctgcagcttgatcttcatcagtagcgcccagtcgttgtagttggtcttggtcagcagcgggtagttcaccgagccgcctccttctttcaccacgcggtggatcaccagcccgcggtcacccccgccgctgcccgtggcgcggccgccggagtcatgaggagtgtgcacgatcggtgacgacgagcgacgacgcggcaagaagacgccttccaatgcgcggtcacgagtccacttcctaaaccgtgctctgataccaattgttaggaatttccccagcgatcgctagcaggaaaccagacgaacacaacgcacgcgtactgtggctaaa

SEQ ID NO: 24659 - DNA, 4554 bp, Oryza sativa
tgatcaaactcttgttagatgcctggcctgcccattggcttgtgcataatatggcgaataattcaataacttaattacccatgctatgggcaaaccgaacaaactcataggacacaaagatcgagccttggttcgttgtaatagttgaggaataccaaagcgattaattatatgcttttgaacaaattggatagcatccccagaatcaactttcttcaaaggaatcgcctctacccacttattaaattaatcggttgccaccaatataaacttgtgtcctttgctcgatggtggattaatcataccgatcatatcaattccccaacctctgaatgccatggcttgatgatagggttcatagccgatgctggtgccctttgaattgctccaaacttttgacaatcttgacatcccttgtaatatttgaaacaatcctcgaacatcgtcggccaaaaataccctgcacgccgaagcaaccacttcatcttatgagccgattgatgagttccacaaattccttcatgtacctcgccgattgcaaccttagcttgatcggcactcaaacatttaagcaataccccatcaatcgtccgataataaagctcatcatccaacaaggtatacttcaaagccttatagcgcaatttctgagaagccgattgagatggattctgcaaataatgatgcacatcataccttccaatcatcggctgttaatgtggcaatttctactttgacatccttgttcatcggcttatatcccgatgccccttgggccaaatcattagcctcaacattctgttctcgagatacatgctttaaagtcaccagccgaaatcctttcattaactctcggcacttttcattgaaaccattaatgtatcatttttgcactcgtattctcccgccaattgactgatcgctagcaaagaatcacccataatctcaacccttcgagaaccgcttcatactcagcctgattgttggtcgcatagggtgtaatagtgtaagcaaactcgaaacttgccccctaaggggaaattataaccccgccgataccacaatcatgagtgcatactgacccatcgaaaaacaaagtgcagggcacaatctcaaccgagccgatggagtcatcacgatgatcaacaataaaatatgctatagcctgccccttgatcgccttcggtgactcataccaaagatcaaattccgttaaagaaaatattcactttccaacccttcctttcaaaatcggagccgataacatgtatttaaccacatcggccttgcatattacagggcattcattggacaatagataatgtcttaacctcgtataggaaaaatacaagcacaagcacaacttctccacaggagaatatcttgtttccgcatccaagagccgacgacttaaatagaacaccactctttctttccccttgagctcttgaatcaagaccgagccgattgacttctcaccggccgatagatatagtcaaaactggaggagagctaagatattctttaatactatccaaagccttctgctgctctgccccccaagtaaattttagatcggctttcaaccgcaacaatggtgtaaaaggttctaatcttccaaacaaattagagataaaccttctaacaaaatttatcttgccgatcatctcctgtaattctgtcttgtcttccggaggttgaatcttcttaatcgcattaatgctcctctgagttatttcaatccccctctcatgaacaagaaatcccaaaaactggccaaccgatacgccaaaagcacactttgtcggattcatcttcaggccatacttcctaatcctctcaaaaaccttcatcaaatcggctatgtggtcctctattttcatggacttaacaaccacatcatcaatatagacttcaaccaaccagccgattagatcatggtatatataattcatagcccgttgatatgtagctccagcacttttcaggccgaaagtcattacaacccactcaaacaagccgattgcaccaggacacctgaaagctgtcttatgaatatcttcttcggccataaagatctgattgtagcctgcattaccatccataaaatttaatatcttgtgccctgaagcagcatcaaccaactgatcggctactggcattggatactcatcctttggggtagctttgttcaagtcccggaaatcaatgcacacactgactttgccgttcttcttgataattggaactatattggaaacccactcagcatatcagcagggacgaataaaaccagcatcatataaacgtttaacctcagccttaacaggttcgagcatattggctttgcatcttctcggtggctgcaggtacggtctaaccccctgtttgataggtagccgatgttcaacaattgatcagctgagtcctggcatctcataatactccgaagcaaaacaatctctatattctttcaagagctctatcaacttggttctaaatttcggagataaattcttactgataaatgttggccttggcctatcacccggacttatatcaacttcttctaaatcatcggccgacatgaaaccctgtccttgcttgtcatcgagatcatctactgtgtccttggtgtagacgtttgaaccctccacgacgccctcaaaataacaacttgggttctccatctttaattggctgtatatcacaatcggacacctttagaaaatctcctccccaaacctttctagacaagcaatcaataccgtccatctcctaaagagctaaatcggcactggcaacgttaactgacctgtcggctggcacgatctcaatcttgtcgccttgccattgaatcaagcattgatgcatggttgaaagaatataacaattagcatgaatcaaactccttccaagcaacaagttgtaggagcccttcccatcgatgacaaaaaatgttgtagggacggttttgctgccgactgtcagctacacattcaaaactccttttgtttccgatggattgccaccaaagtctttgagaaccatattcatcttgatgagatcttcagtatttctgcctagcttactgaatgtagcatatggcatcaaattcacagcagctccaccatcaaccatcatcttggacatcggcttcccattgacatagccgttattaatgtataatggcataagatgccgattctctgtcccttccggcttctcaaaaactgcttgttctggtgacaaccaacctagccgaagcttcctcaacttcatcaacaccggcttgtttggctccgaattccgcaggtaacgtgaaaaccatgttaaccgatgcagtcacaacactcttccccttagccaatctttttgcttcattggctttgggttcatcggctacagcagctagattcttaacacgccactcctacctcggctttgtcttctgcagccgatggttgatctcttgctcaacctcctgaaagtgctccctgttcctcaacctttgaacccttctcttctgattctttgtaaaaatactagaaggacaccattgagttttcctgccctcatcgtcctcttggtcacgatcttggttcactgggcccaatctttgatgaacaggaacccttgtttgcctcagccgattgcttctattgtaagattggctcgaactttctacaatattgctgccccaggacaatcttcgatagatggcagcctcataccttcattccagcaaaatctgaaaaattcacaactccagtgggggtcaaagctatcatcatcttcataaaatttctcttcatgccgatcatgtctcttctgatatttgttgataatccttgcagaattgagttgcttggaccgataatccttcttatcggctgtcttcccagttgtatgaaccatgtttacttgaaaaggattacgctcaattttcatcagcctcttggagttatcaaacttgatcttaccatcttgtatagccaactagatttgttgtcagaacagcttgcactcattagtagtatgagatccagtattatgccatttgcagtatttccttttgcctagttcctcagccgatggaataacatgatttgcaggcaattgaatttgtttctcccgaagtagcatatcaaagattttatctgccttggtgatatcaaaatcatatttctcctccttggaagatggcttcacccacagacatgtagtaaccttttgtttctgatccattcggctgctgctacttcggactcatcttcataatcggaatcagaagcataattgtaagaataaacactattcatctttttgacaatcttcttagcttcctaaaaccgttgttcatgcactccaactttctgggccagatgagccaagctttcgaagtcctgagccgaaaaattttctctgatcggatgcaataaaccctggaaagccagatcggctaattgagaatctgaaaaggacaaactatagcatctgttcctcatatctctgaatctctgaatatagtcttgaatagattcatcatgcttc

SEQ ID NO: 24660 - DNA, 1833 bp, Oryza sativa
caattattagtagaatgagacccagagttatgccacttgcaataccttctcttgcccaattcttcagacgatggtatgatgtgaccagcaggaagtttaatctgtttttcccgaagtaacggatcaaaaatcttatcagccttggtaatatcaaagtcatacatctcttcttttccagaactctttacccactggtatggtataaccttcttgcttctgatccactcggcagctgctacttcggaatcatcatcatcatcggatccatacatgtaaggatagacatgattgatctttttgaagtttttcttggcttctgcaaacctctgttcatgtagagttaccttctatacaagatgtgacaaactatcaaactcctgggataagaatttctccttgattagagctatcagaccttgaaaagccaaatcggctaactaggcatcagtcaaactcaaattgtagcacctattcctcatctctctgaatctctgaatataatcctgcacaggttcatcatgcctttgtctaatcgctgttagatcagacaatttcatctcatgaactctactatagaagtaactatggaattgcttctccaaatcggcccaactgttgattgaattgtatggtaaagaagaaaaccaagtaaaagctgatctggacaaagacaaaggatgaacctgaccctcaaggcgtcaacagccgatgcctcaccacactgagctaagaatcggctgacatgttcataagttgagacattgtcttgccttgagaattttgaaaaatctggaactttatattggttaggcagctgaaccgtctcaaaccactcagggtatggatgccgatataagtttctagtgtccttcggcttaagcccgaattgctccctcatcacatctgcgatcaagtcgacccatggtctctgctgaggcaccccctacgcttgttgtggtacgggcttgaattgattgtattgaggagcaaactgaggctgagccgatcccccttgctgatactaaacctgtggcgatggagactgatattggtaattcaaattgcccccttgataattctgaaagtttggctgtatgttgcgcaccaaatgttcgggaataacttgagctatcaccgattgatctggttgcacattatgaagaacttgagttacgacgtgctgcctcggctgattatcaggcgtcctgaacctagccgatgcatttagcgaactttgctgctgaatcggctgactaatctgctgccttagtggcgtctgctgaatcggctgttgttgtactaggtcgacagtaggctgagttggtaaaaacatagcagcaacctgttcctgagttagccgattaatattttgtcctgcatgcgcggctgctctcttgtcaacaatcgaggattggtcagttgccttgacgccgatgatggtgcagcaagtacaagcgccgataccggtgctgtcggctgagctggtggcatattggaggtactcggctgactgtttgggaccaagggccgatagtttgggaaaataacccctggtaaatagactggtcctgtggcctgatactcagctattgaaccatcaactattgacttcaccatgtttgataaggtattgactaatactccagattgattgatcaaagcatgttgcacggcgtaatcaatccgattttggaaattattaaactgtagttgtgttatattgccatctggactgagatcctcaacttgcaccccctgagagccgtcacctttatctcctgagccctctgcagcgcctttaccgcatgattcagttgtaccggccggaacttg

SEQ ID NO: 24661 - DNA, 5589 bp, Oryza sativa
cgctctctcgcgcggataaggaggagaaccagacacacgcgtggataaggagatgaggccggctcagctcggtttggtatgggtgccgttttttaattaactagtacctatcatatattataagtgtcggttcttcttaaaaaaacgggtacatatagtattggtactggtttttcctaatgaactggcacctattatccttaaaggtatcggttgtatatttttttgatgtgcggatgtgggaaaagtcccataggtgccggttataaatgaaccggcacctatatggctgatctctattagggttttttagtagtggaaaaaccaatatccaactgtgagtcagacttacatgtagtcaaattttacaaaatactgatagtatctaactgacattacgaatggtgtaatgttatttctttagtttaacaaagctgcaatataatggtatagatccaattaacccgttaaaatagtggacatataatatactagaatgatatgcgcggcgtgtcgccgcgcacaatgggagatgcttaaacttgttatgaagtataatgtttgaataacttgtagagacgaaatacatatttatcgtgggtaacccagagtttattatcgtatttgcgttgaaacattcagttatgctgtatatatcacagttaaatactaactcaaattttatcgatttcctttcggaattaattaccaagaacagaatcctgtacatgacaaacaattggctctctcctctagtcctaccacatctcttgctcccaagtcccaatttgtcctcttcctgaatcagacaagtttatgtaattgtgttcagtaattatgcatactccacagtaaagatccttgccttgaggcttcagcagcagctggcttacagaaacaacacagatcccaagagaaaatcagtacctcaaaaattcagagaagaagcaagagaataagacttcatcacttgggtagcctttaaaagactgcttccagcctctttcggaagcaatgcaggtaaattcagcttatatagttgccaaataatatgattgggatgtatggcaatgaatccttcatgaagaggcttatggaaaccgaaataaatgcaacaacagatggaatcaactgagtaaacaaaaaattgagaagtcagtcatcccttgaggaaaaaaattgaatatcaaattggattaatcaaataatggatctgaaaaacttcggtaaaaaaaaaaagatgtgaacaaacctttgctttaatattcagcaggaaaagagtaatctcttgatcacgtaaaaaattgcttgatgcccaccagaaatcccgaaagaactctatagaaccccgaaagaactctatagatcccagaaagaggcgtgcatctgcagaatcaaatattttttcattgtcaagattcattcatgaagaacaagtcataaaagtaattcattcatgaagagcaagatacaaaagcaatttcttcgtgaagatcctatattgaaaaaaatcacagaagttatttgattcattctgaacaagctagataacctcataacccatgtttcatcatataggttactgatcatatcagaaggcaaaatgggagttagagccatcatttcgtattatcaattaatctatactaatttcaaagaacttaagcatggagaagcaaatgaatcatgtatttattggttaaatagaagggaacatgcgcggcgccacgccgcgcaaccagtatggtgacatgatgtgctaatctgatgcattgccttacttaaacgtttttttttcaaatctctggatcatctttgcaaaatgagacagcgagtcaggtatcaataatcacctacagtggcattgatggtatcagctgatacaatctacaagtagggcattgcaaatggtggggaggtagggttacatatagatttcgactgttttcatcagcaggattgcaggaccaagcatgctcagaatttccagtgaaggaggcccttagccatggtgccaacaggttcttcttcgctctaatttcgccttgctcacctaattgcttgttcaatacaactgtaacatgttcatacaccaaagcggaacattcctccgatgatccgatctttcaattttgcaataaaatacttacattgattataaaattagcactgaaaacaaaaattaaaaagtagtaaataggtgatagcaaaaatataatttcaaaactggagggggaaatgcaatcggttacccccatcagaattcttctccaagacaatgccatctttagacacttgatgcatatcccattgatgagaaacaaatgaggtaactttatttaggagggatggcctgtcatgtccagttgatacttgcaagattgcgtaaaatatcaacagtgccccagggagaaatatacttggattaatggaagacaacagatacatttgcacatttttgtaagtcactgacaagtttggaaatctttcagtttgtaagtctgactgaaataatccttcatatcaataatagacttaaccagttaacctggtagcaatctagtagtacccatgtcatgcaaacaacctaagatatcatttcaaaaagacgcgatctagtgaaattcaggcacaattctcaaaaacatagaaaaagacaactattgtagtatatagaaagctggagtcaggaatgtgatgtaggacaagctccctaccttataaatgaactcaccaaagcaaaattaatttagttcagtggtttcagatttacctatcaaaatagttgagcaaaggcaactattctgtattcaggttagcaggctaagtatcgtgcataacaaaaatcatacatcgcatattgattcagacagtgcggcatagtcgcagggctcctcaaccacccagcgcgatggccgtgcagtccctgaagcactcataccctgaattagaccctaacgctagcgccctaacaaaaccctatgctgtacctggacatggatcgatgggcaaccagaagatgcgctgctatcgatagcctggcccatggcatggcaacgttctccttgggaaagtggcagcctcacaacaatgcttcatctactatctaactgtctgacgattaggcaacacacgatcgactgttcttttcagtgcccacttctccattgtcatttcgcaatattaacacatcctaccaatgcccaaagtgtgtcatattcttgaactatgaaaaccaaagttaacaaaaaagagaggagggggaaggaggagctgtgagacggcaattttatgaaatttaggcagtgagtagccaatgctgatgagaaggcatgggtgcaatataatcttcatggaaagctatgcaagcaagcatcatattatcgaaaagaatattgtcatgattaatatttgtgatgaacaattagctatgcaaatgatttaatcgatgaattggtttgaaaaaatgtgtggatgttggtgtaagtgcgtgtgactaatgtggatcaggttgtgatttctgtgcccagaaatggttgttttgtctgattgtgtgtaggtgacttgaggtcagccttggtcaatggtgaggaccgggactatgttcaatgaggaacagatgtgtagtgcggtcgagataccatataagaaattgactagagtcaggattcttggaggtcaacttcggtcaacggtggggatcgggactagattcatggaggagttgagatccagaaggtcaaggataccgggtgacgaagttggatacgagatggtatacggtggatggacatcgtgtgggagagatcttcacaacgggcttcacgaggtgtgtgtgcaagtgtcggtgttagcgaaggaaattacgaagaaactggaagaagaaaagatgtgctacagtacacgaggtactgtagcggggatgcatgtacgtgtgctgtacatgtgtgatggcggcaagcggcagtgcctcggctgggatgtgcacgtgggcttgcttgtgttgtagacaggccggcccaggtggtgagttggcggcctgcttggaggaagggtcagcgcgtggaggaataggaaggagaccgagaccgagccggcacaggagcgttcggctgtggttttggagaataaggaaattgagggattaagtcctattgtaaatagtagttctacatctactatgagtaggaggttttttatgtataaatagagagggagggtgaggcctcctaatattggttctagagagactagagttgagagaaagttagggtttcgagtttagtttgagattttggtgaggagtgctgtttgtgcactttgtaaacactagttgatgcaataaagtcaaaaagtttcaatctacatcttcgagtttgtcatctaccggtatttctatgtcccgatggtctaaccgtaggtgtgcacgcggtctgaccggtgggatagcggcagtctgaccgcaggtgttcgggcggtctgaccggcggcaggtgggcggttcgaccagcggcgactagacctcgtcaccgacttcgttcgagaataatctttaattctgtaaaagattttgggtttttggtttttcctaccattcacccctctctggtaggtttgtttggtctcgtatgatcctacaccaccgtggatcagtataatggagccaaagaaaagctcatttgaaactcacaaactctctctatttttcatcacacagtaaaacaatctaaaatacagccgttcctgttcaaagaaagagcaataccatgccttctcaaggaatgcaggtgagtggattttgctctctccatcgagtcaacacaagcagaaagcaggaggggaaaagggggagttggtggtgggggtgaaggatggagtaccgtagcgagcacgaggtcaagctcgaggcggcgaaggtggtctgaatctgatgcactgcgcactccaactcgtcaagggctcgatgctgagcaagcccctcgtcatctcgcaggtgagggaggattgggcggcagcggcgtgatcgaggcaggtgaagtcgtcgccgacggccggcccggtgccggggttggaggaggccatcgtcgttttcgtcgcagccgccgtcagcatcatcatcgtcgtcgcagccaccatcactgttgttgttgttgcagctgccactcgctcccgctcgcctaagccagccgccctcgctctcgctcgtctaagcccgccgccgccgctcgcgatgacggaggcaggaagatcagcatgctgccggccctcccgctcccgccatgccattcctgaggacggaggccgctggatccatgtgccgctaaggctcccgaggacggggggcgatggatccgcatgccgccgtccttcccacttgagcctagcagctccaaaggacagaggccgatggatccgcgagccaccgtcgctcccgaggacaggggggcagatctttgcgccgccgtccttgcccctacactctccccctttccaacggcgtggggtatggaggtggagcggtggagacacgaggacgggcagcagagagcgggggaggacggatgacttcgtcggcggcgggtggagggc

SEQ ID NO: 24662 - DNA, 9558 bp, Oryza sativa
cattcttcgcaaccgtttaccccggattttggaagaagggaaccccccctggtttcaccctccgggcaaccaccgcccttaaccgcctttgccattgccgggaagtgccgccgccaccgcccttcggccgcaggttcggccgggatttgcccccaaaaaagaaaggtgggaaaagaaaagaaaaggaaaaaattgggaagggtttcgggattggggggggggggttagtgtaggacgttttgaagaaaagcccctatatttttttatgtttacaacgctacccctataaacggaattttctcttcttcgcattgtatttttctggaagacaagaggttatacataagaaacaaaacaagatgtcagtcggtgcaaggatgtatgcgatattccgtgcaaatatgaggagttttttataaaaagcccagccctcttaccgggagcagcccttccaccctaaccggcaagcatgcataccaccacagcgcccaattttttattaaccggcacaccgcttatgggcggttgcccccgcgcacgcgaggagcaggagggattagcagcaacgtgtaaaacaatgagataccccaataaaaattcaaaaaaatgagaaaaacggtggggttaggggagttattgattgatgatgtgtacagtaggatctctcctagtcacctatagagaacggcccataggtgataactcatttaaaaccgacacctattaatcttttctcacctcccccagatggaaaaaaaatataaatcgacatattggactctcgaggagtgatcctctctagcgggagattgtgagatccccctttgtgagttcggccgggggcagcggatgagatccgagtttttcgagacaaaagagacacaagggatttatacaaattcgggctgctaagaagcgtaataccctactcctgtgctatgctccttgagtgaaggattacaagatctccttgttggagtaaaatgtggtgttgatcatccggggctagagactgctctagagcgtcaaatggatcatcccagatccctccccccttttactaggtctggacctccttttatacctcaaggggttaccacatgggcacaaaaacctagctccggtggagaagtgttttgcattaaatgcctgtcttgtctcttgacttgggaagcaagcgcgcgtcatcttgatgatggggcctgtcaaatcttgccgcctgacacgaggggcgccaatgtcagctgcttttaatgggtgaagacttctgggctcctatttgtcgacccacgattttggaaatcggaaatcttctgtgtttatgagtaccaatccctgaatcagtagttggtacacacataaatagccgaatcacaacatatcacgaatgaattcaggctaaaagagttaaatgcttacattagggccaggcaggccaacaactatcagagaacaatagcggaagacaaaatagtacaagggcccggttgacataccacaagcagtcgactagggaacgagacctagaatggaaccgcactccgatcatcttgttaggtacgcaagcgtacaaacaagggcttctcttcaacactctgctaaaagatatatatatatagagcaacaatgagtacaaaagtactcaggaagccaccacacaaaatgcagtaatgtaagggtattactagagtggctatggttactttgcgtaaagttgagttttcaaatatcatttcacaaacctaagacctagcataaactgatcaagttttagttccattgttcattaaacagggatggttctgtccaccatccattgtgttcccaaggatagcttctcgccactggtcgtcatggttttctggggactacaccttctcgcctctcaaggagttgatccaccagcacaaaatcatcatgcatatcccatcccatatagattaaggaattagagtctagccaagtgtaatacatgtcccggtgctcaataaccgcgagcacgactattcaaatagatgggaatactcacactgcagtggatgtacactttaccccgtattctgtgacttgcccaacacatgagcctacgtcccaaggaatgagacttgccatggcaaagcctttcaataacctactttggcagtacccgctccgtgaactttagtcctcatgcactctaggcgtccaagtttctagcagtgagaggagttctggcgctcccgggagggaaagattcacacatgcgttaagttagggttaagtttagattacacatggcagtcctgccgatggcgacaccactataggcacccgccctttgcggtcctaccaatggctgccccaccgtaggcccctgcctctcacacacatcaagaaatccactacggcttgggtaccgcctccactaggctatttactccgctaggtctatacccacacgagaagtacggttgtactagggtttcatgctcaggatagttcttattcttgataaaatcttgatcaaccatcacctcctggaagctgcatacgttgcctcatgactaaccgatatacaatttccataatacgcgagaagaaccaatattcaaacaacaatcaaatatgcacaaacaaaatagagttgttgaggtcgaacctagggttgctcatactacttgtgtttgctaatggattctaatcaagctaagagctaatgtttcttagtctttctgtggccatagtggttttgtctagctaatggctatggaagaattatggctacacatgcatctatctaaataaaatggtcatatactagaggttctgtcgtcggatggatttaggatcaatcacataattacagtgaatcatttgtattattattttattgatggaggatttactttgattatgaacatattttccttgtcacagtaaattatgaaaggttaataactatccatgctttgcatgttagagttgtttaggttaatcatactatggttacagattatttgtctgtgtggtcccgtaacgattaattacaggaggtcaaaatttataattaggacttatctactattcatgtttgttatatactccccagttgaatatatggaaaagggtaaatcaattgtatagttataatgggatgtacaatatacgtgtgtgcaacgatgtataaggttatggtcgcctacagtacatgagccatttagaaagtgtactacccaatgctccaagtgactcctgaatatattgtagttaaattatacattagctagtttctatatggcattgcattgattaaattatttggtgattcatccacatctagctctgttcttattctcctaaacaagttaaagattcatctatgtgtgtttatattttagttacaaaatatgaggctaaactttatgtaagtaatttataagtcatggattttattgaacattaaatagtgctagtttcttcctatacatccgttcatttgagacattactgtacttaatttacatggttgctactgtgacaaaacatgctagaaacaaatattattacatccactctactgaataataccaattttatttattagcatatttgttgaccataatctaatcatttgatattaattatttaataattgtaaatatgttttattaagtagtgagttatataccattggaaagcttatgaatttatatgaaattaggttcaagtttcactcaaatccgagttaaaatgagcaagttatactagtttaaagattcaatttcgaattaatccaagaaattgtgaaaagctactgttcataattcatttatttttaatccgaagtatatccttatccctaacagctgctgacatgtggggtcaaagctttgattttctttttcacaggattaattttctaaaggaaataggaggagtggggacggcttgtcagtggctcggccgatggtcatcttcaaccttcatcttcttcctcccgaccgagcgggagcagcaggggaacacggtgcacccagaaggccggccgagggcaacccggcggcggccaggggacgcacggagaagctccagcgaccacccaccggctgcggcggcgcttggagggacggggcgcatggccgccatggctgcgccatagccgagctcggctgcaagtggctaagacgacaggaaaggtttccgaccaaattgatgagtgcgtgagcatctacggcatacgggggttccattttgttagctagataggaaggggagcccccgggatggcttgtccacggcgagctcgccggcggcgaaacagtggccggttcggcacggctttgggtgctaatcgccaaaattggtgagacactaagcttctatggaactaggagaggctttaggagcgaggtgttaccgagaggtggcaaaacggcgatgttcgatgccgtggtggggagacggtagtgaagcagaggtggacgatggcggcgagcgcgcaggtgttcgactgcaggtcctcgggtcacaccggcacccggagttgatccaaggtagcaacagtagaggcatcccgaagccacagctcccgcggtcgtcagtaccggctccggcttcaagcaatggctatggaggcacgcacacaaggtgctcgatgaaatgcattcgagaggaaaggcagagagggatggggatttcattggggcttagcttagggtgtaagcaaacggtgtggataagatcgccagcacatgtctggacgagctagagctctaatagcgatcggataagggcaaggagatggatgacgtggataagtttcgatcctcccaagattcgggttccatgcatcgatcgggcgtgatttcccatacagtagagttgcaggggagggattgctagctgtgggaagaagcgctacattatccagcggtcttggctaggggcgacgagatgacgacgcgatggcgacaagaatggcggcgacaggcagtgctaacggccgccgatagagaggtgcagggctatctctagggtgacgcgggatgacgtggaggccgttatccctcggcatcgatggtgacacgcgatgggacgtggtgacgcaggcgctcgtggcggcgcaacctttttgcggaaatccggcggctcggtcaggcggcggggtccacgcgagcgcggtgcggcgtggcgcggtgcacggacacgcctggtgcggcgcacgggcagagaggtcgtgcgcggcctggttgcaacagggaaggtgcagcgctgggtgttcggcatgggctggggttctggtcgagcacctggcggcctatgaacagtagccggccgaaattaaaagatttctagggttttgagggatttaaaaattgagaaaatggctaattcaatttgtgttttcaccaatgcatttgatcaacaatattaagtattcaaatgtgaatttggtccaaaataaacattgtccaatatttaaatcttactatagattttatgattttctatataacttgtaggctctgatatttataaaaattaatcaaaatattctaatgtgactactattaatacaatatctcattggttgaacttatttgtctagcaatgtattttacacggaaaagtttaatctattttattcgagaggtaatttgagacttggtacaacattgatctaaatgtttaattaaacactcacataacgtattttatatataaagttcaatttatttacatgaccaattattttatgcgagtaggttttattccatgcgagactcgatgaaatttataaatattaatttaattattctagtggaacactcctatatctataaagtcattgcagtggcgactatttcgtggttacttagatgtcatgacccaattcaatccgtaacttatagaaattaataattgacttgcactttatttggctttgctaccttgtgtataaatatttctatggttaataataaataatgcattattgtgattattacttagatgtatatatttagtttaatattccattgtgacaattttataatttgccgagcaataacaatcataacaaccagcatgatgcaaaagttttaaaaagttcgaaattttagtgatttttattgtcaggaattttcagggtgttacactattacaccgggaaacgggagcctagctttgaccagagcgggaggaccgactctggctgggataagaggatgagaacctctcaccatcattatttgatgggacatgtcaggctgcacgccgcctgacacacgagcagcgcacaggcgcactacctagtcccatcggtcattcgaccggaaacagaccggttgagtacactgcacgccgcattaaatgcggcgtggcgcgaccgctcggatcgccataaatgtaggtaggtgagcacctgtaggcggacacctaacccaccgtacgtggtgacctagagagggggtcgggggagcccgagccctagtcacgggagggggcggtctccgcccgacctcgggccggatcccccctcgggggagggccacgtggcgcctggggcagccttctccctctagtctcgtttagggagtggccgccgccctacctcgggcccgacccctcccgggggagggccacgtggcattggggggcagcctcctccgtccaatctctaggagggagtggccgtcactccacctcgggccaaactccactcgagggagggccacgtggcattggggggtagcctcctccgtccaatctctaggagggagtggccgccaccccactcgggcctgactcccctcggggagggccacgtggcattggggggcagcctcctccctctaaacatgatacccttgcgcccatatcaccgacagtagcccccggcgttagccctgaccaaaacctttcccaggtggtcatggttgacgccactctgctagttagttgacatgtgggcccgatattctgtccaatcatcctgggagttgggcagtgggagtttagtcacgttcatacgtcgccttaacttcccactttcctcccggtttccgaggcgttgtgggcacgggagtttagcccgtaccttaggctgtgaacttatttcctgtatatactcagcaaacgttgttagattctctcgggcccgtgagcatacgccgcgtacctcgcttgcccctgccttttgttaacctctgttcgtgttctacttcatctattcaaacaattatttttgcgtgagcgtgaggactgaactttccatagctagcaatcttcacccgcgatcaagccaagctgggcgctgtagccagccggcggggccaaagccaaccactacggaagagccagcacagggggccccgggagtcgacggcgccaagagctcgacgcagggctaggagagagctaggaatcgtagcccccgcattttaagcaaagaatcgtttgaatagatgaagcgaatacaaactttttgttaccaagggatgcaagccagcacgcgacacgtgggtaccgcgggaccgctaggaagagataggcgagagataaatataagcaataatgattctatgcaaacgattatcttcgcgcaagtgcgaggacttaattttccatagctagcaatcttcacccatgatcaagccaagctgggcgctttagccagtcggtggggccaaagacagccgctacggaagagccagcacagggggccccgggcgtcgatggcgcccagagctcgacgcagggctaggatatagctaggaatcgtagcccccacacttatagcaaataatcgcttgtatgaatgaagcaaacacaaaccttgcttgcatgtcgcgacctttcaaatctttagctcgaagagggcctcccaccatgggttcctaaccattttgggaagcctgcgaccacttagaaaacaaggtgaggttcccacgagcctgtgtccccacgttacacattttgtttgctctttcctttcggtggcctccttccaatatctctctcttttacatggacgactactttcgcacgagtgtgagagccgaaaaactctagagccagcgatccctgtccacagttgagccaggctaggcgccgtaaccagccggcgggaccaaagctagccgctacggaagagccagcacagtgggtcccgggcttcgacggcacccggcgctcaacttaaggccggaatagggctagaaaacttagcccccacacttagcgaggaaacgttcctgtagatgagagagaggttgggctcttaccaccgagggaccaaacaaatgcgtaacacacgagcgtcacagggccatgagaaaagaacggggggaaaataaatataagactttaagctgtattaagctgatgaattgaaaaattaaaaatacttgaagcttgaaaggacgattagttgagccgggccgggcaccgtagccagccggcaggaccaaagctagccactacagaagagccagcacaggaagtcccgggcttcgacggcacccggagctcaactgcaagagccctccaaggtgtagaccaaggcgggtggcaggttcatgagcgatccctgcgcttggccctggagggccatagggaagaaattcgccttgacccggtcgtcgccccacgtcgcctctatgatcgtcgtgtggatctggagggactcagaggggttgacgctactgtggtaccttacggtgaggctgggccgaactttgggggtcatcggacattccgaagactcgcaataaagacctggccgccagtcttacccggtgaagatacggggggcctagccccctgcctggggtggtgcggcacttctgaggaggctgcaccttcccccgcattggcggcacgaagcttatcacgccggcgctcgaaagaacctcaaaaataacgaacgcgcccctacctggcgcgccaactatcgagaggtgatcctctctagcgggagatcatgagatccccctttttcggtttggccgagggcagcaggtgagatccgaggttttcgagataaaagagacacaagggatttatacaggttcgggccgctaagaagcgtaataccatacttctgtgctatgctccttgagtgaaggattacaagatctccttgttggagtaaaatgtggtgttgatcatccggggctagagactgctctagagcgtcaaatggatcgtcctcgatccctccccccttttacttggcctggacctcctttaatacctcaaggggttaccacatgggcccaaaaacctagctccgatgaagaagtgttttgcattaaatgcctgtcttgtctcttgacttggaaagcaagcgcacgtcatcttgatgatggggcctgtcaaatcttgctgcctgacatgaagggcgcccatgtcagctgcttttaatgagtgaagacttctgggctcttatttgtcgacccacgattttggaaatcggaaatcttttgtgtttatcagtaccaatccctagatcaatagttgggtacacacataaagccgaatcacaacatatcacgaatgaattcagggtaaaaaagt

SEQ ID NO: 24663 - DNA, 5090 bp, Oryza sativa
gggggagggccacgtggaattggggcgcaacctcctccctttaaacatgatacccccgggcccatatcaccgacatggaccaactataaacataagcaccgctttatttgaactgtccccaccctccgctcctgacgacgatgccgttgccccctttcctcccgccgccggccatccgcctccatcccggtcatgggcaacccttacttcgacctctccccgtaatccacccgtaacgatgacgatgttgtcgcccccttcctcccgtcgctggtcgcgcgcctccatcttcgacaagggcgacccctcctccgatccctcgccgcgctccactgccgccaatgacgacgctgctcccttcccgcactccttcacctccactagcatgatggggacgtgcttggtttccaaggatgacagcgacgatgcttgggaggtgagtagcagatcggtgttgggatttgttcttgtgtttgattttgagtagcatgttcctctccctaaccagtgacgaggagcaagcttgcctcaatgcggcacggctatttgttttacgaaatctacacccaatcagtacactggccaatgtcacctgtgacgggcccaaaccctcatctttgacagcttcgcgcatggtcagtgatcagtggtcattggtgagtctagtcacctttgacgggtggccggccgtcacaggtgacacccacctctgacgggcaagttactagaaggccgttagaggtgttaatctccgctagcctagggcgagttgggacccgtcacaggtgactcatctctgaaggacctttaaataaaggccgtcagaggtgatggtctccgtagatagaagctgtcacaggtgatctacctgtgatggccccaaaagtaatggcccgtcacaggtaggtcacctctgacgggcctttatttgctagtccgtcacaactgaggttacctttgatggatttttgttctgacccgtcattgatgagttaattctagaaaaaaaataaatgctaaatattggctagcctcaagatttgctagccatgccctctgaaacacagatacatcacagatatattctagtcaccccccaatataacatcacagatccatctcaaacatcacagatccccaacaacacagatccatatcaaaaattgacatcattcacatatgcagttcaaatgccacaattttgcacagcaaattcacaccccttgaaagccacaatttcggtcgttgctcatagaaccgcatatatacttaccaaatggattaaagccataatgtcgtcgacctccacgacctgtcaataaggaaaaaaaaggagaaaacaaatgaatagtacaacgtaaatcatagttgatcaaatttgatgacaatttagtaaactaccataaatattgcacatatgaaagtaaattacactgcactccataaaaacatattttttacatcacaagaaattataaaaacatcttctttacatcacaacaaattatctagccaagttcatgagtctatttgacgtgaaaacgtcctttcttgttcattatttctgcaagaatgaaggcgcacacttcacctctgatagtgggggggggggttgatgggtgagatcttgaagccatctctacctttctgtttaataaataagaggttagcacgttttgaatagcaatgttggtattgaaatgagcttattcgccattagcaacaaccttagggtcgaaatctttcacctctcttagaagtgttgacatgttgtggcacacgtggaaaccacattggtctccgatctgttgtgcgcatgcgaacttggtgtcatgataaagttcgtcgttgccctccttgtgcctaccacccttttccacatatgggccccaagccatatttaaggccttggtgatttcagtgaaatcataatctttggacttattggagttaaggtaggtaaccctactccacttaggtacgatgactaggagaatccaatgtcgcctgcgcagtggttatgtagcgttagtactaagaaccttaacttcaaaaacaatatacacgaagggtattgtcctcttgctctgggttgtgtgcgcacatgatgtactccttgtcttgatgggaccataaacaccggttgacatagtcaaccacctcagtgaagctctgtcgtaaattaacctcgttcaccatggatggatcaaggaacccaacctgattaccaaggcgacgactctcgatccaacacaaccttaaaacatttatgtattagaactaatttaattaggagatatagtccaatcatatcacaagtatagaaggtatgcacttacaaggagtagcattttagaagaccagtgtccaacttccagatcctgaaaaggttgaagaggtcatcaaagcctatagttatgtaggcaggcgacgataggaacggttggtggtcgtgatgtccaactatggatgactccctcattttccgcttcgcattgcttagctccatgtattgcttatgtagctctcggcaagcaatacccatcacggctaacacattgtcctccaccaatggcatgcttaactcaaattgggccggcgcactcacgaccttccccgctttgctcaccggcatcgacgtcgtagccttgcccatttttggctccggcgcaaactccccaaccttccccttgccgcgttcatgcttctggcccttgacaagtggtggggagctatcagcctttcttgtggtctttattggagccaagctttgagctatatctgccaagtccatattagctccatcaggagaatgaggtactgacaatgccggtccacggggagcctcaattgatagcttagacttgggaggtgtaagctccatcagtcgacttggatgaggagtcagtcatcttcacaactatgtcttctttgggccattgtatgaacatcttgcgcgaatcgcccaaagtcatgatttcatcattgggggcatgggcagcggatagcctgacaaggtgtcctttactgtatcgatggacaccttggcatacacagctagcaggtctgtgccgtggaccttgtctgtaaccgagggcttgaaagccatgccctcagcgacttcgggagcgaaagttgggtggaccctcgccagtaggacacattgtgctacgccctgtatatgcgaaagttggttttttattagatatggatcagataacatcaattacctctatgtggtccactgcagctagtggtgcgaccgggagaccaggggccgacacctctgtggatgcacaactactcttgtgctgtgacggactcgcgtcgtgttgtgcacgaggagttggatgcacagcaggtgttgtgccttggggtatattcatgtcggcgaggactttgttaaccctttcttccaccctagcgttcatgctagcttctagttcttgaatgacctcaaccttaagttcggccttcaaacaagcgtccctctcttccttggagacttttcgtttcctgtattgggagctgtactgcgggagtccattgtaacatcctgaaaattcaagacaataaaaaaaatcactaaaatttcaaactttttaaaacttttgcatcatgctggttgttatgattcctattgcttgccaaaccgtaaatgatcaccaagaaggtaaagaaaagaactacatttaagcaatagatatgatttatgagaatatatttaatcctacaaataattatgtgcaagatattaaaatcaaataaaataaaagttattattaacctattttatcaaatattaaaatatttgaataatataggtgggtgccataatacaagccggcgactcataaagttgattccatcgcactcgtcgtcaggaaactcggcgtttacccctacctggcgcgccaactgtcgaaacatgaattcagcaataataaaagggggtagcgctcgagacctaaaagtggatggatcggagacaaaggatttagacaggttcaggccctctcaatgagaggtaataccctactcctgtttggggatttgaatccgccgagtgtgtattgatctgacgattaggttgtctcatgccccctagagggcctcctgcccaccttatatagggtggggggcaggattacaagatagaaaccttaaccaatacggtatcggtttcctaaatctacttacaatattatcaaaccaggactttaggctgttccgtaatatataaggaaacgtaatacccgagtcatgatctattacatattccatagatataagttatcccctatgactagtcggataaccatgccgtatgggtatggggtacccataatatccacaacatgaaatgatgatcattcaaatgaactgagctctctgtatatataatagaattatgggagtatttaattcgatatgtagatcgattttgcaccaagttcctaattgcatttagggattgaaatttgatatattaaacccctccatataaaataaactaacatatagataaattgagctaatgtgctattatgttaataacggtctcattagaaaaaattatagaatctttaataaaccttaaaaacaaattggtaaaataaatataaattaaaaataaaagattaggtacggatagtaataaataaaatattatcgcgaccatatttggatcaattaaatttaattgcgatagaataagaatttaccctaattaaaactcaaataaattatataaacaaaatatgagtgatatcaaattaaggagaattttagttaggataacacaaatatgggataaacttcatttatacaagatttagaaattatgaaatcaaatttatattgaaaataacctaaaatcgggaataataggaaagtgcactattcattgctcgcaaggtgttcgatttggtccctaacctttccccttctctcccacctctgccctagccgtcccgagccgcgcgtcgccaccttgcgccgctcgcccgccgcgccgccgtcggcatcgtcgccgtcggcctcgcgccccgtgccgctgcctcgcgcctcgcgccgccgctgccgcgctg

SEQ ID NO: 24664 - DNA, 5924 bp, Oryza sativa
cccctcttccctataaacacccccacccctctccatggtttcccactctattcctttctcctctccctcttccccctttggcacgcgccgccgtcgtcgtgccgccgcgccgccgccacaaagtcaccgcgccgcgccgcgacttgcgccgccgtcgccatcgttgccgccgcgccgccgaccacggtgacgccgcaccgcaccgggtgccgcgccgcgtcctgagccgccgtcgccgtcgtcgccgccaccgccgccaccgatgagccgtctttcccccccccctccatctcgcgcccaccgccgtcgccgcccgagggagaagccgaggaaaaagagaaaggagccgggagggagagaagaaaggaaaaaggagagagaggagagaaagaaaaagaaaagagaggccggcagagaagagaaagagagggagagaaaaaggagagaaaaagaaagagagggagagcaaagagagaaaaagaaaaagaggagagaaaaagagggaaaatagaaaagaagaaaaggagaaaatagaagggaaattgggggagaaattagggggatttaggaaataaaaatggtcggggttaatcatagattatttttggaaattcctcgagcgtaatagtatttcgattgaaattccgagttaattataaatatatgtttctggatcagattaaattagaattggtagttatttagatataattaataaccaaacaattagatgaattcttatagattattatagattatttttggtaatctctataagtcatcggttcacggtagaaattcggattcaattacttggaatcttagccgtgtattatatttaatcgtttagtcatagactaaattaaattgtataatatttctaagatttcgtccgatatttagctcgtaatcgaaatttctaacctgttatatggatataatgctcgggatgagtaaattaaaaacttatgacaacaaaatatttatacccgaaaaatagtttaaatcgaaatggggtttgccgtagttcgcagatagtaaagttaataaaaaggaatcgacttttgcattcgacttttactcggatttaagtgaaacttgaacctagattcatctaaattcataagctttccaatgatatataattcactatttaacaaaatatatttataattataacttaactaatatcaaataattagatgatagttaacctaaatagtgtgccaatgaataaaaatggatgttgtacagtagcataattatctttaacatgtcttgtcgctgtagcaactaaataaattagttataatcaatccttcaaattaatggatatataggaaaatattagtaccagttattaatctatgtccaaatataattaaaacccacgacttattagttatttaaatagagttagccttataattattaggtaagtaaaatatagatacacatagaacggtcctaagcttgtttatggcaaataataacagagctagtgtgattaaatcacctatatgaaattaatcaacgacatatcccatataatagcatatagtaggcaaggtgagcaacccttagttaaccaagcagtaaatagaaactattcaaataaatgattcaatatactaagatattgtgcacacacatattgtacatcccattatagatatatggtatcgtattaatctgcttgttgcgtatattaatttagagggagtatatgacaaacatgaatattagataaatactagttatacatcttgtcctcgtataattacagatcaactgtaaatttggattattcattgtaaaattatgtgatgggataatccgtaaccataatatgattaacctaaacaattctaacatacaaagcatgggtaattgttaaccttttacaatttattttgacaagtgaaatatgtacataattaaaataaagcctccattaataaaataataatacaaatgattcacagtaattatttggccgatccaaaatccatccggcaacagaacctctagtgtataaccgtgctatgtagataaatgcatgcctagccataatccttccatagccatttgatagactaaaccaccgattagccaaatatatatgtatcctataaatgctatgttggttaactcctaaataggccacgttgacaatagaaagattaagaaaccttagcaagattggaatccattagcaaacacgaatagtacattttgttgcgcatatttgattgttgtttgaatattggtttttctcgcgtattatagaccttgtgtatcggttagtcgtgaggcaacgtcagcaacttccaggaggtgaaggttgatcaagaattacatcaagaataaggactatcctgagcaaggcaagtcatcactattccttgaacatgttgatcccaattgcgaaattgttttgtttacaaataaacttgcatgcaatgatgaacatcctactggtgattataccatgccttgattattgttcacctttaaatctttgtaaccatagatacgtacgagtccctagtcaactatgacacttgcttaggaatgctattttagattcatgcatactcatatttatcaaatgctatatgcttgggcaattacctttgggaaggtaattgagatgcggcatgtggagacatgagcgccacattgccatgatattgatgacatgatttgtgaaaggaaaataaagtaaaacaactgttttcgactggggcggctggaggacttgggtggtgtccggaaaaggctagtaccgtccctggtcaattaaggaccgagccatgaagttaagcatgaaacgacccccgtacaaccgcacttctcgtatgggtatagacctagcggaatagatagctgagcggaggcagtatccatgcatagtggtttcttgatgtgtgaggtaggggctctacggtggggcagccattggtagaaccgcgaggcgggtgtctacagtggtgtcgccatcagtaggactaccatgtgagaatttaaacataattacaacttaatgcatgtgtgagtctttccttcccgggtgcgccagaactcctctcactgctagaaaccgtgtacgcctagagtgcatgaggatttaagttcatggagcgggtactgccaatgcgaggttatcgaaaagctttgctgtgacgcgtctcatgtgttgggacgaggctcatgtgttgggcagtcgcggagtgcgggtaaagtgtacatccactgcagtgtgagtaaaccaaatctattcgaatagccgtgctcgcggttattgagcaccgggacatgtattacacttggctagactctaaattcttaacttgtgtgggatgggatattgcatgatgaatttcatgctgatggagccacatcccgagaggagggaaggtggacatcctcagaaaaccatgacgattcaatggcgggaagctatcattgggatcacaatggatggtggacagaaccatcgttgtttaaagtgaacactggtactaaaatttgatcagtctatgctaggttttaggcttgtgaaaagaattgtaaaattagctttatgcaaaagaacctgaagccattccttgaaataccctctatcatatgcattgttattgtggtggcttgctgagtacggttggtactcacccttgctattcatatatcttttaggagagtgttgaagagaagcccttgtcggtacgcttgcgtatccaacaggatgatcggagtgcggtcttgttctaggtctcgttccccagtcgactgcctgtggcatgttaaccgggcccttatattatgttgtcttccgctgttgttctctgatagttgttggcctacctggccctaatgtaagtatttaactcttttagcctaaattcattcgtgatatgttgtgatccaactatgtatgtgtgtaccaactactgatccagggattggtacggataaacacagaagatttccgatttccaaaatcgggggtttacatccatgcttccagggcacatcgctaccaattcccctagtccggccaggatgtcctttggttccgagcgcctttgtgaggatgtcatcttcacgcctctttggcgtggactcaacatcgctttgtgaagcttgttcagcaaccaagcccaactagaaaaaaaaagagtcgtttatacgaacttctactttatacgaacggaaattagttaggttaagtagtgaactcaccagttcctgatagacgacagcatcacttttgttctcaaatgtgacagagccgtccgggttgaccttaccccttgcccgcgcccagttgcgagctctttgttcagggatgtctgaaaacggggcagggacattcgctgctgcagcggctgcatcttcttgggcccatattgcctacttgccgatgtaccatgcagtgcctagccgatgcgggtgctcattccgctgttgcagtaggcgatgtgcctcgcttgattccctaaactcttgggtgttcttgagagagcagaattcctcccacaccgcttcggttatttgagggtattcatcgaatggcgtatgattgccgggcgggttgacaaactcggtgaagagcttcgacttccaattcttccaacctttgcccatcttatggaatgccttccacttgagataatctatgtgtaaaaaaatgaatatggggcacaggggtagcagcagcaacagtaattcatcaaaaaagaacaagtgtacataaaaaaaagaacaagtgtagataatctgttcttatgcattaaaaaaagaacaagtttagaggtatttctgttctcgagcattcatcactggccatttaacataaggcaaccataggcagcagcatgagcaaacatagacagcaaggcatccaaaaaaaagcaaacatagacagcaaggcatctgaggtatttctaaaacagcagcagcaagggtatataaatcatgtatataaacaacaattcatgcaattcacctattcatagacaacaagggtatataaagaacaatttatgcaattcacctattcatagacagcaagggtatataaagaacaatttatgcaattcacctattcatagacagcaagggtatataaatcatgtatataaacaacaattcatgcaattcacctatttatagacaacaagggtatataaatcaacaagtgtagataatctgttcttatccataaagaaaagaacatccactgcagcaaaattcatgctaagatcctataataccaatagaataattcctctaatactgcattcatccaaaatctagcccctacattcatccaaaacatccacagacaacaaatcacatttaattcatctacacagcagcaccaacaatcgaaacaatagaaacaaatcacatttcattcatctaaacaatgcaattcatccatcgaaaaaaggaggaaggggggagggtggcagcgtacttggataaggcggcgcaggccgtaggcgtcctagatcccggcggcggcgaagacgagggcggggaggcagcggcgaagaggtcgaggcggtcggcgctgcgggccgatgtcgtcaatccaggcgtcggggaggtcggggtcagggaggtcggggccggtgatggacggacggtggcaaacacacaagggtggtggtggagatggcagcggagagggcggcggtggagaggttgaggtggcagtggtggtacagatggcgacggagagggcggcggtgatcggggatcccggcgtcgtgggggtggaggtggccggcgtcgtgaatcccggcgtcggggaggtcagggtcagggaggtcggggaagtcaatggacggacagcggagaggaccagcggcggcggtggagaggaagacgtagagggcggcagagatggcggc

SEQ ID NO: 24665 - DNA, 1242 bp, Oryza sativa
tcacaggtgaggtcacgtgggacggccttacagttagagcccgtcacaggtgagtttgactacatggactacaatattttatttaattttattctatttcacttagttcttttattttccttaacatatttccacatacactacattttttattttattttaattccgatggttatacttgcttaattattttatttcacttctagtggattcctcacttaattattttatttgactatttcataagcaatatactattgatcattgcgaacatattagagtcatacagataacagacatgtagacataaactacatagataaattacaaaaataatccttcctcatggtcgacgcgtgcatattaaacgtcatcttcttcttcctcctcttctagaggtattttttgacctatgccgtggacgtgctggttgtaattatcctcgtctgcaatattgtctaatccaacaattctccttttcccttcacgaacaacatgtagtttcttgttacatgggtcaactatgtagaacacttgaacaacttgtttggcgagaacgaacggttcatccttgtacgcgttgttagccaagttgacagtggtgaaaccttcattgtcaacttttacattgcgaagattgacccattgacaacgaaacaacaggactttgaacattcaagtaatctagctccaaaatttgctcaactctaccatagtattgatcacgcctaccaccgtcactaggagcctcgatgcgtaacccactgttttgcactgtgcatttgctgtcttgctttaccgtgtgaaaggtgtatccatttatgtcatatccttgccaggtggtggcactccattcaggaccctgtgacaaccactgaagtgtttgactagacaagttcggcaacttggcaatccggttcttcagccactcattgaaagaagacatgtgcttatttctgacccaactctctgatcggcctaggttctcctgtcggagaactgcaaggtgttcgtcaacgtacggcaccacctcagtcatatgctgcagtaccgtgaaatgagctttatcgtacaccttccgatccaacctagcagtctttcttccaacagtaccaacaccatcaagtctcccttcatgatgagatcgtggtaatccaattgaagatgtttctaacatgtagtccacacaaaaatcgatgacctcttcggttgtgtaactctcgatgatactcccctcggggt

SEQ ID NO: 24666 - DNA, 13552 bp, Oryza sativa
aaatgagacccctacatcggaaaaaatgctttttctagtagtgttagttgtactagtatagcaagcagagaatgacatgatcagtgaccactaagccatgcgtgcaattcgaaatagaagcacagcaaactgagcaaggctagagcggatcaacaacctcacggagcccagaacaatagcggcgtagggacggaggacgaggttgaccggatatgactgttcctgctgctcgtgcctggcttcttgcttgaccggattgaaggctatgctatttcttggctgcttgggtgtttgcttgaattgacaacgatgcttgctgctgctagctgctgattggcgaggccgcgaagatagatgacgaccgcggcacacgggcggcaacaaaagagagtgctagttactagttactgcatctaccaaatttctgtaattaactgagtaggaagagttggaacagataatatctgatattgaactaactgaggagacagatgctatcctttgggcctttggcctctggcttaatctaactgctttttcaacaaattcgctctatagattgctcatatccctctgaaggtgaaacattttcactggcttgcctgtatggataggatcgaatctacatctcaactggtaaagaaaaactgggagagatctgaacttcgtgtgctgtgtaatgacttagaagatgctgatcatctcatcttcagatgccttttagcaaagttcttttggtgtgtacttagagatgcttcgatttcacaatcaattcctagttcttgtgaacacttcttctatgatgtagtaggccatcctagttataaacagagcagaggagtgatgatgctgctcggggctgctgcttgggcctagtggctaaacagaaatgttttgattttcaggaagaaaattttaaccacccccctgactattgttttccgtgtaacgttttatctgaggcaatggtctaaattgatgaagtaaaatgaagaagcggaggctaaggcgatcacagcgaagattttgttagctgttcaacttttgtctgcaaattgaactggagtcggctaaaatcttgaatatcgtcctctgttcagcagttgtagatgttttctttcctgtagctagttcagacggtttgtttggccaaaatgttggctggattgctcgtcttctttaaagctggtctccccagtgtaatttgagctgtgtaaactctcaagctttctataaaagctaggccactcaggccttttatgcagaaaaaaaacaggcgacaacaaagaagtgtcagccatgagcagcaggcgcgctatgacgacttgatgagaatcatgagatggaagatggctccgccggcggccagccgtggccgccactgtcgcaccggctatgtcagggcttagctagggttaggatcaatgctctcataccatgtcactatttgaaggaatcgggaagcgaaacgttagattggatttgacataaaaggcaatataaattgtgtacaatatatgtgaagttacgactctatctttgggagtgcatcctatacacacagaccctcgcgtgtacacaccgtgtacaccaactaaaaattataaaaaaaataaaaaattcatacatatacttctaataatattatatttacgtgcaaagtcgcatcttcaaatttattctacatagagagtaaaaaaaaggataaattctggtagaattacaaccttaaaactgtcagattttttgtttttttttgttacggtcaaaatataatgaatttgaggttaagattttgtccataagtgtaatactatgaaagtaaatgtatgattttttttaaaatttttgtgtcaattgttagttggtgtgcacgtgtatatacgtgagagcttgtgtgcataggatattgcctgtagacacacacttatacttaacaataattattaggtcgtatttctagagaaacataatagtaacagagggagtagtatggagttattgccacgagttttgccatgatctccttggatgttcggctttaaaagagaacactaaaacacacaactccctgcccaactacatagtaaattattgaaatttaaagaatgtacctccggtcaaaagtacatgtgagcccaactacacagtacattattatgtacctcgggtcaaaatgcacgagtaaattaaggttcgttaaggagtattaaaaaattgaaaaaaaatcagcaaaatagattagtatgtgataaatcacttcacaaacacgtaaattcaaatttaacttctgtaagtaaaaaaaaattgactgtgaatatacattaattagctatagtttaattttttttgtaacttatataattttaacttacatgtttatgtactgatctatcacatgtcaatctatcttgttgaatttgttttttcaaacttgctaataaataattgaatgacaagcaaactacggtgcgtctcgaacgtttagaatcccctgccgtaaaggagatcgatcccaatgtaaaaggtttgattccacaagtatataaaagagaacaatgaaagataacaagtcgctaacaaactatgtattgaattataaacatttccaaaattgtacctccggtcaaaaaatagtacatgacacctcgcagcagaatagtccacaaaccaaccttgaaaccaagaaaacaaaacagccacaccagattaaatattcagtaattaaggaggaaatttaaagaataataattcagccacaaaaccaatattttggaaaaaacttgtgtttgctgattacaaattaagtttcaggttaattaaccaagttttgtttcagtggaactcttcgtcaggcaacgtgccggccttggcgccgacgttgaagaactcgatgatgacctcgagcgggaggcccttggtctcgggcaccttgagcgccacgaacacgagcgcgacgcagcacacggcggcgtagaaggagaacacgccggcgagccccacggagctgagcatgacggggaggctgtacgtgacggcgatgtcgccgagccagaacgtcagcgagcagatggcaatgcagagtcccctcaccctcgtcgggaagatctcggcgcagaggatgttggggatggggccgaaccccatgacgaagcagcagaagtagacgatgacgctccccgtcgacagcgccgcgtgcgcggtcgccgccatgggcacgacgttcgccaccacgagcacggcgagggacgcgacgaggacgggcagcgtccagaggaggagggcgcggcggcccgaggcgtccatgaggcgcatggcgacgccgatggacgggagcatgaggagcgtggtgaggccgctgatgaggatggaggtggagtcgccggagaggccgaggctggcgaggaggacgctgacgccggcctggtcgaggatctgcggggtgtagtagagcacgccgttgatgccggagaattgctggaggatctggatggtgacgccgcagaagagggcgtggcggacgcccggctcgagcagctcgcgccacgccgggcccgtcgacgccgccgccgccaccgcctccggcgggttcgcgaacgccggctcggtggggctctgcccgatcaggacgtccttggtgtacagcatcgaccggctcaccagcgccgccgcgtggacgtacgccgtggactgcgcgtcgccggcggcgcccgagtcaccgccgggcgcggcctcggactcctcgtgcaggtacatgcgcttcaccgcgccgcgcttgacgccgtcggggcccacgttctccgtccacttccacgccagctgccacccgccgccgatgcccatggtgctcgccgtctcgacgccgccgccgccgccgatgctgctgtgccgctgcatcgccacctggccggaggcgggctcgttcttggtctccacgtcggtgctctgccgcgacagcagcggtgcctgcaggccgccgccgtcgtcgtcgtccttgccgtcgtcggagaggtactcctcctcctcctcgtcgaggtcgtcgtcgccaggctgcacgttctcctcgtcccagctgctgccgccgggcctatcgttgacgctaagcatgctcccgaggttggggaacagcgtgctccccctcatgctgcggtggcgccgccgccggactccggcagccgctcgtggacgctcccgagaagcgccaccacggggtccttcatctgctcgtacatgctgccatggcgcgacgcctgcagccccagcgagctccccagcatgctgccgcggccgccggcgaccggctgcgccacccacgaaagcccctgctccggcccgtacagcgtgacggtgtccctcgcctgctcgttctcgccggcgtcgccctcggacgggccgacgacgtagtcctcgatctcggtgtcgccgccggtgccgaggccctcgacgagcagcgccatctcgccggagacgtctcgcggccgcgcagcatctcgagcacaaccctggcctccttcatgcgccccttgctgacgagccaccgcggcgactccgggaggtagaagacggtgacgaacaggtagagcagcgaggggacgaagaggacgccgagcatgatgcgccagttgggcgagggcgagagcgtcatggcgaagatcatgcagtaggacatgaacatgccgccggagccggtgaactgcggcagcgtgttgaggcggccgcggatctccggcggggaggtctcggagatgtagacggggacgagggtgacggcgaggccgacgccgaagccgtcgacgaggcgggcgaggaggaggacgtagacgttgggggaccagagcatgatgaggccgccggcgaagtagaggagggaggaggcgatgagcatggggcggcggccgacgaggtcggagacggggccggagaaggtggtgatgatggtggcgccgatgagggacatggcgacgacgaggccctccacggcgggctgggtctcgagggcgaactcccgcttgatgtacagcacggcgccggcgatggtggcgttgtcccatccctgcaggtagttgccgatggcggccgccacggccaccaacacggcgcctctcatcgtacgtggcgatcgatcgatctcggatcggtttctcagagaaaccacatgaaaaagcgcgagagggattggatgattttgtgcaaccaacagggcgggtgtttgggtttcatgcacccgtgtgcgtcgcacgcgaggctaacaatagcgcctagtgttgctagctagggccatccgcgccgcgtcgaacgggggatcacaacaatgcgcaagggaaacatgcatgcttgcatctacggttttgacgaattccaccggtctccacgtacgcctaccgacgcagatgttatatgcacggtatactatgtaaaagagaaaatcccttgtatatctctgaaaatcccttgtgtcccttgtatacctagctactaccaatgtttacaatatttctttttatgaatgttcccgatcgaaaaaatccattgtcctattaaaatttcaaataaaaattttaatttattacatttattttatttccaaaatttatgacaaaattttctacaccaattatttagtctcattagttttataaaatgcacacactgtgcactcaaacaaaatttttaattgtttttaagcttatatttaaacctaaataagcataaaggataaaaaaatacatttgcaaccaaacgtaacagtgaaattatggaaaatatgacggtaagagcatggatgggatcaagttgaaatttcaggggtatagaaggggtcgggtaaatttcagaggtacgaaagggattgagtgagttttcaagggtacacggggaatttactctatgcaaaactagaagggaagttatttttatccctcgagggatgccccctagttgtttttatgtcactcaaatagttacgaaaaaaattgaaaaaattgagaacatgtattaacatgtgatataacactccacaaacatgtatgttcaaattcaacttctacatctcataataaaaaaaacaaattaaaccgcagctagctatcgtatattcacaatcaaatttgtttttttcgttgtatgcactagtatagatcctctcatctgtgacggcccgtcacatgcctgcattttccgggctgtcacaacaaagtgatctcaaacaggctcaaaaagaggccgacaaagatatactcacacagacatgttagatgcgcataaaactctagcccatcacgtatggcacctattggtgatagggtttagtttaggaccgattgagataaccggtgaaatctttgccgggccctaatagaagcccatcaccgttggtccatcatcaatggcgggctccaacttgaggcccgattgagataactgttaggcccgtcaccgataactcaggcccaacaaagataactaaaatacctgtcactgttgtaagtttttttggccgttacagatatttattgcacagtataaataccccaactacctagtttaatggttatctcactgttcactgttttggtgggagtgtgagcacgacgatttttgtctcttttttccaagaaaatcataaattgcaaaagtaattgaaaaatagtggtcaattctcataaatttagtaaatacttacctgcaaaatatatatctaatatttttccaccttttggcagctcagggatcgatggatcgaagttggatgtataggaaaactgtgcgacgtcataccaaggagtatagagatggtgtattgaattttattaatgccgtggaggaggataggaaaagaacaacgattacatgtgttgtccatgcgtagattgcaaaaatttgaatatgttagatagcagagtggacgtatacgctcatctgataaaaaaaggtttcctgaagggctacacatgttggctgaagcatggcgagcacactactagaaaaatgatttttcatggtcgtatcctattattttcactggcagtcatatgagaaatccgcttgtgaaattcaaacgagagatagagggtttagaaccacaattgaaaatccatttttgctggcggtgagtttaggaccgcaagtgaaaatccatttttgctggcggttggttaaaaggtccattagcaaaaataagcctattttcactagcggcctcttaacataacgtcagcaaaaacggattttcgctggtggtcctaaagagcgccacccttgaaaaaaaatcacgcgtgctttaaaatatcacagcccattaaaaaatcgccacccaccactccttatcaacctacccatccttatcctctcattcctcctcctccctcctccctcctccctccagatccaccagatccaacaaatagcaccctctcctcctccctccctcggtggcggctctaacggtggttctggtcctcgggtggcggcgcgcggcggctccagcagctgtgtgtggcggcgatggcgacggaaggagagtgcgcagcggcgacaatagcaatgcatgcggcggtgatggcgacgaaaggcgagcatcggttctcgggcggtgacgcgcagtccctttgcctccctcctcttgccgcctctttccctcctcccttctctctccaccgccaccagcctcccttccctctccaccgctgtgtgggggaagagggcagtggcacggggaaggaggtgtggcagcggcgtggcgtatggcgcggcggaggttcttgacagcaagcgggcggcgccggagctgaggacaggcaactacgacgacgacaaccacgaacgcggcggcgacgacgacgacaacgacgctaccggccgggagcgtggatccgccatcgactatcctcaggagcatggctctggcggcggagaggctcccaggcggtggatctaaggtggccgggctcggcgaccttgaccacgcacggttactccccaacctctatctcttctggatctggcttggggccgaggggaggagaccggcggcggcggcaacagctgctcctccagtcccaaatctggcagcggcttctttatgcatttgatttgaatttggggagcgcttgggaactacggttgctagatgtggatttttctcaatgcactatcttcccattctattgcagatttatttgatgtagatgatttatgtattacgtaatagagatgatgtagatgctttgatttgtatgtcatgtttgatcagtggaaataagcagcaaaggaaatgctttgatttgtatgtcatgtttgaatgtttgatttgtggaaataagcaggaaaggaaatatgcgcgtcggtatttttattttatttttattttttgccaaaatccatcatcacttgaggtcgtcttaaccggccaccagtgaaaatcttctttttgctgatggctgccttaatctaaccaccagcaaaaatggatctttgctagcggctggcttaagatgaccgccagtgaagatcagatcttcactggccattgctttgtggcggctctaaattccaccaacgaaaacctaaaatggtgcacaaaatgaagaatgtgaagatcatgagcacgaatcaggaagtggtgcacatgaagatgaccatgacaagtttgtaccttcttcattgggcgttgaaatggttgatgtggatcacgatctattgcaagacatgttacgtgacattgaggacccagcttacaaagagagattcctgaagttcagcaggttggtcagtgactcagaaatgcctttgtacgcagatgcaaagcaaaacacactaagttgtcagcaaccttggacctaatgaagccgaaggaaagtagtcgattgacagacgagtttcacagacttttttaggaatttttatggttttacttcctgatgagaacacattgcccgagacgacatgtgaaacaaagcatgttttgtgtcccctggggttagaagtccgtagaattaacgcttgtccgaatgactacatattgtaccacaaccaaatgccgacttagatgcttgccctgtctgagggccttctcgatacaagcgaaagaatagtgctgacaaaggaaagaagttaaagcggggtggtctgacaaaggttgtgtggtaccttcatatcattgatcgttttcaatagaatctttgccaaccctaaggaagcgaagtttgtacgttggcatgccacagacagaaggaacgacgatatgcttagacacatagtagattcgattcaatagaggaatatcgatcgaagacacgaagactttgctgctgacccaagaaacatgaggatatgtctgtgtacggatggcatgaattcttttggagacatgactagtactcatagcacttggccatttgttattgcaaaatttaacctatcaccatggttgtgcttcaaaaggaaggccgatcttatctcttcacgaaggaaggttgtcaggtgttggcacaataagcaagaaaagaattgttcccgatcaagcctcctatgtgcaggctcatttcgctgtgctccaacatacggcgcctctcatcggcgatctctcgtacgtgacgatcgatcaatcgatctcagtttctcaaagaaaccacatgaataagagaacgtgaggctggctaacaatagggcctgtgttgctagctagcgccatccacgctgcatcgaacgggggaccacaacaacgcgcgcgagaaacacgcatgcatgcatgcatccacggttttgacgaattccactagattgactccacgtatgcctactgacgcgacaatcaatcattttgatgaatacctaggcagctactatacatgcaaaactaaacgtaacaaacaaattaaccgcatctgaggagaccggatattcggaagaaatatatcgattggtagccggccgccgcgcacccaacaacgaattgcggttcatcacttcattcatccaatcatatgataaaatatgacccatttggccaactttattgggccgcctcaacaaccgagggaagccgtggagtgagctgttacttaattattctgagactatagatggtcaaattggtcgcctggcatggtccaacccatgcacgaccaaggcacggctttagattggtcggggtagcatagcataatcgacatgccgagtcgtacctgtgttgctagctaaggccatcgatgtttcgtcgaatgggggatcacaacaatgcacgtgagaaacacgcatgcatgcatgcatccatgattctgatgaactccaccggattgactccacgtatgcctactaacgcgtcgatcgatggttttgacgaatacctagggagctactatataagcaaaactaaacgtaccaaacaaattaaccgcatatgaggagtctggatatacggaagaaatatatcgatcggtagccgaccgccaggaacccaacagcatcttgcgctttatcacttcattcatccaatcatacgataaaataggacccatttgtccatcatcattgggccacctcaacagcccagggaaaccgtggtgtgagctgttacttaattttgctgagactatagatggccaaatggatcgcccggcatggcccggccaaggttcgagcaaggcacagcctgagatttgtcgggacggcatagccgattcaacatgccacgtcgtgccagtgttgctagttagggccatccacgccgcgtcgaacgggggatgataacaacgcacacgagaaacacacaagcatgcattcatccacggttttgatgaagtccaccggatcgactccatgtacgcctacttgacacgacgatcgatggttttgacgaatacctaggtagctactatacatgcaaaactaaacataacaaacaaattaaccgcatttgaggagttcggatatacggaagaaatatgtcgatcagtagacggccgccgagcacccgacaacgtcttgcgttttatcacttctttcatccaatcaaacgataaaataggacccatttggccatctatattgggccgcctcaacagtcgagggaagccgcggtgtgagttgttacttaattttgctgacactatagatggccaaatgggtcacccggtatggcccagcccaggcaagaccaaggcatggcctgagattggttggggtggcatagccgaatcgacatgttgtgccgtgcctgcgttgctagctagggccatccaggccgcgtcgaataggggatcacaacaacgcacttgagaaacacacatgtatgcatccacggttttgacgaattccatcagatcgactccacgtacgcctaccgacacgacgatcgatggttttgacgaatacctagggagctactatatatgcaaaactaaacgtaccaaacaaattaaccgcatatgacgagtctggatatacggaagaaatatatcgatcggtagccaaccgccaggaacccaacagcgtcttgcgttttatcacttcattcatccaatcatacgataaaataggacccatttgtccatcttcattgggtcgcctcaacagccagggaaaccgtggtgtgagctgttacttaattttgctgagactatagatggccaaatggatcgcccggcatggcccagccaaggcacgagcaagtcacagcctgagatttgtcagggcggcacagccgaatcaacatgccacgtcgtgctagcgttgctagttagggccatccacgccgcgtcgaacgggggatgacaacaacgcacttgagaaacaggcatgcatgcatgcatccacggttttgatgaagtccaccggatcgactccatgtactcctactttacacgacgatcggtggttttgacgaatacctaggcagctactatacatgcaaaactaaacgtaacaaacaaattaaccgcatctgaggagtccggatgtacggaagaaatatatcaatcagtagacggccgtcgggcactcgacagcgtattgcgttttatcacttctttcatccaatcaaacgataaaataggacccatttggccatctatattgtgccgcctcaacagtcgagggaagccgcggtgtgagctgttacttaattttgctgacactatagatggccaaatgggtcacccggtatggcccagcctaggcaagaccaaggcagggcctgagtttggtcggggtggcatagccgaatcgacatgttgtgccgtgcctgcggtgctagctagggccatccacaccgcgtcgaataggggatcacaacaacgcgcttgagaaacacgcatgcatgcatccacggttttgatgaattccatcagattgactccacgtacgcctaccgacacgacgatcgatggttttgacgaattcctaggcagctactatgtatgcaaaactaagcgtaacaaacaaattaaccacatcagaggagtccggatatacggaagaaatatatcgatcggtagccgaccgccgggaacccaacagcgtcttgcgttttatcacatcattcatccaatcttacgatcaaattggacccatttggccatctttattggtctgcctcaacagccgagagaagccgcggtatgagctggtacttaattttgctgagactatagatggccaaatgggtcgacggacatggcctagcccaggcacgaccaaggcacggccggagattggtcggggcggcacagccgaatcaacgggccgtgccgtgcctgcgttgctaggtagggccatccacgccacgccgaacaggggatcacaacaatgcccgcgagaaatacgcatgcatgcatccacgatcttgtcgaattccaccggatcgactccacgtacgcctattgacgcgactatcgattgttttgacgaacacctaggtagctactatatatgcaaaactaaatgtaccaaacaaattaactgtatatgaggagtccagatatacggaaggaatatattgatcgatagccgaccgccgggaacccaacaacgtcttgcgttttatcacatcattcatgcaatcttatgataaaattagacccatttgaccatcttcgttgggccgcctcaacagccaagagaagccgcggtgtgagctgttagttaattttgctgagactatagatggccaaatgggtcgcttggcatggcccagcccaggcacgaccaaggcatggcctgagatttgtcggggcggcacagccgaattgacaggccatgccgtgcctacgttactaggttgggccttccacgctgtgctgaacgggggatcacaaaaatgcacgcaagaaacacgtatgcatgcatgcatgcatccacggttttgacgaattccaccggatcgactccacgtacgcctatcgacgcgacgatcgatggttttgatgaatacctacgtagctagtatatatgcaaaactaaacgtaccaaacatattaaccgcatatgagaagtctagatatacggaagaaatatattgatcggtagccgaccgctgggaacccaacaacgtctt

SEQ ID NO: 24667 - DNA, 10882 bp, Oryza sativa
aaataggacccatttggccatctttattgggccagctcaacagccgagagaggctgcggtgtgagctgttacttaattttgcggacactatagattgccaaatgtgtcgcccggtatggcccagccctggcacgaccgaggcacgtcctgagattggtcggggcggcacagccgaatcgacaggccaaaccgtgcttgcgttgctaggtagggccatccacgccgcgctgaacgagggatcacaacaatgctcgcgcgagaaacacgcatgcatgcatgcatgcatccacggttttgacgaattccaccggatcgactccacgtacgcctatcgacgcgacgatcgatggttttgatgaatacctaggtagctagtatatatgcaaaactaaacgtaccaaacaaattaaccgcatatgaggagtccagatatacggaagaaatatattgatcggtagccgaccgccaggaacccaacagcgtcttgcattttatcacgtcattcatccaatcttacgataaaattggacccatttggccatttttattgggtcgtctcaacagccgagagaagccgcggtgtgagctgttacttaattttgttaagactatagatggccaaatgggtcgcctggcatggcccagccctggcaggaccaaggcatggcctgtgattggtcgggttggcacagccgaattgacatgccgtcccgtgtctgcgttgctagctagggccatccactttgcgtcgaacgggggatcacaacaacgcgcttgagaaacacatatgcatgcatccacggttttgacgaattccaccgcatcgactccacgtatgcctaccgacgcgacgattgatggttttgatgaatgcataggcagctactatatatgcaaacctaagtgtatcaaacaaattaaccgcatctgaggagtccggatattcggaagaaatatatcgatcggtagctgaccgccgggaacccaacagcatcttgcgttttatcacatcattcatccaatcttacgataaaataggacccatttggccatctttattgggccgcctcaacagccgatagaagccacagtgtgagctgctacttaattttgctgagactatagatggccaaatgggttgcccggcatggcccagcccaagcacgaccaaggcacggcctatgatttgtcggggcggcatagccgaatcgataggtcgtgccgagcctgcgttgctaggtagggccatccacaccgcggcgaacgggggatcacaacaacgcgcgcgagaaacaagcatgcaagcatgcatgcatccacggttttgatgaattccaccacatacgacaaggatgaataaagttctacatggaaacgacaaggactactcggattgtatccatattggtttccctagttctacttggacaaggggacaactatgggtataaatacaaggcgccctaggtggagagaggacacggaacaatagatcaagacacgagatcaacatacaagccaacatgcccaagacaagacgccagatatcgacttcagagataagcatggctagtcccctacggtgtctacagatactgtcaggagagatatagcgctgtctttaatctcgccggatgcggattcgaggaggaaggctaccctgttgtcgactacgagtcagcacttcagaccgccaagtcgacaacagttagataggctaccccaaatattgtactggtgtgattatggtgaataagagtaacgaccggtttcggccaacaagagtagggttattacctgacaattcaggggcccgaacctgtataaaaatcatcgtccacatctcttttattacaatctcgcatatatcctagtaccaacgatccccatactatgctaataacagaatcacgacatcaaacgttgtcacaccctaaaaatcccaaatatataaattgttgtttaattggaattataagaattgatttttaaaagcctagaagagaagatctaattttaaattataaattccaatataaaagtgggccagataaaatttcattaaatacttttcttgattctatagttcctagatttttttgggatttatttgagccaaggaagtatttttaataaatggaattgcatttcatgaataatttaaattgaaaaaagtttttaaaatcctcttttggctttgggccgaaagtcggcccaaaccctctctctctctcccggcccaggtcggcccgcagccgagccaccgcccgcgcacgcgccctcgcccgctgacaggtaggggcccacctgtcagactcgtcgtcttcctcgcaccgtcgcccagccgaaccctagccgagttgcgccgccgccgcccttccaaattcgatcgtgtctttccatctccggtgaaattgatagagggaaaatgatccccgcgatccattctatcttttcccttttggaatcattggctaattccgtttggaaatctgtggattcgatctcgaatcggattcgtctttctccccgaaccctaaaccttccttcgccgttgccggtcgtcgtgggcctctactgccgccgctagcccctatataatggaccccggtgtctcctctctccgtcgccaccctcgccttagctcgccgccgcctgtagcatcgcctccgcgttcaacggtgcaccgccgtcgccgttgttcgtccagccgtgcgccgccgtcgctccggtcgtcgtcgtcgctcgggaaggccgccgtcgtgatcgccaagccgtcgccgacctcgtccacccctccgtcgttgccgtaggtcgccggagcaccgccgtcatcgtcaagccgaaggtcgccaccgcttcttcctcgacgccatcgccatccgttgatcttccgccgctgctttggtcaccggtgatcagttcgccgcgtcgcccacaacccgtaggtgcccttcgttagtgctgccgcaccgtcgttcgccggcgagcatgcaccgtccgagccgtcgccggtgatgacgtcaccgctgacgtcatcatcgtcatgtcgtgaaccgccgtggactagatcgatctcggccgtccgatttggttagagtgatctcggccgttcgttcccgtagaccgccgccgtgcacccggtccaccgtgaaccctagccgctgacgcaataatccccttttccttttcaaaaataattcattattgcgtcataattccattaaaatccatataaatgatttaatccgatttaatctttgaaaattcataactaattcatcctagctcggatttagttggttcaagtctctaaatttttctaaaattgagatctacatgttaaaaatatccacatatactgttcatgcttgtttatgtactgttttggtgattttgttcttttctctttagatttcgacgttcctggagagtccgattttgcaagagaagactttgaagagttccaaggccagcaaggcaagtcacacagatcccaaacaaccctttgagcatgttgatcccgtttaaagctattgtttctattcaactactgcatttatttttgaatgtcattgggtggaattaacctattgttttgtcatagccctttttgttcttgattactttattccttgataccttgggttattataacttcactagttgagctttatatatgggttcagctggatattagatataattgcttagccatgcttagaaacattagcacactattgggataacttatgcttcactattatttaatgatggcttaatgatagctcatgatggttaattatgattggttaattaattaattcgccaactaaaatttgataatggtgggttgtgagcatatggttttgatggttgtgctcatgacaattaaggaccggttcacgattttcggttgtgaaatatttaccgtgccaaccacaaaccagcgtgggcaacggctttactttctgtatagtatggttcatagtagagcactagactgtgaagtggcggagataagcccacgggggtcgctagggagtccataccttgtttataagggggtgattatgatccgggaacggtgcactgctttgaattgtattatatggagggtattgtcacaatttctattcgggtacttattaagtatcgcgacgcatggttgacatgatgttgaggttgtgtcttgtgggtacagtggtacacctctggccagagtttaaactattcgaatagccgtgcccgcggttatgggcgagtctaacaatgtctttcgtgattagtctcacacctctcactataataaatgatgctgttaagaacttgtttagctcctggtttggaatggttaattcctggtttggagatagaactgtgcagccgggattggttgttcggaatggttgggcctatgcaacagggtatgttgtatagcgttggattaatattgtttaattattatttaactgttttattaaattctgaaatatttgttaaatgctatttatgcaaatgagactatactatgccatcctttgttatcctgtgcacttgcatatttgttgtgtggcttgctgagtatgtcagaggaggagttctacagcgatgctaatggtgtggatgattaggcgtagccctggtcaagctgcctgtggagaggagtcgcctgcgctgtttcttttattttccgctgcttacaactttattgattgagaggaactatctatctcggtaatgacattttattcgcttattaattagagtaataattgtactctattatcaatttgttattgtgtgcctcggctgattcctggacgagggtttaaacatatgtaagcgtttggaattttggatagaaattctgggcgtgacaaacgtcgacagggtggatagtgcctgaagaaaaatttattccctggtcttaaagaatgttttctaagtagtgttcatgctaactatacaagactggattggatatatatatatatacacacacataccgatcaagcgtattaattagaacttgtagatagtaatctgctgatgaattgtcactactacaaaacatcaaataggtgtcagcactataggtgccggaagtgttaaaaccggcacatataggcattttcccacctctgtgatccggaaatacaaaaaaccggtacctttaggtggtaataggtgtctgttctataaaaaaaaacgacccctatactataggtgtcggttttagagtaaaaatcgacacctttaattaattataggtgttggcattttaaccgacatatataataaattaaaagtgtcagctttttaaaaaatccgacaccttttacaaaccgagccgagccgagccgagccaaggagatatttcttctcccagcggggtccaccctcggaggagataagcccggcgaggcgcactgagactgaggataaggccaccactcgattttttctcctctctctcgttcactctgcaagtacacctcctcctcctctcacggccccatcccttcccccacctccgccgccgagccgaggcggcaggcggtgctcggcggtgttgacggtcattatcgatcagtttcgaccgtcaatatcaccaaaatagaggagaactagtgatgtttgcaatgcatatatttgctagaataataatattccactagtattaggtctactaaactttacatagtgacaataaagtggaggagaatcgacatcaacatagacaataaatcaatcggacgatgtcgagtgttagacttatgcatgaatggaccaagaactcagaattgacatgacacactgggccaaaattcacaagtctacggaggagaacaacaaaggaggccacctgctgaatatgggccaggttgggtcggccttctggttcggccgaacctcccctggcgccgttggatcgaggtttttgctggacggcgtggatcactccccaacgatggttggagggcaattccgaccattccaactgccacaaccgtcattggcagcctatttaaggagctcctcttctcacttcactcacacacctcaagcaatagctctctcatttctctcaagtttagcttagtagtatctagctagtggaataggaatagagtagaaatcaggagtccggaagccttcggaagagtttggctatggctctagtagcttttctcttctcttttgtaagctttgtacttttattagaatactcttctaaatatatttatggtattgaaatactttccgagtatatgagtacctaccttacattatattcatgttatactgaatatatgactattagcttatctaggagatgctttggtgcgggtataatgttggcttatgcaattactctatgtcatgacgataatattagagtagtatctgatagtttaggcgtggtgtctagattacgggatatcattatttggggttaaatattgcggatgagaggtgggccgctgatggtgacagctcagtacgggtattcctccgtgccagtatatcatcctaagttaattccctggggagtgtattcctccgtatttagccccggttgtatggtcatgacgggctgtcgtaaggaactcggcagtcaggggtggcttctcgaagtaccaggagggcatcggatagagggtattagctagtatatcggttaactaaaatgtatgtatatggcagtcagggatggcttctcgaagtaccaggagggcatcggatagagggtattagctagtatattggttaactaaaatgtatgtataccatgtatattagaagtataggaatagataatatattatgagaatgagtagttaatgcttgtgtgtcactctactcttggattatcttaacccctgcttagaatatgattatcacaaataatatataaattattagtcaagctctctctacatgatcttcccactggataaaataaatacgatacccttggaatactcttaggtgaaatgctacaatggtatatccgtgcgcttgcggatgagctctgtaaccataatataccagaagtatttctgcgtcattgctgggaattatatttctagtaatgtggttaagaattaccaacaggcggcgggcgacgggtggcggtggcggcggcgcgtggagacacaccggcccagcggcggtagcggtgggaggtagcatgcggcggcggaagggacggaagggagggggatgcggaggcggtggaaaggagaggggatctggcggctcccctccgccagatctgcctaggacgggaggcggcaacctggcgcgaggtgccgcggcggaagcggtggcgctctcttccagatccggccgggagcggtggcccggcatggaggatgaggcggcaagttattgatttgtgcgctgtgttattgatttgtgcgatgtatttatgcgatgtgttcttgacttgtgcgatgtatttgtgcgttgtgtttggtgcgatgtattttgtgcgatgtgccagaggatgtgttcttactgtggatgtgggtttaggctttttttttattcgtgaaacctcaaaggtgccggttctaaacaactggcacctatttgattttcaaatcagtgccgtctccgtggtcccagttgtgaaaaccggcacctaatggggtttgcaaccggcaccgatttgtgtgtctgtagcggtgtgtgacaattacatcatggatgagctcgcttgttcccgtgaaatcgtcaccgagttcgcgcagcatgtacgcggactctgcccagaaatctactaccaacgagaactcgttgcaagttcgttttctgcgcacgcaagtcatttactaattgttatattttgggacgaaaggtattttgggacggagggagtagtagatatacgatttttattaaaactgtgttcagtacagactgacaggtacacacattcactaattaggaattaactatatgctttgaaagaataagggacatctgcaggaacccaagcccactttcatcgtcgtgctccgcaaactcccactgaactcgtgcatcgccgtttcctgctacctgccaatcctaagctccaacatcgaccagaaaaaagtgaagtgattagcttcaaaaaacacaaagtttctacccatagccggccatcagtctcatcattagctggggatgcatgatatctctaaagaactttctgatgatccgcctctgtaaattcaaagccttctataaaactgttagatgtgtgttgtctgtgaatttagtttttctgaagcaagtcgctagtgagagattgtactgtggataaattcttcccatgtgtccacctatttattagggtatgctaagacagctctaccgatgttgatgactagcccattggtacgttactccctacatttgtctgtccaaaatttccacatatgcctgcttatgtgttatgtactagtcgttttattgatttttttttgctggttgtattttaattgagatagttaagtattaaagtttatttcacattcataatttttaaatttaaagtttatcttcctaatcttgtgaggacctaagtcttgtccacttgtctagacaagtagaaaataccaacttaccaagctagacccatcttttgagcaagcatttatatgtcgaatttgctatatatttgtatatagtgagattttgggagaaactaatacagtacattgatatgcaactaacaactaaccgcccgttaacatttctcctcaccgcagtacttgctttcctgacgaaccattgaactatgatgagcagaggaaacagaacgagcacctaggcgcaaatcgagcagcccgtggaacaacattcttcagtctttcgtcgtatctgactcccgatgcctcaagcccttgctttggttagcacgtgcaacagcaacatatatatcaaattagtaacgaacaagaagagcaagtttcacagcttatacatgcttaatttgcttgtatgatatgattgtgcaattctcagttacttggtatatctttgcttgtgctgtaactaaccggttagggtggatatatatacctgtatctcttctgtatagttttttttcccttgaaactgggggaaatttaatgcttcagttagcatccagtactcaactacccacaatgcttctgcttgtaagagcaggtacaatagcaggctataagccagctataaacatattttaaagagataaaggaagagagaaaaaagcagcgggctacagatctgtagcaagctgcagcacagactttaagacgtaatgtgcgtatgataggtgggaccaagtattaataatatagtaagtaactattgtatgaattggctactagattgggctatagatgaattggaactagtagtgggctatcctattgaatttgctctaatatgtatactgtatctgttatgactccgtggtgagttattacaaatagctaattaaaaacgggcgtagacactagctagccgccacatcaaccattgagttcttgcaaatggtacctgtccaattagtaaaggggaacactaggaagcataatatcatgtcacagcatcactgaactcttagaacagctcaagagtctagacgacgccaaggagcctcccaaatttagtttacagtatcggttggtatttgtagtaaacatctcgaaggatccatttttaattttttaagataaaatttagactttctctcgtcgatatcagtttttttttacttttattttcagtttaggggaaaaaaactttttgggaaagattatacgtaatctattaataataatgctctaacaattacatcattgatgagcttgcttgttcccgtgaaatggtcaccgaggccctgtttagatcccaaaaacttttcacaaaaacatcgcatcgaatctttgatacatttataaagcattaaatatagataaaaataaaactaattgcacagcttgcatgtaaatcgcgagatgaatctcttgagcctaattagtccataattagccataagttctacagtaacccacatgtgctaatgacggcttaattatgctcaaaagattcgtctcacggttttctagcaagttatgaaattagtttttttattcgtgtccgaaaaccctttccgacatccggtcaaacgtccgatgtgatacccaaaagttttcatttcaccaactaaacaagctccgagctcgcacatcccgtacgcgaactctgcccagaaatctgctatacccacgcgaactcgttgcaagttagctttatgcgcacgcgaacttgtagtagccacttcgcgttgtcagcgcgcgatgctgttgacagcgctaattcgcacaattccaccacgaacaaagctacgatcgagttcgcatggccaccaagtgacgatgatttattctcgtaaaatattttatcaccagtatattttcaagaaaaataatggatgacaatattttttttactttatttctctatgcgacggcagaatggaccatgcatgctgacatgcatgagatctacaaggtactggattcctaatgcctttcaagcctaaatccatacggaccatataaaatgtatgcctatagtttacaaggtcatcattggaaggaatcgaatttatacacatatatcaggagggaaaattgttttaaactgttgggggaatatcacctcatttattcaaactagtaaggtagcccgcgcagttgcgcgggcatcttatttaaatttgttattaggattttgaatattatgactttgtctctcaatgaaagaatttgaatgttcctttataacacatgattgaaaaaaaaagtataaaggccggatacatgttaca

SEQ ID NO: 24668 - DNA, 16046 bp, Oryza sativa
taggcagcgtaaagccacgaaccaaactcatactaagagtcctaaacaccttaggaaaccctctagtacaagaaagaaactttacataaccaatcgtaccaaatttggactccttctaaattcgactccgcatcccatacgcacacaatacctccatcgtatgccatatggaatctccatcaaccacgtgcatcaactctagcattagtatcccgcataatatctgaccaccatggacaccgtcttaccaccaagccaactcccggtccatcaccgcaaatactcacccgaggcatcgagccacctacacatgaaacaaacaaagaaaccatattctgagaccaagctatccccaacttgactcattgttagcaaacaacagtattatatacgtatagtatccatctagaatccataaccatgaaacaatcacggatatccaaagaaacaacccgaaatcgaaaccgacacaacgtcggccggtcagaccgcgggaatggccagtctgaccacacacatagcaccggtctgaccggcaacctccacccggtcggaccggtcacataaaataacagtgaatccgatcatcacctgaaaaatgattatctccaaaaccacttcgacgataatctccaaatatcaaaaccaataatcacagataccaattgttcatcacagaataagaatcaaaacacactttgatcttacaatctcccccttaatgaacacattggcaaacctcatcaaaaatgttttggtgtttggaaaaataaaaacaaaagtggtaaaaagcacacttcgtacaaatgtacacattgtgcttaaaaatccaaaagaaaacttctccccctttttaaaagaaagaaattcccaattgaaccaaaaacatgctcttctcaaaaactcttcaaaaattcaccttgcttctccaaaagtccaacaattttcacattacttcttccccttttgacaatgattccatcaagcataggaattatgttcattaatgttcaagagcttagcatacatatagcatatcatgtcatgtgttgcaataaaaggaagataaacccatctataacataagaaagcatgcattaaattataaccatgaaccaaagattttacaattaagcttgaatcaacaatcaaaatttatgatttcatacgatttataatgcaacatcttaacaagcacataggttgaagaataaacactaaacacatatacctattgcatttatcactctttctcaaataaactttagcacaaaataaccaagagatttttttttaattttttcttttcttgagtctttttctcatatttttctctttttttattccgggtacgtccctgtcgtcaagactgtttccaaggattcggtattcattttttcatattttttattctctttttcacaatgagcaattaaagctatttgaggaataacaattcaataaagcatatatatagaacatttatagatcaaaccatatgctagcagcaacattgcatattttcttaattcaagtgtagaatttaaatgtcatgcatcatcttccttaaaagcaaaatctaaatatcatgaaaagactagaatacatacaagctatgctagagacaaataaaccttcgaagtattgctagcatgcacaagaaaataccaataatcacagatgccaattgttcatcacagaataagaatcaaaacacactttgatcttacagtcattatcgccgtctctaaatcattaaatagccgaagcatagcttgtgaaggcttcaaggctccaggagttgaagaacggttcatgaaagctttgaagtccgcttcattgaggaggagatggatcttttattttttgtcatctttcaagtggacatcttcaagcatggtttttggattaatcctaatttgttgtcgatctagtttttagttccaaatgcaatgtgtacacgttgcatttgaatggggatgtcaagtataagtgtgtctctaggggtagtattgtaacttcgcatctattgtagacaatttatattgctctttgggtctaatccaatcttattgttcattccccaaattcccccaaattgtgccaattattatataaacgtgatacttaagagagataatatcgatttacttgcgaagtgagcatagctcaactggttaggttccttgcggcggaaccaacccacctgcgttacggctaattattctttcattgatagacgacatacccgtcgacagcaaggcacctctagtgacttcgtcaatctcaaaatatgcctgccaagtcttccggagatgctcataggggtagggtgtgcgtgtgtgcgtttacaggggtgagtgcgcgcgtgttgtgagcgcctgcgtttaaaaaaatatcgctttactcatgtagatataagaggtcattattttctcctaataaaaaatggaaatattgctttaatcctatagatataagaggtcattattttcctgtaataaaaaatggcttgagtgtacataagcgcatattttcaccaaggaacacactgaaagcagacgactactcctttaaacaaaacaatttttttgaaatgaatggcatacgccctggttttgattgagagcagttcatttctcacataatattgccgaacggacaaatgttcagttagttttcatttttacgtgtactatgatcaagcaaaagatgctgcgtgtgtagaaccacacaatttaattttgcaccgggaaatactgtttgttctgttcttcatcctcctccaccgatacaattgcagtgcgaaaacaacatattttgcaaggtggttcatctgcttaaattttattgccagttcaacatctgtttgccgccggccgaagcaacgaaactgaaccagtagcgattcatcaggaacggtgatagcatcgtcaagacgcctccctcgcttgatccctaaagtgtcccggcgcaatgtccacggctagcaggctgcccaaacgtagcagacaacaagagtattctccagcagaatgctccaaaatcaggcacgatgcatccatatttatggcttgtgaacttcatggcagtgaattcgcaaaccagataatccaagcgatgttcttgtcaggccaagtccatgaatacatgatgtcccaacagatctggtagcaccgactcatgacaactatcccaatgcctcaaagtcctaagaatatgtcttcaataatattcagccaataggagtttgagaggggaattgcacgcccttcattatatctatttgaaatgagcatatggcatgtgtttatatatggaaatccggggatatgaacgcgaatagtattgtacggttttgggtatgaatgtggtatcctaaattctggcatatatggattatccaaaatttccattggattatccattaagttttttccaagatctgaaattgttagctcacatggccaatctactccatatatacaacataagtaatgacaaaattaaaatttatcaacattgcgtcaaaagggaggatgcctatgtaggatcgtaaagggtctttcccatcacaaaaactagccattgaagtgaggggggctcccccacttgtattttaggtcttttgtccttccacaaccaatgtgtaactattcaacaatctcccccttcacacattagtgtctctcagcacttcacggcccctttaccgtataccaattgtaaagggtcattcccaccccaaaagctagccattgaggtgaggggcccccacttatatcttaggttctctgctcttccacaaccaatgtgggattattcaacagcctcttatgaagtaaaaccgtagcaaagtagcaaataaaaaaaagtatgaagtttgcgaatccaaattagaatttcacaatataatctcatagcgtcatcgttccatctgcatctcaaaagacatggaaaaatgaatgaagcaacaaaataatttgtcggtgaaaccttgtatcgctagcgatttaaaagttattgctgaaaaataaactaccataaaaaaaacccctgaaaatcaatgcgtatgccttggaaatctcatggcaagaactccgtaggattccctctctattattatgtttatcatgaactacctcttaattattagataaacacgatagttaggaggagtaacatagtccttggatgtactgtgttttaatataagaggtccctaatttattttaatgtataatgaattgagtgtgcacagaatgcaaatgatcagtctttcggacataaccactttttgaaaagaaaggcttattattacagagagcccgactacggtgctctctctcatttgatcgaagtattcagatctatttatgtgtactagaatactgaataacggtagtagaaaaaataggtatgaaggagtataattgtcattcttcttttttttttctcattttcatggaatatgatcgatgccaatgtaatggatgaccacagatcaatttggccaaaaaaaaaagtgacaaagttacccctaatcaatatactagtaaattacttaaaaaaggtatttgcaggcgggccaaatccatctttccaagcggacgtgcgttctacctgcaagcaaaggcttgcgaaaatagatgattttcgcaggcgggcccgcggcatgatttttggtggaggaaatgataagatgagacttagatatttttttggtgacatgatttttacaggcggaccacataaggttccgcctgcaaaatcatattttttttcaggcggaccacataagaggaatttttgcaggggacctcttaagtagtccgtctgaaaaaattgattatcgcaagtgggcagcgagattcaccccggtttatatttttgtacgcagctatttgactccgagggtcatgttcgtatgggaaaataaaaaccccacgtctgcaaaaatggctttttctagtagtgtaatttacccttaataacgaatggcttagattgggtagtataatgctactagtacagagcatcattgtcacagaacaatgctgaatggacaactgtccaatcattttttttttcgaggactatgaatcacgttgaacacggctcttccactgcaaatgatcttgcggaagatggcatagagcttgggatttttctgtgttacgcgcgtgcgtagaaccaaaacagtttaatttttcagcgggaaatacagttagatgtatttttctaatctaaaaattgtttgagtgtacataaccgtgtattttcaccgaggaacactgaaagcatgatgactactcctttcgacagaacaatattttgaaatgaatggcatacgcactggttttgattgagaacacagttcacagaatattgccgaacggacaacagttcagttcgttttcatttttacgtgcactacgatcaagcagaagatgctgcctgtggtagaaccatacagtttaattttgcaccgggaaatacagtttagctagttctccatcctccttcttgttccctagaaagtgtcctggataaatagccaaagctatatcaggctacccaaacagtattctccagctgaatgcttcaaaagtcaggcatgatgcatccatacttagtggcttgtgaacttcatggcagtaaaatcacgaaccagataatcaagtgatgttactgccagcccaaggccgcgaagacacgatgttcgaattgatctggtagcaccgactcatgtcaactatcccaatgcctcaaagtcctaagaatacgtcttcggtgataatcttcagtaggtgttttagaaggcaagttaaggaattacacgccatccattatatccggaagggacgtaaattagagctcatcagtacagttcctatacggtatatatcctctcattgtgtcagccgaatttgaaaaactccatggaattatttcttgccagctagttccaagtgtattgcaaatccgattgattggctcaaatagaagaatatgactgcaggatgtaaccacaaagctaccttgcttgacatctcggctgcacacatctattatgaagattaataatttacctcgattttcgtttcacgcttgtcaaacaactaaacggtgtgtttcatatgaaaactttctatatatatgttgctttaaaatatcaaatatatctattagtcaagtttgtaataattaaaacttgattaatcatgttgaaatagctatctcgttttatgtgctccaactttatttttatcttcataagtttcgaacaccacctgcataatggtggcagtatacttctagcaataccaaaaattaatccattcccgagccaagtctgcatcattttcaatacgactgaaaatggatctgacctgtcgcgctttgaatctgtttgaaataaggacttggatatggatgtagtgtggatgtgggtagtatgatgcgaatttggatgtgtggtatcccaacattctaccatatatggattatccgatatttttatcggattatccggcaagttttttgtcggagctcacatgaccattttatttactctatacaacacaagttatgacaaaattaatattttagtcaactttgtgtcaaaagagaggatgcctctcatctcttttgctacggagaaaaattgtggcgaagcggcaacttaaaaaaattgtgaacttcataagcaaatataagtgagatttccacggcataatctcatagcttcatacttttcttgacgctcataagagggggaaaaaataaaggaagcaactaaaaatattttatgggtagacgtaggatcaagaagacttactagagggagtgagtaggcggttttaaattttttgtccaaaccaggttttgtatgcggaagcgcaaatcaaaacggctttgcacaacaactcctaaaactaataatctcaactaaatgcacaaggaagatagcctatgttaaggtttttaagcgtaagatgatattatcacaaataaactatacaatgtaaacttgcataaagtaaattggcacaaatgtaaattgcacaaaacaaaggagataagagacaacagatttttccacccaatgttcggaagcttgccaacttgctacgtcaccgtttatgcaagcccaacttcaccgctcaaacaatcaaacctccgaaccacctcatcaagaaatgggcaatgtgagatccggtcccgaagtggtccaagaaatattcttaactccattatacctttgccttgcgctatccaacttgggatcaatgcttgagtcaagatcaacgcttgtgaccatgtttatgttaagatcttaacaatcatttatcaagattttcttctcattgcatgctttatttcattattatcaatatggcgatgtccttggcttggtgacaatcaatgcatgatgtcatctatatgcctcatcatggttggtcatattcttttgcacagctcaaaggaaaacactagtgccaacaaattagttgtcatcctccagttgatggttgcattgaaatatataaatatgtttgttgatttttttttcgatttaaagtttgttgagtatttaacaacaccacaactaacatatactcaaacatgagctcacgtgcaaagattcaatatgtatctagaacatgcatacaaatgcattggattttgtccccctaaaattcagcaaaggaatataaaaatatgcgtaagtagagaagaaccaatgggggtttatcctatatacatggagaagtataaacacatgccttcatgtcaatgtagaggagactaaataaggtaaggctgaagtaaacattaaactctcacttatatatcgaaaacatgaaaatcatatatatgaaccatcatatatacgaacctatcaaaaagtagaagataagaagtgctacacatattacttaatcttcatgcattttatccttgtcatgactaaggtctatcaccaaagaattcatatcttccacatctcattattgagaaaagcctagttgaaaacttattacaaaagaaaaggttaatcccggaaaattcggtcttttatctatcacaaaaactacaattatgcaatttgcttgatccaaaatctatcaacattttctctcgttggtattggatgataacctaatataaacaataaagagatgggatgaaaaatgatttcaaattaagatagtgatcttataatgaataaaatatagaatgaggggatatagaatgagcacctcaagatgtgcatagacatggatacaaaggaagacatctacgtgtaaagttcaatacatacctttcgcatttttattttcatatccaaatgaaactagtcaaacaaaaaactcataaaaacgttaattagtcttatataattagatttggcactaatcaccaaaaccaaatttaggcacaatagaacttttctatatatattctttagtgatttaaaagatattgctgaaaaataaacaacaatacaataaaacctcaaaatcaatgcatatgcctggcaaacgtcctcttattatgtttgtcaaaaaaaaactaaatcttaattattacataaacaataaacacggcagttaggagatgtaatatcgacatattcttatataaactttatgttttaattcaagaggtcaatagtttgttttaatgtaatatgtaaaatgacttgagtgtgcagagaaagcaaatgaccggactttctgccagaacaatggtttgaaatgaaaggcatattatcacagaatgatggtgaatgaacaactgctcaatcattttccctttttttttcgcgaggactatgaatcacgttgaacacggctcttctactgcaaatgagcaagccgacgatgccatagagcttgggatttttctgttctgcacctgtgtagagccagaaaagtttaattttgcaccgggaaatacagcttgttctgttcttcctcctccttcgctgatgcattgcagtgtgaaaataacaacgtaaaggaaaaaaaagatagttcatttggttaattaaatctaactgccagttcaacattgttagctagtcgagcagagagtctaatcaataaacgcataaatataaagggaaaaaattctctgcggtggtgtcgcatgacgctttctgagtggcaccacgtagactggcgacccgacatgtcctgtagcaccgcattgaccaagccgcagctactggcaagcaaagctgctccggagttcatggagacattctcttctgttagagtgtataaagtgaattgcccgtctttccctatcagcttaggcttttaggtgcaattggctggtatattcaacttaatatcttcccgtcgcgcagctgccctcgatgatgagtttctgccgccgcctcccctctccgccttttccacgcgccacgtagctccagcactcctcgatctccgtcacgcccaaatccaatcatatgacatcgtcgccggtggttatggggctccgccttccacccatctgtacaacgcaatctatggggccctgtcatcctcctcggcgcccgtttatctgaagctgtcgacgttcccgacggggatacacctgaacgtggtggcatgcttccagggacatgaacggaccgcgacggcagcaagtgagcaggatgatcgatgacaagtagctgatgttaggtttgttgaaaagatattcaatgttgattatattcctggattctgtttccaatgtttcttgttgaaatttgacttggagttagcgttattgttaataatgtggtacaaatagaaatcgccgaaggtgctgcggctggatctacacggtgttgtgggagacattggcatggtgggaagaaagatcttgagctacaggcctacagcagatgggacacgcatcgccagcctatgctgcgtcgtgcaggaagcgtctgcggcactgcggtagagatttattttttcccaagataaagatatccagcacgtgcgagcatcagctaagcatttctcctctttcctaaatgtctcctgacacattagccgcaacaaaccatccaaaattcgtgaaccattgatcagagtgatgttaacgtctgtccaaggccgcgaagccatgatgatccaacagatcaggaaacactgactcacggccactatcccaatgcctcgaaatcctaaagaatgagatcatcttctgtaggtgttttagaggtcagagttgaggaactgcacgcccaccattgtattcaggtggggtgaaaacaacataacacatcacaatgcatttcccctgtctatatgggctgaatattatcacaatgcaacattttctttctatctgttagtacaatattgaatggtagcaaactagcagtacactttgcaaatagtaccgctgcactttaaattgcagatgggcaatgcaaaagacatgctacagtttttattgccttagctattgttagagtgtttctaagtcatgtgcgtcatatgtaaactgacatagctgacagtaataatattgcaaaacttttcgtgcttattctttagtttttctcttcttatggaaccttaatttggcgtgccaggttagttactccctacatttcattaaaaatgttactatattttttaaaaataattgtttaaacttaaaaaataaaagtcgaacgacttgtaatataaaacgaagggagttcaagttttaattaaggttaacgggatgcaccaccgctctgtggtgttgcttgtgtggagtggaaagttttctttcgctgttcctttttaggtcattagtctatcttaaaaaaccgccacaagttttttaacagaaaaacttttaaatctaactacagtgtaattgtaatataatttcactgtaactaaagttacagttacagtccactacattatagttacagttacagtatagttacaatatataatatatttacagtctatagtgtaatctatctatctattatatactaaaagtctattaaacttcctacaaacgctctcataccgccacatgagattcctaccaacgctcccaagccaccacgtggtaatctaataatctggtggacccaatattatatagaattagatctatttttggaaaaaaaatctacatcccacgtccagcttggtctgtgcgtacaggagatatacgtacgccctcccatgtatcccctttaattatctcctatttccatgctacatgatctcttctatttccatactatgttaattcctatttttatgatatattagtcagatgtaaatcataatttataataatagttttcaaaaaaaataactaaatcaccgtcatatacacattaacacatatatatgtacaaacgtacgtactccctccctcctgttccacaggaattagataagaagtgcattttatttttatctgttcgtgagtaagagaccatcacaaatgatttatcatggatggcttcgcttaagcgtgtcttcaattgaatgtgtagatcggctaaataagtaattatttatttatgtcaccaagatcattcatataaaaattaaagttcatagatccaataatttttatagtaataaatgatggtgcataaccttaatagaaaataaaaaagaaagagaagactgaggggaggggagcagatgcggtggtacgtgtgtattacacgtacatgtgggtccaagagaaaagggtgattggatcggtagatttaatctaatggttagtattatcgggtccatcgttttaaataaaaataaatggttagatatcatttttttttcttagaatttatcagagcgccacgtggcggcttataagcgtttgtaggaatcccacgtgacggtttgagagcgtttgtaggaagtttaatggacttttagtatttttaatttattttaacagtaagattatttgtaattaattatactatataaaattaaataaaacttcatacaaacactctcaagccgccatatggacatcctacaaacgctcttaagtcgtcatcgtcatgtggcattttaataaattaaaaaatatcacaccactccagccgtatgtacgtatgttttcctccctcgccctactcttctttaaattaatttttttaatgaaaaaacaattaataatttaatatccatatcacccatattttactataaaaaactaaaatacattatttgaacagattgcaaccaaacaacatccaatttttaatttattggaacattaatttaatttgtaattaattattaatctgactattatatactaaaagtccattaaacttgctacaaatgttcttaagccgccatgtggcactcctgtaaatcctcctaagttgccacatggcactatctaatctcaccgttgatttttatttaaattgacgaacccattagtttacactattagtttagatttattattaaaaataataattttctcatgtttataacgtacaggcgctactgctgtccgtacgtatgagtttgtacgatacaaatgctattgctgttctttctatacgtacaaacgtacatgatctttcctaatcttgctgaaaaaacatacacatgtacataaaaaaagacataaaaaacatacatccataaaaatcagcggtctttgaaatataatttttgataaaatatattacttcacaaatataaatatatttagttaaacaaagatctataatagatatccaatcaatattctttaaaccatcttctgaatctatctattatatattaaaagtacattaaacttctacaaacgcttttacaccgctacgtggctctcaaataaattagcgaaatcctagaaatctattatatattataagtctattaaacttcctgcaaacgctcctacattgtcacgtggcgctttaatttagattaatcatagaaatttagagtaaaaaaaaagagaaaagcatccaatcttcaattgtcacttaaattagtgacacattattttaaacattggattagagctcttaaaaatcccacgctgctaatctctatcccggcaaaaaacatagcgtgcttacgtcgtacgatcatctccctaaaaaaacaaaacttaaatacctacgccatatacgatcgaaaaaaaaataaagctaaaaaataaaaaggaaagcatgcacacgtacatagaacaattggaaagaaatactaatcaggaaaaatcatcggtgccagcacatatttgttgtcaacggcctttaatctacaattttatgatcttcctccccttatttatagtcctggtgtagatagaacttcctttatggtttaattccgagcggtagtaaatacaagacttagcaatatttgattgatcacaactcattatattccatttattataaatcttccaaagtaattcattataggaatgctttcaagaaatggtttgcttttgcacatcgaaaccaaaaattaatcgtgcggatatgtataattcaaaagaatatatagatgagtgattcatacacagaaatcgggatttttatttaaatctaagaggcattcttatcatattagtagtatattaaaatctcccatgtatttttggggtaatatatttcttttttttaggataatctaaattcacttacaatatatatagtgatgtattattctttttttaataacaaataagatgctcgtacatatgtacgaaattcctttccgatttatattctaaaaatgttctccagtttatattctgtcgttatagtgtttgaaacacaaactataatacatgcccgcgcgaatgcgcgggctacgttcctagttacattatagttacactacaactacactatagttacatttgattgttttttgctcaaaaaacttgcgatagttttttagcaattgtaaaacaactgaatgtggatactctaagcaaggaacatagaaagcaaaattacctctctttctcatagtacatatatttaaaatgaaaggcatacactccgcttatgatcaaaagcaattatcacataatgcagaacggacaactgttcagtcatcttctttttttttgtttggcagggcaatcaatcacatcgaagacgactcttctatagaaaatgatcaagcggaaaaacatagagcgtgggattttttctgtgatgcgtgtgtatcacacggtattttgatcgggaatacagttattctgttcatcacccttcttagttaatccgcaagatctttcagttcctgacatttttctcccagttcaacatctgtctgaatgagtaatgcatcaggatttgctgcccaacaccatgaggtaagcatctctgcccaatcccctctaatccttcactctcggggattaaccgaataagctctaaagaataatcctgggacgatagccacgacaagatgcccaaatgtaagagatgccagcaggaatctccagcagaataatcgaacctcaaggcagtgaagtagcagaactaaaagccaaagtgatgttactgtcagctcaaggccaggaagaggtgctgtttgaacagatctgctaaaaccatctcatggcaactatcccggtgcctcaagttcctaagaataagtctacaataatcttcagtaggtgttttagagggcaagtcgaggaattgcaccccttccatgttgtatttgggaagagtgaaaattacagagcacatatcacagttcttttcccttatttatataggatgaatattaccacaatccttacaattatttgttgctagcttcatatatagttgtgcaatctccaattaattggctcacatggaagtctgactgggtactgctacaaagcagacctcaactaccgagctcactattgctgatcatgtgacacagctgatagtaatggtaatcacaaataaaacagaaattgttgcaacatgtacatgtttttatatgttcttcgcatataaaataaaaactgtttccacatttgcatgcgtcttcttcttacaattgtgagttcctggaaagccaatctgagcttaattaaggtcatggcaccctccaaatgtttccagaaaacaacccagcaaaaccttctctttgctgtaagtaatccagatacatttttgttaatagaaatgagggttacgcccttgcccaaaacagagaacactttcagccttcttctgagctggactagtgcttacctccaggagatgaaactgactcatggcaactatcctaatgcctcaaattcctaaagataaatcatcttcagtcggtgtttttacagggcaaagtgccaaagttgatgaattgcacgccatccattgtattcagagggggtgaaaattacagagcacacaacaatgcatttccccttgattatatagggcgaatattatcacaatcgatgcaattatgataatgtgattaggtctgcttagatgcaattatgacaatgtgattattcttcagcgcaatatataggccggacattatcacaactaacacaactgacagtaacaaaattgcataattattcgtgacttattctttagtgttcctacttaccgaacgttaatttagagtgcctaattggttactacttgtttcaaggtttgcgaacgcaacactgcgtggtattatttttcttcttttcataattattatactatcgtctgttggggagttgaccattttcctttaatgttctcttttatattgttttagtgggacactaggaactggggatgaaaacagagtagatacgtatgaaggagcacgcttcttgagctcctaattggcgtggcctattttttaaagcaaaaacttgttatccatatgaatttctatgaagccctgtcttaactccatttatcaacattacaatatttaattcatttgtttgtagcctcgaataattatcacaaatcgctcagatattcaaatattcggctcgaataactggggccatgaatacaaaaatacggataacttacatatggaaaa

SEQ ID NO: 24669 - DNA, 12414 bp, Oryza sativa
aaagcgcttcccaaaaaccttattgccgccttctcccggtgcaggacgttgaaggcagaggttccggagacctgctctcccgatcgcaagtgcacgccggcgagcgggatggagtaatctacgagcgacggcgcagcacagagtaggaggtaaaccctagattgatttcgcgtgtgttgtatgaagacggcgggtcggtttatatagagaagggtcgcttgatcagggcgcccgcacgatctccactacgcgtaaccgacccgcataagtcgcgcgtaacttatccggactccacgccgtttgcacgcaccggattttttcggaacgtttccaaaacaaaaacgaatccgaatttgcagcaaaacaaaactgcaaaaggaggctacatctgcgcaaggtgaagaaccaattttggcggaccattcgacacgtacgtcgtgcacgcgcaccgcctgccctgccaggcgaggcgagcgagcgcgcgcgtgttccccctcttctctccaccacacatacttcaagtggctaggagggcatcctctcttttaaggaggtccccctctcctagaataagcaaggtggtactaaactccacatgcatgccatcccaggaggtgggcttttgtgattttccaaagaattaatcttcgagtggactaaggcccatacattaattccaacaatcccccaccaaatctcaaaatcccactgagatttgccttttccaatgtactgtttatataccagcggttcgatggagaccgattaaggttgaacatccacctagaactccaagctacacttactcacaacttgaacaatggactacgccttgaattgcaagtcttgtgcaagcaagtttcactcaaagtcttatctggtactagaccgtctgtagactacccctcgggtggagcgtataagtcatactcgtaggtctttagtaagcttcctagaagattcacccaaaatcttcatagactgcgaccaacagtcaagctcacaaaggtgagttctttcaagaatgctctgcaggacaacatcttcgctaattaaagccaacagaactcattaaggcatagccaacctgccttgcagctcacgagagtacatgcatcttcacttggagagggtatgtattggtactctcctctagtttactaatggtttgttcttcccaggatctaatttacgggatctctgatcacatagactgggttaccaccatagtataactcacatgggtctcaaacccatctccttcgatgcattttctatcacatttcgtgatagtcccttcgtgaagggatctgctaggtttctagctgtttggatgtaatccaacgttataactccggagtttcttaatttcctgacagacttcaatcgtcgtttcacatgtctagacgatttcatattatccttagaactattcactttgacaattaccgtttgattgtcacagttcataaggatagccggcaccggtttttcaacaataggccgatccattaatagatcacgcagccattctgcctcaacagtagcagtatccaatgctgtcagctctgtttccatggttgacctcgtcaaaatggtctgtttgcaagacctccatgaaacaacaccaccacccaatgtgaagacatattcactagtggctttgatctcatccacatcagagatccagttagaatcactataaccctccagtaccgcaggatacccaatatagtgaagccccaattccacagtacctttctgactaagtgtcaaagaaatattcgccttctttctgagtatagcccttagcaacaagccgagccttgtacttttcaatagtaccgtcaggcctaagcttctttttgaacacccacttgcatcccacaggtttacacccatagggtcgctctgtctcctcccaagtcccgttagcgataatggaatccatttcactacggacagcctccttccagtagtctgcatcaggagatgcatatgcttctgaaattaacttaggagtgtcatccacgaggtacacagtgaaatcatcaccaaaagacttagccgtcctttgtctcttactccttcgaggagctgcactgtcatcctcctcagtgacatgttcatgtgtatgttcagtttgttctggtggtgtgattgaactaggaattatttcagatgattggctcgaactactatgtgtattcttcattgggaaaaagctctcaaagaaggtagcatcacgagactccataattgtaccaacatgcatgtcaggtacctcagatttaactattaaaaatttataggcaatgctttgataagcatatcccagaaagacacagtccacagtcttaggtccaagtttgcgcttctttgttattggtacattgactttcgccaagcacccccatgtgcgcaagtaagaaagtgatgattttctcccaatccatatctcatatggtgttttgtccttatttctgttaggaactctgtttaacacatgattcgaggtcaacaatgcctccccccaccatgccttaggtagtcccgcagtgtccaacatggcattcaccaagtcagtcaatgtacggttcttcctttcagcaatcccattagactcaagagaatagggaggcgtcctctcatgtatgatgccatgttcctcacagaataagtcaaactcgtttgagaaaaactctccaccactatcagacctaagtctttttatctttctgtcaagttgattttcaacttctgccttataaattttaaaatagtctagagcctcgtctttcgttttcaacaagtacacatagcaaaatctagtagcatcatcaatcaacgtcatgaaatatcgttttccaccctttgtcaacaccctattcatttcacaaaaatctgaatgtaggagttctagtggtgccaagtttctttcctcggcagccttgtgaggcttgcgaggttgcttcgattgcacataactatggcacttagaacctttaacaatggaaaacttaggaattaaacacatgctggaaagccgagacatcaagccaaaattaatatgacataaacgtgagtgccaaatattagcctcatcatccacactgccacaaatatggttcatagacttattgcagaaatcagaaagggaaaagcggaacaggcctccgcactcataacctttaccaataaaatatccatgtttagacacgactactttattagactcaaaaaccaacttaaatctgtctctagtcagacgggagccactaacaagattcctgtcgatagaagggacatgctgcacgttcttcagctgcacgatctttcccgaagtaaacttcagatctaccgtgccaacaccatgaacatgcaggacggtggaaccccgagcgacctgataagaagaaaacaatgagatgtcagcacaaacatgtacactggccccagtatcaacccaccaattagtagactgattaactgaaaaaacagtaggtaaattaccatacccgcttccatctccagtgttgccaatggtcacgttagcaaacttagaagtctgccctgcaggtgccttcatccctttgcgctgtggacacttcctagccagatgaccaagttggccacacacaaagcaagtcctctcatcctgattaagattgttgttgttcttcttctgcttcttgaagttggtggtctgctaagctttgtatttccccttgctcttgttctgggccttgtgcacaacattggcactggactgcccaccatcgcccttagacgcggcatctttttcctgagctttctccttaacatcaagagacggtatcaagccctcaacggagtattcttgtctcttgtgtttgagtgcagtacggaaacttctccaagatagaggtagtttcgcaataatacaccaggccacaaatttgtcgggtaagacacacttaaggagttcgagttccttagccatggtttgtatctcatgagcctgttcgactacagaacggttgtcagccatcttgtagtcatgaaactgctccatgatatacagattattgctagcatcagtagcaccgaatttagtattcagtgcatcccacaactccttagcgtcggtcatatgcatatacacctcgaccagacaatcgccaagaacgctaagaatgcatcccacaaagagagtagtggcttcctcgaattgcttctgctgttcaatagtaagaactccttcaggtttgccaatactcacccagaagcatttcatagctgtcagccacagaatgaccctgatctgccatctcttaaaatgcataccggtaaatttatctggcctcagtgcatcggcaaaaccagccatagtaaaatcacagtgcctataataaggtttttggattgttgagattataggcatataatgatttaatctattccataaataaatcatgacattacagatgaaaactagcatgaacgcatcattagatctacacatgtaaactacacagtataacatgaacagatcaaatatgcgcaacatattgaacacgtaccgaggtggcgggaagaccggctgctcgatcgaaacttttcgcaggcgtctacgaaggcacgcagcacgcgagcgaagaggaaggcgagccgtcgcggacgaacagggagcagtctcgcaaagcgcttcgcaaaaaccttattgccgccttctcccggtgcaggatgtcgaaggcaaaggttccggagacctgctctcccgatcgcaggtgcacgccggcgagcgggatggaataatctacgagcgacggtgcagtacaaagtagcaggcaaaccctagattgatttcgcgtgtgttgcgtgaagacggcgggtcggtttatatagagaagggtcacttgatcagggcgcccgcacgatctccactgcgcgtaaccgaaccggataagtcgcgcgtaacttatccggactccacgccgtttgcacgcatcggattttttcggaacgtttccaaaacaaaaacgaatccgaatttacagcaaaacaaaactgtaaaaggaggctgcatctgcagcaaggtgaggaaccaatttggcagaccattcgacgcgtacgtcgtgcacacgcaccgcctgccaggcgaggcgagcgagcgcgcgcgtgttccccctcttctctccaccacacatgcttcaagtggctaggagggcatcctacctttcaaggaggtccccctctcctagaataagcaaggtggtactaaactccacatgcatgccatcccatgaggtggtcttttgtgattttccaaagaattaatcttcaagtgggctaaggcccattcattaattccaacaacagcaaccttcgagttcttgcaaatggtacctattcaattataaaaacgaaatcttggcaggagctctgcctattcaattagtagaagcaaagactactaagatcataatataatgtcagagtatcactcaactcttagtacaactcaagagtagctagacagcaccaggagcctcccaaatttaatttacacagcatcggttggtatttgtagtaaacacctttcagtaaactagtaaggtagcccgcgcagttgcgcgggcatcttatttaaatttgttattaggattttgaatattatgactgtctctcaatgaaagaatttgaatgttcctttataacacatgattgaaaaaaaaagtataaaggccggaaacatgttagaaatacatgtgtaaaacagcgaataaacaaatttcggacagtaaacgaattttgtacagaggacataaataacatgaattttaaaatttgttaacccacatagatgaaatcatcatctttcattgcataaataaactgcagttaaccaaataacctttccgttagcagcttgattttatcgatcccatgcgaacggaaaaaacatacgcatgcatcttattactattttattaattttattgctatagagatataccgtaaccttttggatatcagctaatcgttatgtgcaccgtgcatggatacctcgtaagcaatatgatttagggattagtagatagtggtagtgtggatatatctcgtaataattgatcaagtatattgtatactacatattaagcgttttagtagctttctaaagagcttatcggagtagctactcccttatcctatatatctataaagttcattctcaataagtgttctcagtaagtatagttaatgctaattctctcttctctcatgaagccataacacctcaattgtttttagcccttggatgattcatcaagggtgcaaattgcatctcttctccccaaaagccactccatacaaatcaaccatttataacttttgaataattgatgaaggtacaaaatattcaagcacatgaaagaaaatcatatagtaaataagatattttttctactactcatatctactattttatcacacaattctcctacagcaatgtgccggccatctagttcatagtgataacgtttcccggactgctaaacgtgttatattttatctttttctgataatttctattattttctctaatttattatagtactatgtacaattttaagagtgttcataagatgtttaatggactgaaacttttctatgtttatttttgcatggtatcagtaggatatgaattttttcatcagacttactataatgtattcgtgcaaattaaaggacggtatagtgatgcaatcaataggaatcccaatcgcacactttttttactataatccaaaggaggtttaaatttttaattttaaatcccaactatagttttgagctgagttcaaactttttaacaaagtattgctttttggatttcacagagaaaacaaaacgaaagagaggaacgtgggacctgcgtgggtacatgcttatttgcacctagaagtggggacttttagagataaattaaattggtagttttttaagatagattcaatgcatggataaaacaatggtctagcaaaataaatgaaaaccaacggttaaatgttgtttttcttagaatttatgtgatttattatagcgccacgtgatagcttagaagcgtttataggatgctatgtggcggcttagaaccatttatagagatgctatgtggtggcttagtagcatttagacgaagtttattggactttcaatatataattaatagatagatggtagattgtcagtaataaaacgaattaagctgagcataaaaccaacatatattttttataagttaatacatgcaaggatgcacgcatgcatgtaaccctccatgaagaggacatggacagatgtaaccatggtgcttttgctctcaacaacttatgaaaaaaaaaagaacagatgatgcatatacatgcttgagaggtgagcagattgccggattggacgttttatatgttagatgttaatttttcttttcaatctgtaattgttttttggttttttatcttttttttatttcggtattttttatcactttcggatgtattttctctcatatagaaacggtatattagaagtgagagattatattttaatggatctaataatctaatggtccaaaataacagctccacagtttaagtgttagatgtttcacttttttcttacaattctctaatttattatcgtgtcacatggcgatgtatgagcgttcgtaaaaagccacataacaacttgagagtgttcgtaggatgtttaatagacttttagtatataatagatatattgttatacacgatgtttaatttaatggatatttattatttgctagctagaaattaaggaggccaaagtgagcaaggagagatgacgtaaaattatttgtgaccacatgatagtatatgttattattttttgctatttgtaggagtatttgtcaaacgatgtatttcttatatatcaaaacacatggctaatatagataaatagaatatgttgtagaaaattataattatttagttatctaattattttttacataataaatttattatctaaaaattagaagatggatgggatgaagaaaagagaggttgtgagggagtaacgtacgtacacgtacatgtacgtgaggagtggaggcccatgaggggagcgggagtggatgggatcttggtttattttgtttaatatagatctaatggtgtaaaataatgggcccgctatattaagtgaaaatcaagggtgagatgttttgcttttttctagaatttcttggatttctctaatttattagagcgccaagtggcggtttaggagcgtttgtaggaagtttaatggacttttagtatataatagatagaagatagatagatagatagatatgatctaaacggtagttaaaattctttgaaaattttgaatgaatgtaagtcctctgggtagctggtgactggcagtggttcgagatcaagcagcttagctagctttcctatatctgtatataccaccccagtatgggagtagagtttgatcccttaagggatgtcccctcattatttgcatgtcactcaaatagttataaaaaaatttaaaacaattgagaatatatattaatatgtgatatattactccacaaacatgtaagttcaaattcaacttccacatcacgcaatgaaaaaacaaattaattagggggttaatttgaggatatctttaatttgtttgaaaaaacaaattaactaggggttaatttgaggatatctttaatttgtttttttcattgcatgatgtggaagttgaatttgaacttgcatgtttgtgaagtgatatatcacatgttaagacatcttttgaatttttttttcaaatttttttcatagttgtttgagtgacgtacaaacaacgaggggacatttcctcgagggatgaggggtaagatattttccctttgaactaccagttgagagcaattaattaaaaatcaaatgaagatatcgctcttttttaacacccttcaaagcgaaagaaactgcactatctcgtaggtatttgggaaaaaaattagtacatatacgattttttttaactgtgtgcagtacacactgtctgatacacacattcactaattaggatttaggaattaactacatgctttgaaagaatatgggacatctgcaggaacccgagcccactttcatcgtcgtgctccgcaagcttccactgaacttttgctgaagaatctcttattaataccgtatttagtctagtctggataaagaacaatgcgttgatcattgctctttccaacattaggtgaccatgcttcgtacggtgcatcgccgttttctgctaccttccaatcctaagctccaacatcgagcagaaaaaagtgaggtgattaattagcttcagtagagacaaagtttctacccatggctggccatcagtctcaactctcaccattagcaggggatgcataataatatcactaaagaactttctgatgatccgccactgtaaatttaaagtcttccatacaactcttaattacttacgagttgtgtgcgaatttagtttttttgaagcaagtcacccatgagagattgtaccgtggataaattcttcctatgtgtccacctatttattagggcatgctctgctctgaggagcctattgcgatgttgtgccagaaatgcataccattgaggccttgtccggtttggtggaaattaaaggggtttggagaaaattgagtgggaataattccataccacattatgtgtggaaataatcaccttcgatctttgccacttggggattaactgaatatgacctcactactacaacaaccatttttctatgcgggtgtttcgattattccgtgcgggggtttggcccgtctgcagctggtcgtctggaaaaatcaccattttcacgtgcggacggaccgaccacacgggataatcgattaacccgtgcggtcgtgttataccgaccgcacggaataataaaaaaggaaaaaaatcaaaatccacccacgaaccctaaccaaaatccacccacaaaccctaataaaaaatcaactttgtcggcatcggcgccgccatcaccatcgtcgtcgccgccttcccgaagcccaccgccatcgtcgccgccttcccgtcggaggcgggcgacagatgcggcctccccgtggcggtgggcgacggatccggcctccccgcggcggccggccacggatccggcctccccacgcacggatccggcctcctgccgatgccgccgccgtagccgattcaaccgccgccgccatagccatagctgtcgccgaggacgagggagagagagagggtgatgggaggagggggaggagccgtagccgatgatgtcgccgatgccgcggccgtagtgccgccactgatgctgctctatccgagggcgccgccatcgccgaggacgacagggagagggagaagtgtgggagggatttggataagtgtggggtgggaggagccgggtggaccactttatttttgggggcagctattttcgtgtgtaggtcacttaacagacccgcacgcattatttttgtatgcgagtctgttaagtggcccgcacatgaaaattgattttcctgtgcgggtgataaactggcaccggtccttttattttccgtgcggtttaacttacggaccgtctggaaacaaaaagaggaggcgtgcatgaaaatcaatcatgtagtagtgcctaagacagctctattagtattgatgcctagcccattggtatggtactcaatgcatctgtctgtccaaaatttgtacatatgcctgtttatgagctatgtactagtcattctactgagtttttgcaggttgtattttaattgagatagttacatgtttaaagtttatttcaaatacatacttttaaaatttaaagtttatcttccaaatcttgtgtggacctaagtcttgtccacttgtctaaacaagtagaaaacaccaaatttccaagggccgtcttttgagcaagcatttctattataacgagatttcgggagaaactactatagtacattgatatgcaactaataactaagcgcacgttaatatttctcctcaccgctatacaccgccatcctgatgagccattgagctactgttttgcggcaagttgaagtagagcgagcaccgaggcatatctgtctcccgatgcctcataagcccttacttagcccgtacggcagcaacatatatatcaaatttgtaatgaacaagatgatcaaatttcatagcttatacaactttgcttgtgctttttctagtttggtggttggtatatcttcgcttgtgctgtaactaaccagctagggtggacatatataccggtatgtcttctgcttttctttttcccctgaaaactgagggaaatttgatgcttcaattagacaccagtactcaagtacccattctgcttctgctggtaatatatatactgcatccgtcatgactccgtggtaggttattacagagagctaattaaacatgggcccagacactagctagctgccagcatgccacagctgttgagattataggcatataataatttaatctattccataaataaatcatgacattacagataaaaactagcatgaacgcatcattagatctacagatgtaaactacacagtataacatgaacagatcaaatatgcacaacatattgaacacataccgaggtggtggaaagaccggctgctcgatcgaaatttttcgcaggcgtctacgaaggcacgtagcacgcgagcgaagaggaagacgagccgtcgcggacgaacagggagcagtcgcgcaaagcgcttcccaaaaaccttattgccgccttctcccggtgcaggacgttgaaggcagaggttccggagacctgctctcccgatcgcaagtgcacgccggcgagcgggatggagtaatctacgagcgacggcgcagcacagagtaggaggtaaaccctagattgatttcgcgtgtgttgtatgaagacggcgggtcggtttatatagagaagggtcgcttgatcagggcgcccgcacgatctccactacgcgtaaccgacccgcataagtcgcgcgtaacttatccggactccacgccgtttgcacgcaccggattttttcggaacgtttccaaaacaaaaacgaatccgaatttgcagcaaaacaaaactgcaaaaggaggctacatctgcgcaaggtgaagaaccaattttggcggaccattcgacacgtacgtcgtgcacgcgcaccgcctgccctgccaggcgaggcgagcgagcgcgcgcgtgttccccctcttctctccaccacacatacttcaagtggctaggagggcatcctctcttttaaggagg

SEQ ID NO: 24670 - DNA, 10696 bp, Oryza sativa
gtatttgtcaaacgatgtatttcttatatatcaaaacacatggctaatatagataaatagaatatgttgtagaaaattataattatttagttatctaattattttttacataataaatttattatctaaaaattagaagatggatgggatgaagaaaagagaggttgtgagggagtaacgtacgtacacgtacatgtacgtgaggagtggaggcccatgaggggagcgggagtggatgggatcttggtttattttgtttaatatagatctaatggtgtaaaataatgggcccgctatattaagtgaaaatcaagggtgagatgttttgcttttttctagaatttcttggatttctctaatttattagagcgccaagtggcggtttaggagcgtttgtaggaagtttaatggacttttagtatataatagaagatagatagatagatagatagatagatagatagatgggttacgagtaaaatttaaagaggtgggctaaaggaatgagatatgcttttatgtcattagtgcatatctacatagcaatagtattcagatatctgtactatttttgtccgtcggaaaacatttgcgtttgtatcaaaaaaaaactagatgtaccttgtatctgtgtgcagattatctgatattattggctttgaattgtatctgtaatatttttcgtgtagctgatggaaacaatctgaaaaagtgatcaacaggaacaaaattcatggcggccttttttcatttagagaaaaagatgtttaatcaaaatgtttcacaaatatacaacattcatcaataacccactgcatgaaacgtcaagtctcaacgcgaaaaatactatacaataacaatagtgcaatagcatttactaccggttgaaataattcgcttctcgtacatgaaacactaaattttatggtagatcatgttgtaatgattcaattacaataaatataatggtggaattggatcataggtcggacaagtaatttaggaggaaaaaacattttaggtttactataataagccgtatctttattttaaatgcatgcatgaatgggaaagagatgtgctagaccctgatttctgcatataaaagtatcaatttcaagctagcaacatatttgaattttgtttggttgtgccattaagatctcaatccaatcctccaagaaatttgatcccctccaaattcaaaaaccatccaaattcaaatttgaatttgttaaatatgtgatccaaattttgggcccacaatatattcggattagtttgctagtaggagttcctattaggtgtctttctatttcccttatatgtagtattgtaagccgtacgggaaggggtgacgtttccattgttattcccctacgattataatcaactcctctatagtgatcattgccggtcggtgcccgtggtttttcccgcaagggttttccacgtaaaattcgtgtatccgttgtgcatataggattagagatcgatctacaccacgtcgccgccgtcgccggttttgctttcgtcgtcgctgaatcaatctgttcggtgcagtaccccgtcgagtccgagtcgctgccgtcctcacacacccgcgcgagaaaagcagaagctgcagcaaccgcacagccgtgaggaggaaaaagggccggcctactgcaactgtagggcacgcgacccgaggaagtcagggactacatcgttcctgttgagaaggaatttctcgatttttttctgctaagcgcaccaaagcttgtgtaccaggaaatctacatacttcgctttgtgcacacaggaagtgcacccaggtttcgtgtttttgctaggtttaccctaatttcttacaagcaaattcaggattaattctcatggcaagtttgaagtatgatctaccgctcctagaccgagacacaagattctcactttggcaagtgaagatgcgagccgttcttacacaacaagacctcgatgatgcgctttctggatttgataagaggacacaggattggtccaacgatgagaagaaaagggatcgtaaggctatgtcatatattcatcttcatctatctaacaatattttgcaggaggtgcttaaggaggagacagccactgggctgtggttgaactggaacaaatatgcatgactaaagatctgaccactaagatgcacctgaagcaaaagttatttttgcacaagttgaaagatgatgggtctgtaatggaccatctctccgctttcaaggaaattattgctgaccttaagtctatggaggtaaagtatgatgaagaagatttatgccttattctattgtgttcattgcctagctcatatgcaaacttcagggataatattctttatagtcgttgtggagattatggataccccatatctacacggcggttatatttaaactggatataggatgcccaatatagatagaatatctttatttgtatctcgggtttgtttcttaacttgtacgtcaaggaaataccctgaggtttagtcggttacgattgtattttatctgtattttcattttccgttagggatatgagctataccttgtaatacggactccttcccctatataaggaggggtccgagtccttcttgggacataacttcttatggagatcatacatccaataatacactcggcggattcatccccggacaagagtagggtattacttcttgaataagaaggcctgaacctgtataaatcctttgttgtcatgcccggaaattcactagtaatttccgaactaatttgtgcataaaatcctcgtccaggaatcagccgaggtacacaaactgacaatttaatatacaaatccatcttaataataacgttacatacttacaaagaaaagaaaacagcagcggaattaacggtctagcgatggcttcagctccactcccacaggcagctcaactggggtataaaccaaacgtcttctccttctggatcctttatcttcaactgaggtttgatgattattgcaagaatgagcatatgacatactcaacaagccacacagcaagtatgcaagtgcacaaggataccaaaggatggcataatatatgctaatttgcaaaagcagcattaagcaaaacatttaagagaagtaaaacagtagagtaattaatcagaaattttaatcaacactgaacagcacacccatgctgcacaggcccaaccatcctgaacaaccaaccccggtcgtacagatcaaacctccaaaccaggagctaagcaaattattaccagatataacatccataattattgtgagaggtgtgagactaatcacgaaaaacattgctcaacttgcccataaccgcgggcacggctattcgaatagttttactctggccagaggtgtaccactgtacccacaagacacgattccacacatgttgccatgccccgaaataccaccacggcattgcaaaggggaaatcgtgacaataccctttgcacaacacaactcaaaacagtgcaccgttcctggatcataatcacccccttataaaacaaggcatggactccccagcgacccccacggacttcttgccgcttctcagtctggcacactataatgaaccatgctatacaaaaggtaaagccgttgcccatgctggcttgtggttggcacgataaatgtctcacaacagtagctcgcgaaccggtccttaattgccatgagcacaaccatcaaaaccatatgctcacaacccaccttaaccagattttaattatcaattaattaacatcacacgattaatcatcgtgagctaccattaaatataaccataattaataagaataatataatataatttatatttaatcccctttaattagctaatgtttctaagcatggctaagcaaacatacatataacatttagctgaaccaaaccaatatataaggttcatgctaatcaaattataacccataggaaaataagatcatcttcggccattaattaacggggaaaggttcaccacccgatgacattcgaaaacaatgcatagttgaaataaaataatagctttaaatgggttcaacatgctcaaagggttgtttgggatctgtgtgacttgccttgggcttccgcaaacgcttccgaaccttgctcaacgaaaacgctctcctccggaacgtcggaaactaaagcgaaagaataaaaaatcaacaaaacagtacaaaaacaagcataaacagtacatgtgaatatttttaacatgtagatcttgattttagaaaaatttagcaacttgaaccacctgaaacggatctacggttatttagttatgattttccgaagatttcatctataagaaaaaggggaaaaaggaaaagacgatgatgccatgatgacatcatcaatggtggccggctcggatggcgacctcgccggagctagggtggtcggccgggattttggaggacatgtacacgtagaggacgacgaggcgaacccaacggtactcaccaacgagccaaacgacgaacgacgacggccagcgacgaagaggcgacggcggcggctcgggataaccggcgacggcgagctacggcggccggagacgaaggagaggtggcggccgagcttctccacctcttggcgaaaccaacggtggcgacggcaagcgacggcgacggcggaggcagcgtggcggcacaaccggagttcggccggcggcggcggcggatggtttcacgcggcgacggctctacgggtcacgggagaggacgggagagggggcaaacgaaagaggaggactaggggtcctatttatagccttggattgaagagatcggactcctcccgcaagaaatcgatccgggaaatcaaaaactcggttttggagataaactcaaaaacgagttcgattcggataaaatactcaacggtttgctccgattcttgggggtaaagatagaggaggataagaggaatatttcccctcaactaattttgcaaacggagctccggatgaggcggatttaacggaggaagcggcggctgcacagggcacagcacgggcggctcggctctgtccagagctggaagatgaacagtgccagggaggtaaattagacttttggttggctgagaacagaacagggcacttgacttgggctggcttgggctgcacagcacgcgcgcgagggagagagaagaggaaggaatgggccgaaaagggcccaagctgaggaggaggatttttattacttttccaattaaaataatcacttaaatgatctttcaattgttaaaaatacttccaatgctcaaataattccaagaaaaatcttgaacatacttggacactcaaagtatttaatataataatatccagatcatttaatgattaatttattatttaaataattgctaaactgttctttgtatgattaaaattaataattgagctccgaaaaatccgagaatattccagagagtataattaaccatggagaatttaataaaaattaaatccatccatgctttatatttagaaaattttatttcccacatttaacttcacttgtaaattaatgaacatttaatataaattttgataataatttattaaataattttataaatcctgaaacaaaaatcaggatgtgacatttgtcttcaaccccctttttagcttgatagccacccccttttagtattgccgaaatcttgtttcgatagttggcgcgccaggtaggggttgcgtcaagcttttcgccgatcagtgcaatgggttccgtctccggcatcgatgacctcgtcttccctcccgggcaggcatttcggttcggcagcctcgacttcatcaccaacgacttcggcaagatctctctcctcgactcggaatcagaccagtcgggagagagccgtatctcggccccgtttggagttctgaacgcggctaagatctactccaagtctatctcgatcgagtcggcttcaacatcaccagatcgagatgatagggcctacccaccgatcctaatgaagctccccgacgatttggcggccgtcttcaccaccacgacgtccccttcccgtaagcctaggcggaggtcggcttcaacaccgatctcgcctagctccaggaaagttggcgtcatcctccagccactcggcacagtttcgacggaccagttggagggctactggagctctctcggcgtcgactcgcgtccgactgagatcttggagtacgatgagttcggctttcgcagcaacgacccagatctcgacaactttgacgaaagcttagaagacaactacacccctctctatttcggcgtcttcatggccgataatgagacggaagagcaacgccaagcccgagaaaccgaagcacgacgcgaggccgaacgacgccgactggaggaggagcgtcaagcacaagaacaagaacggctgcggtgtgagcaacaggagcgtgagcgggccgcaaaggaggctgaagaccggcggctacgagctttggaggcagggcgccgagcgcgatatcttatcggccagcaagacgttgaggggacaccggttttccgcaccccacaacagaatgttgttgccgcgatcaccctcctcaaggagaacgagctcaatcagtctgatcatgttgtcaacatcttgaaccagaccaagaccatgattgcagcttcggtcccagttaactccggaagcgtccgcacgccgagtggcagccaagttccccatcttcgatctcatgaccaccatcagccaagcctcagcatcaccggtgcaggatctaatcgcaggagcaggggccacgacgagcgatctgttcacttgccccccgagcatcatagggagagccgagtggaacgacctcgctcgccgcctcgtcgtcgccccgtcgatcttcgtgacacgatcattcagcgccgagcggcccgaggccaccatcattcatcggatcgctacgacgatgacctagatggagttgccgctttcaccaacgacctgtgtcgagtggattggccagccggctttaagccgactggaatagagaagtacgacggtaccactaatccagaatcatggcttaccgtctacggtctcgcaatccgctcagcaggaggagacaacaaggccatggcaaactatttacctgtggctttagcggattccgcccgatcttggctccacggattgccctgtggtacgattggatcttgggccgaactacgcgaccactttattgcaaatttccaaggcactttcgagcgccccggcatacaatttgatctttacaatgttatccagaagttcggagaatctcttcgagattacatccggtgattttctgaataacgcaacaagatctccgacatcactgacgatgttatcatcgccgcattcaccaaaggaattcgccacgaagaattggtcggcaagttcgggcgtaagcctcccaaaacagtcaaactcatgtttgaaaaagccaacgagtacgccaaggctgaagacgccgtcatcgcatcaaagcagtcgggctccagttggaagccaaaaaaggatacgccggctacgggagggggtggaagtaacaaccataaggaccgcaagcataagcctgaggaacttattgcaaccactactcactcttctcgacagcgttcacgcatcaatacgttcgataagatcatgaactcccaatgcccgcatcatcttaactccaatcacgcggccaaagattgtttcgtctacaagcagttcgcagaacaatacaccaagactacatggaagaactccgacgaagaacaaagcacgtcgaagaagaaggaagatggcgaccccccggcaggttttcaagaccaccgcaaagagcttaaccatatctttggcggccccttggcttatgaatctaaaagaaagcaaaagttgactgagagggagattaacgctgttcagcccgacaagccccaatatcttcgatgtttagaaacagcaatcaagtttgaccgctcggatcatcccgaccgagtggtccacccggggcggtaccccctagaactagacccagtggtccgtaacgtcaagcttctcagaaccctcatcgacggcggcagcgcactaaatatcctcttcgccaaaaccctggatgatatgcagattcctcgctcagagttaaaaccaagcaatgcgccctttcacggagtcatctcggggctatctgcaactccactccgccagatcaccctcccagtaacctttggcactcgggaaaacttccgcacggagaatatgtgttttgaagtcgccgatttcgagacagcgtatcacgccatactcgaacgcccggcgttagccaagttcatggccgtcccgcactagacttacatgatgatgaagatgcccggtcctcgaggagtcctatccctacgaagtgacatcaagcaggccgtcacatgcgacaaagaaagttgcgagatggcccaaactcgcgagatggcgaccgcccgagaagacatccgactagctgcaaccatggcaagcgaaggagaggtgcccacgaccaaggtctcaaaaagcggagaaagcgaagccaagacaaaaaagattcccctagatccttctgatcctactaaaacagctgtaataggcaccgagttagattgtaaataggaaagcgcgctcatcacctttcttcaaaataataaagatatctttgtgtggaaaccatctgatatgcctggtattcctagagaagtgattgagcactctttacacgtcaaagaagacgctaagcctatcaaacaacgactccgccgctttgcacaagacaggaaggacgcgatcaaggaggaattaaccaagctgttagcagcaggcttcattaaagaagtccttcatcccgactggctggctaacccggtcctagttcggaagaaaactgggcaatgtcgtatgtgcgtcgattataccgacctcaacaaatcttgccctaaagatccttttgggttgcctcgcattgaccaggtagtcgattcgaccgccggctgcgagctactcagttttttggattgctactcggggtatcatcagatccgactgaaagaatccgactgcttgaagacatctttcatcacgcccttcggggcctactgctacatcaccatgccattcgggctgaaaaatgcaggagcaacttatcaacgcatgattcagagatgcttcttgactcaaattggccgcaatgttgaagcctacgtagatgatgtaatcgtcaagaccaagcagaaggacgatttaatttcggacctagaagaaaccttcgtgagcatccgtgctttcaggatgaaactaaaccctgaaaaatgcaccttcggagtactgtcagggaagttgcttggctttatggtgtctcatagaggcatacaagccaactcagagaaagtcaccgccatcctcaacatgaaaccgccgagctcccagaaggacgttcaaaagctgactgggtgcatggcggcgctcagccgattcgtttcacgacttggcgagcgggggatgcccttcttcaagctactaaagaaaacagataatttccagtggggacccgaagcacagaaggccttcgaagacttcaagaaactcctcaccaagccaccagtcttagcctcaccacactcacaggaaccgctgctattatatgtatcagccacctcccaggtcatgagcacagtcttggtcgtcgagcgtaaggaagaaggccacgtccagaaagtccagcgactgatctactttgtcagcgaggtcctagccgactccaaaacgagatatcctcaagttcagaagctgttatacggtattctgattactaccaggaaattatcccactatttccaaggtcactcagtcacagtggttacatcgttcccgctcggcgatatactgcataatcgtgaagcaaatggacggattgctaaatgggctttagaattgatgtctttggacatatccttcaagccccgaacctcaatcaagtcccaagcattagcagacttcgtcgccgagtggaccgagtgccaggaggatattcccggagaaaagatggagcactggaccatgcactttgacggatcaaaaaggctttcgggcactgtagcaggagtggttttaatttccccaactggagaaagattaagctatgtactttggatacatttttcggcatctcacaacgtcgcagaatatgaggcgctcctccatggactatggatagcgatttccctagggatcaagcgtctaatagttcgtggggattcacagctagtcgtaaatcaagttatgaaaaagtggtcttgccttgacgataacatgacagcatatcgacaagaggtacgcaaactggaaagcaagttcgatggactcgagcttagtcacgttctccgacacaacaatgaagccgccgacagactagccaactttggatccaagcgcgaggcggccccctccgatgtattcgtcgaacacctttatgagccgaccatacctcagaaagaaatcactcaagttgtggacactcaagacatagccatgattgaagccgactggagagagcccctcatacgatttttaacctcccaagagctccctcaagataaagatgaagccgagcggatttcaaggcgta

SEQ ID NO: 24671 - DNA, 611 bp, Oryza sativa
tggagaggactatagccaaggaaagcacaccggattgatctaaaagaaagcttgcgatgattatatggtcgtaggtttggccagcaggcacacccgaacacgcgcaagtggctgaactcaggagttgcagagaaaagttgttcaaacggcgttttgaatgagatagcagaactaggcaacctgttaatgagatatgtggcggtaagaaaggcttcatcccagaattttaaaggaaccgaggcttgggatagaagagcaaggcctttctcaactatgtcacgatgcttacgttctgctgagccgttttgctgatgcgcgtgagggcaagaaacatggtgagttatgcctatcttctggaaaagggagtttaatttctcgtactcaccaccccaatcggtctgcatggtgagtattttggttttaaactgtcgttcgacatactgttgaaagtttaggaaggcttgaaagacatcggatttctttttaagaagatagatccatgtgtatttgctaaaatcatcgatgaaactaacataataatcatgtcgcccaacagaagtgggcgccggtccccaaacatcagagaatacaagagcaaacggaacattaga

SEQ ID NO: 24672 - DNA, 2272 bp, Oryza sativa
gaggtgagaacacttccacatttacaggttgttcaatgataacaaggggaaatggactcttcgctccgaggggtactttcaggaactaggatggagcttagagggggcatttgatgagagtgtccttctctggcatcttgccactgatttctgctattacactagtggatcatatggccgtgaaagatcgattcaccacaagagtgctgttcagtgccgagaactatccaactacatgatgtacctgctgtttgtgaatcctgagatgctgatgccaggcaccaggcgaaacttattcacaaatgcctacaaccaactaaaggacatcatcaaggatgagaatccttgattgaatgaaaaagaacttgtcttgagaatatttgatttcgtgcagaacccagtagagtcagcagacgctaggcgaaacttcttcacaattgcctacaaccagttaaaggcatgtatgcagagaataatcacttggatgcagcaggaacggttggtacatagaaagataagaaacactttggtgcatgagccactaagggcacttaggcatcgaataaccgccttgattgagaaggcacttgtggcacgaactacgccaaattttgttagaattgtctacaacaaactggaggcatttattcagagaataatcgcctcgcggcagcagcccctcgaggagataaccaatgaagacacaccaccatccgatggaacagggctcatcgatgacgcttggtccattgctgaagagctcctgaagttagatgacgaggagaaaatgtggagggtgattgaaggcgtgtgggtggagatgctctgcttttcagctgccagatgtagagggtacctgcatgctaagagcctcggcacgggagggagttcctgagctaatatctggttgctcctgcattatatggggatggaaaccttggcagagaagctgtcaagagcagaccttctaaacagagaattctttagctaattcatccactacccatgttggtgagccctccggcataattgagcgagttgctggtccattgacttctcatgatagcagatctcattgtgatgaaagagtagcggatccatctgccatcggagagataagcgtcattggggaagaacatgtgtgatgtatcacatatggtggttatgagagcagtgagtcccattttgtcacttttattgcacatcatgtttcaattcttctttcaatgctatgttttgtgtgattcagtgagtcatgtatcctctctaatgtcctgcaactctgtaaatattgaacctattttttggatgcctaatgtcctacaactctgtaaatattgaacctgttttttgaatgccatgtgttagagtgcgcagcccagcccaccaactatgggccaccccaggttatattgagcctgctccaccacaggcccaaccggagctacaactttaggtcctgagcctacacaaccagaaagactagtctaatggatgaggaccgccccaccttttaagtcgtgctccctcatcatcaattaccgatgtgggattaaacacaacaatctcccccgtcacatcaaccaatgtgaccccgaagacttgttacctgagcctcgggtctaacaatctcccctgtcacatcaacccatgtgaccccgaagacttgttacctggcctccccaccatgtgacccatggaaatcgttccgggactaaacccaacaccatgaaatggaattagcaaccatggttgcattcagattcagaatcaagcaaaatttgactgcaattcacatcttttctgtttattaggcgtaaaactgaactgtatgtgaaaaaaacactttaaaacctacttggggtcgaaaactgtatactacctccgtcccagtatagttgtcgctttgagtttttgtttgtaacttttgatctttcgtcttattcaaaaaattatggaattatcatttcttttgtttatgatttgctttattatcaaaagtgctttaaatatgacttttctgtttttatatttgcactaatctgttaaataagacaaatggttaaacattacaagaaaaagttaaagcaaagtcaaagcgactaccattttgggatggaggtagtactaaattaagtagtactactaacatatagttgtagtgcagtcaagagatataatcgactcatgaaccacatgctgcaagtatgataaaaaaatcaagttgaagatgccggtaaaccctagccgccgctaccgccaccaccgagtg

SEQ ID NO: 24673 - DNA, 2904 bp, Oryza sativa
tatgcatctcgcctaaagagaaaaaaggacatcttgtatgcatcatgtcacacgttttcatgccccataacttcgatttcatgataggaggatggaccagcgccatcttcatcaccataggctcctctagcatgagaagtcgatgcaccaggagcttgctctttgccataggagtctccagcatgtttagtggatgaattacctgagcgtgctccgtttgggagctctgctctcgccagcttctctgccaaggtctccattcccatgtaatgcagaaggagccagacatagcttaggaactccccgcctgtgccgagactcttagcgtgcaggtagcccctgcatctggctgcagagaagcagagcatctctacccacactccttcaatcaccctccacatcttctcctcatcttctaaattcaggagctcttctgcaatggaccaagcatcatcgatgagctctccttcattctcctcgtgtggctgctgaaccttgacgataattctctgggcaagttctctttcattcagtgacaggttcttctccttgacgatacccttcaattgtttgtaggcatcagtgaacaagtttcgcctgctgcccgccaatagcatcccaggattcacaaatagctggtacatcatgtagttggacatttcttggcactaaactgcacctttatggtgaatagatttttggcaccaagtagggcatccttcgttgagaccagaggaaccttgtatacacaagtcgtgagatccatgttggaattaatagatgggctaaggcccattcgaagattaattctttggaaaatcgcaaaaacccacctcatgggatggcatgcatgtggagtttagtaccaccttgcttattctagaagagggggacctccttaaaagggaggatgccctcctagtcacttgaagcatgtgtggtggagagaagagggggaaacacacgcgcgcgctcgctcgcctggccgggccggcggcgcgcgcacgacgtacgtgtcgaatgctcggcaaaattggctcctcacccttgcgcagatgcagcctccttttgcagttttgttttgctgcgggattcggatttgttttgttttggaaacattccgaaaaatccggtgtgtgaaaacggcatggagtccggataggttacgcgcgacttatccggttcggtttacgcgggcaccctgatcaggcgatctatctctatataaaccaagccgccgccttcacgcaacacacgcgaaatcaatctagggtttgccttctactctgtactgcgtcgtcactcgtagactactccatcccgctcgccggcgtgcactggcgatcgggagagcaggtctccggaacctctgcctttgacgtcctgcatcgggagaaggtggcaataaggtttttgggaagcgcttcgcgcgactgctccctgttcgtctgcgacggctcgccttcctctccgctcgcgtgcttcgcgacttcgtcgacgctcgcaaccgccagtagttcctgccgagcaaccggtctttccgccacctcggtacgtgttcgatatgttgcgcatatttgatctgttcatgttttactgcttagtttacatgtgtagatctaatgatgtgttcaatctagtttacatctgcaatgtcatggtttatttatggaataaattaaatcattatgtgcttataattataacaatccaaaaaccttattataggctctgtgattttactatgattggttttgccgatgcaatgaggccggataaattcacaggtgtgcactctaagagatggcagatcagggtcactatgtggctgacggctatgaaatgcttttgggtgagtactggcaaacctgaaggaattcttactgctgatcagcagaagcaattcgaggaagccactactctctttgtgggatgcattcttagcgttcttggcgatcgtctggtcgaggtgtatatgcatatgaccgacgctaaggagttgtaggatgcactgaatactaaattcggtgctactgatgctagcaatgatctgtatatcatggagcagtttcatgactacaagatggctgacaaccgttttgtagtcgaacaggctcatgagatacaaaccatggctaaggaactcgaactccttaagtgtgtcttacccgacaaatttgtggccgggtgcattattgcgaaactacctccatcatggagaagtttcggtattgcactcaaacacaagagacaggaatactccgttgaggggttgatagcgtctcttgatgttgaggagaaagctcgggaaaaagatgccgcgtctaaggacgatactgggcagtccagtgccaatgttgtgcacaaggcccagaacaagagcaaggggaaatgtaaagctcaacagaccaccaacttcaggaggtagaagaccggataaattcacaggtgtgcattttaagagatggcaaatgtcgcgtcccaaatcgactctaaaatacatcctcgaaattgtgccgagaataattaaaattcatgtgaaagcctccaacaattaaaatgtgcaaagataaaagtcaaataaggcttggaggatttttgtatatttcctaaaagcctaaaatgcgtaaataaattttagtggaattttcagagcacaaataataattgagaagaaataaacaaagttgaaaaggtttataaaaagaaaaaccctaaaagaagtcctctttcccccccttcctttctggggccggctcggcccacttctcttccctccctctctctcctctcctccggcccatcggctcctcccccgcgcgcgcgccgctgacaggcgggcccgcccgccaccctcgctgacgggtggggcccacctgtcatcgccttcctcgcgccgcgcgc

SEQ ID NO: 24674 - DNA, 13472 bp, Oryza sativa
attggctttgagcaactaaatgtctttagatgctgtttactgcaaccctatcccctttatattataattcccttgtactcccttgcatttattctgcatttatgggtgtgtcttgttgagtacggtggttgtactcagtcttgctcaatttttcccaagcccagaagaggagctccttgaagatgaaggctttggtgtctagctcgtgcctgccgtcaagcgcctgtggtcgtcgccctagtcttccgctgtttctcgtttgtctttgtgtgtgctgggccttcgctgcccatgtaataagttaactatttacgcttccgcttgttaaactctgatttgtatcaacttttggtgtaccttgcctcctgggacaaggattaatgcacgcacgtaaggaatgcccgttgggttatttccggtcgtgacaagttggtatcagagcctcccttgaccctaggacgagccgtagatcccaagccttagcagtattttcaaaaataaaaatcctttgttatttgtgaaaactgtctagtctctctctgtcttgctgcttcatttatcgtcaaaatctgatctttaaaatgttgtttctctttttgtttttgtttgtagatggccggcagcgtcacccgtcgtggtttggacatgactggcttcgtcttggagctgcggggcatgtgcgtggtcctggggtatccacatggagtggactaccaggccaggccgcttccggatcaggagggtgacgacgcggagccccacgctggttgggaggtcaccgcagtgatcctctctggctctcccgagcggacttcgctggcagtcaccgcgggtggagactccttccccgccgcttgccagaacgccgctctcctcgccatcggcacccttcaccagcgctacccggacgagttgcagcactcgccctaccgctaccaccctcgtcgcggaggagcctgcgactacgccaccttccgggatgctagctcggaggatgacgctaccatcgtgcacctggcgcgcatggtggaggcgtacgacgcggctcgtatcgacttccatcagatggtgcgtcgcgggatggtcaagagcaatctgatgatcctggagctgcgtcaggagaacctgcagctcaagaagaacctcgacgcagtggaggcgcagctgcatcagctcaagatcacccagggagagatctgccgccccaagcgtcgccgtgtctgccgcagccagaagatcaccgcccgcaagagcacctccaggcccgagcttgttcgtcagtccctggcgtggacttgcttcgtcgagacccctcgtgccgagcctgcgcccgtggttccccaggagggggaagccttcggcgttggtagcacggagggtgcgctgttgctcaccttccgtcctggcccgtcgcagcagtagacgagcagttagtaggcttgcgcgtgtgtttttctcgtttgtcttcttgttgagtcgtgtggggcatggttatgccggtgtgtggcataactatgtcggagcctgtcttattttatttgcctaaacaacttgaaccttaatgaaccaatttaatagcagtaataaatgtaagaataatggttgtcgtgggtggttagttttaattgttagctccttctctgtttgctggttctgtgtggggttttcagatggtgacgaccaggagaaacgctgctaccggtgatggcaatcaacctgaaggcagcaccacaaccaccaaggcaacccacctccacctcctcctcatcagccaccaccaccaccagacaccaacgccattctcacccaaatcctcgcccagcaagccaacatgatgaatgctttcctccaccacctccaaaatccgccacaacagaatgctccaccaccacctccccaacactctaaactcgccgagttcctccgcatccgcccacctaccttctctagctccaacaaccccgtggatgcgttggattggttgcatgccgtggggaagaagttagacacggtgcagtgcagcgatgaggagaaagtcgtcttcgccgcccaccagctgcagggacccgcatctctatggtgggaccatttccaggctacgcagccagaggggcaacctattacttgggctcgcttcaccgccgctttccgaaggacccatgtgcccgctggagtcgtggcacttaagaaaagagaattccgagagttgaagcaaggcaaccgctccgtgatggagtatttgcacgagttcaacaacttggcccgttacgccccagaggatgtgcgggaagatgaggagaagcaagagaagttcttggcaggaatggaccctgagctgtccgtccgtctagtctctggggattatccggattttcaacgactggtggacaagagcatccgcttggaagccaagcacaaggaactggagtcgcacaagcgccgcttggcaaatttccgcaatcagcagggtgctaaccagagggtccgctacaccaatccctatccagggggatcctcctcgcagcagcaacaacagcagcagcaacctcgctccgcgcctcgacctcaattcgtggtgcgcgtcccacagccgcagcagtagcagaatcagcaagggactcgtgcgccccgtcctcctacgccaactgtgcagtctggtcaaggccgcagggacgcttcaggtccgcagcgtctgtgcttcaactgcttcgagcccgggcactttgcggataaatgcccaaagccaaggcgtcagcaaggccaagcgcctccccgctccaacaacggcgggaaggatgtcattcggggtcgtgtgaatcacgtgacggccgaggacgtgctgacaactccggacgtcatcgttggtacgttcctcgtgcattccatccctgctaccattttgttcgactctggagcttcccactcgtttatatctgtgccgttcgtggggagaaatcagttgggggtagaaaggcttagaaaccctctgctcatcaccacccctggaggggttatgacagcaaagtattatagccctgccgtccctatagaaattcaggggattccttttccctcggatctgattctgctagacaccaagaatttggatgtgattcttgggatgaattggttggctcaattccaaggagtagtggattgcgcgagacgcactgttactctgtaccgagggccggaacaaccagttgttttctttgcacccccaaccaaggtagctcgatttattcctgtgaagaccacctatggagggaacaaactagcggagctctacttcgctaggatcgtgagtctccatggcgttcccaagaaaatcgtatctgataggggaagccaattcacctctcacttttggaagaagctccaagaagagctgggtactcgattaaatttcagcaccgcctatcacccgcagacagatgggcagaccgagcgtctaaatcagatcctagaagacatgcttcgtgcatgtgtactagatttcgggaagacctgggataagagtctcccctatgccgagttctcctacaataacagctatcaagccagcatacaaatggcaccttatgaagcgttgtacgggcgcaaatggcggacaccgctattgtgggaccaagttggagaaagccaagtgttcgggactgatatcctgagagaagctgaagctaaagtcagaatcattcgggataatctaaaggtggcacagtcccggcagaaaagttatgcagataaccgtcgccgtgacttggaattcgcagtggatgactttgtgtaccttcgggtcacgccattgcgaggtgtacacaggtttcagacgaaagggaagctcgcacctcggtatgtgggtcctttccgtatcgttgctcgacgcggagaagtcgcttaccagttggagctgcccgcctccttgggcaacgtgcatgatgtgttccatgtgtcgcaactcaagaaatgccttcgagtgccatccgagcaggccgactcagagcaaattgaagttcgtgaagatttgacctacgtggagaggccagtgaaaatcctggacaccatggagcgcaggaccaggaaccgggtaatccgtttttgcaaggtccagtggagcaatcacgccgaagaagaagctacttgggagcgtgaagacgagctgaaggcagcccatcccggtctcttcgccagttcttccgaatctcggggtcgagattccgtttaaggggggtaggtttgtcgcgtcccaaatcgactctaaaatacatcctcgaaattgtgccgagaataattaaaattcatgtgaaagcctccaacaattaaaatgtgcaaacataaaagtcaaataaggcttggaggatttttgtatatttcctaaaagcctaaaatgcgtaaataaattttagtggaattttcagagcacaaataataattgagaagaaataaacaaagttgaaaaggtttataaaaagaaaaaccctaaaagaagtcctctttccccccctccttcctttctggggccggctcggcccacttctcttccctccctctctctcctctcctccggcccatcggctcctcccccgcgcgcgcgccgctgacaggcgggccgccaccctcgctgacgggtggggcccacctgtcatcgccttcctcgcgccgcgcccgccgcccgcccgtgccctagcgccgccgccgccgccgaatccgccgcatcccgccgtccccgcgcgcattaaagtggggggaattactccccgcgattccctctcccgattcccccactttcccctctctctctccctcggattcgtccgattttgtgcccgcaaagttcgccggcgcaatcaatggcggccgagatctccgcgccggtttccatctcctccggccgctttccctctctcccgacgctatttaattgttccccgtgcctctctcctccgtttccgccgttcgccgctcgccctcaccgtcggaatcgcgctcgcgccgctttcctctctctccgccgtcgccgacgagttccggttcgccgccgccgtcgctccggacttcctcccctctcggcgtcgcctccttcggcttcgccgcgtcgtcgtcgaccccgtccgctcctccgtttcgctcgccgaccgtcggagcgccgtcgtcctcgtcgtcccgaaccgcgccgccgccttcctccgcttcggccgccgttcccgtcgtcgccgtcgaccggggtgagccgaagaccgctccattcgcttcccccttccctcctctctctcgggtgccgctccgccgcgccggtggtcgccggcggtgaccatcggggcgcgggcgcgtccccctcccgtcggccgtgccggcgaggccgccttcgggcgcgccctcgcggctgccaagtgggcccggccgtcagccgcccgcgcccgcgggtgcggctgacgcgtgggacccacggcgccggccgccgtcagccgcgtgcgcccggtccaccgtggaccgagaggctgacgcgtgggccccactcccgtggacccggtccgcgcgccctctccctcggctgacgcaataaacccggtttttaattaaaatttaaatgaagaaattcgtaaatatccatttaaagagcatataaacttcaaatggccatatcttggccaattgaactcggaattggaccgttcaagtctctaatttttccttaagaagtcaagaacccatttttgtgctttgtttctgctgttatgtggagtttattagagtaaaagcctttttcttttccgttggttgtgtagacgctgcagcttcggaagatccgctcttcgtggaagtcgaagccgtcggttgggaaagcgagcaaggcaagtcacatcatctttgagcatattgaatcccagtttataaaattatgttgatttaaattattgcattatcgctttatttaaattcccgcgttaccactgttttatttagccatgcctatttacctttgttatgaccatattattattgttattgttaatattattaccttgttcaccctagatcaaacaaaacctcaactagtggacactctactcatggcaccactagtttaattttaggtagatgcttcgcaatttaattaggtaacattaggtggttttacaactctagactttgggatattctcatcacctggacacactggaattgttggatcattgtggaattggcttcacaccgccccctctattcaaaatcccctaaaatggttttaggctgggctcggggtgcatggttttgatagtagcacctcggccacataaggaccggtcttcgggcctctgttgcaaagcactaccgtacttccacatgtctagtgggtaaggcttagtttgtggctcagtctagtcataaacaaaagtacacggattggagatggatgaagtcgggggtcgatagacattctccagggcaaatgaaggttacacgagctgcggcccggtagtcgagatgtcattggcagagggttggtgccctgctgctaggggctcagtcttgcctgcctgtcccgggggtttcggccgtaggcaggattgggtcggtactcttgtctatggctaggatgggttggaaactatgtcacgtcttccgtctgtataccatggtggtatgtggcacgtggttacacgtgaggaagatgtgtcttgtgggtaaagatgtacacctctgatcagagtataatctattcgaatagccgagccctcggttatgggcaagccgagcaatgtacccaagttagtgttttaattcttaaaacctgcttaacaactaaaatgtggaatggttggcctaggttggcttaggacgagctgggacccagggtcgggttgccagttcggtctgaatcatcataggccttgggttaaggcaggttcgtgtgggttcacggccttgattaataatattgtatagttctaggatcgggtttacaaattggctttgagcaactaaatgtctttaaatgctgtttactgcaaccctaacccctttatattataattcccttgtactcccttgcatttattctgcatttatgggtgtgtcttgttgagtacggtggttgtactcagtcttgctcaatttttcccaagcccagaagaggagctccttgaagatgaaggctttggtgtctagctcgtgcctgccgtcaagcgcctgtggtcgtcgccctagtcttccgctgtttctcgtttgtctttgtgtgtgctgggccttcgctgcccatgtaataagttaactatttacgcttccgcttgttaaactctgatttgtatcaacttttggtgtaccttgcctcctgggacaaggattaatgcacgcacgtaaggaatgcccgttgggttatttccagtcgtgacagcaaatcagggtcactctgtggctgacgactatgaaatgcttctgggtgagtactggcaaacctgaaggaattcttattgctgatcagcagaagcaattcgaggaagccactactctctttgtgggatgcattcttagcattcttggcaatcgtctggtcgaggtgtatattgtcacaccctaaaaattcaaaatctataaattgttgtttaattggaatttttagaaatgattttaaaagccttgaagagaagatctaattttaattaataaattccaatataaaatggggccagataaaatttcattaaatactttgcttaattttataattcctagatttttctgggatttatttgagctaagtaagtatttttaataaatgcaattgcatttaaggaataatttaaattgaaaaaggttttaaaaagtctcttttggctttgggccgaaagtcggcccaaaacccttctctctctcctcggcccaagtcggcccagtccgcagccgcgcgcgcgcgccctcgctcgctgtcaggtggggtccgcctgtcaggtcgtcgtcttcctcgcgtcggccgctgcccgaaaccctagcgccgcgccgccgccgtttccttccaaatccggccgctcctttccttttccggtgaaatcaatagaggggaaatgatcttcgagatctcctctaccttttcccctttggaaacatcggctaaatcggtttggaaatcgatggattcgagtttgcttcggattcgtttttcccgaagtttccttcgtcgtcgctggtcgccgtgggccttcgccgtcgcccttgaacccctttaaaaggatccccgagctctcctctacccgtcgccaccctcgccttcgcctctcgtcgtcggaagcgccctagcgccgtgagacctcgagccgcagtcgccgccgtcgctccagccgtgcgccgccgccgttccggtcgtcgtcatcgctcgggaaggccaccgttgggatcgccaagtcgtcgccgtccttgtccacccctccgccgtcgctgttgaccgccggagcatcgccgtcaccgtcgacccgaagaccgccgccgcttcaacctcgtcgccagtgctgtccgttcctcttccgccgtcgctttggtcgccggtgagttcgccgtgccgtccgctacccgttggtgccctccgatcgtgccgaagcgccgccgttcgccggcgagcttgcgccgtccgagctgtcgagccgccgagccgccgccgccggtggtgacgtcatcgctgacgtcatcgtccccgtctcccgtgagccggtcgtggaccgatcgatctcggccgtccgttttggatggattgatctcggccgtccgttcgcgtgaaccgccgccgtgcacccggtccaccgtaaccctagccgctgacgcaataaatcccctttttcttttcaaaaataattcattattgcgtcataattcaattaaaatacatataagtgttttaatccgattaaatcttcaaaaattcataactaattcatcttagctcggatttagttggttcaagtctctaaatttttctaaaattgagatctacatgttaaaaatatccacatgtacagttcatgcttgtttatgtattgttttggtgtttttgcttctttctgtttagattccgacgtttccggagagtccgttttcgcaggagaagagtttgaagagttccaaggccagcaaggcaagtcacacagatcccgaacaaccctttgagcatgttgatcctatttaaagctgttgtttctattcaactattgcatctatttacgaatgtcattgggtggaattaacctattgtttgttatagccctttttgttcttgattactttactccttgatacctcgggttattaaaatttgactagttgggctatatatattggttcagctagatattagatatgattgcttagccctgcttagaaacattagcacactattgggataacttatgattcacttttatttaatgatggcttaatgatagttcacgatggtcaatcgtgattggttaattaattaacgtgccaactaaaacctgataatggtgggttgtgagcacatggttttgatggtcgtgctcatgacaattaaggaccggttcacgagtttcggttgtgaaacattaaccgtgccaaccacaagccagcatgggcaacggctttatcttttgtatagcatggttcattgcggagcaccagactgagaagtggcggagataagcccacgggggtcgctggggagtccatgccttgtttataagggggtgattatgatccaggaaggtgcgctgcagtggattgtgttgtataaggggtattgtcacaactcctttccgaggtaccgtggtggtattgaggcacatggtgacatgatgtggggttgtgtcttgtgggtacagtggtacacctctgatcagagtaaaactattcgaatagccgtgcccgcggttatgggcgggtctaacaatgtctttcgtgatttgtctcacacctctcatcataatgcaagatactataactggtaataatttgtttagctcctggtttggaatggtatattcctggtttggagatagatctgtacagccgggtatgttgtatagtgttggattaatattgtttaattattacttaactgttttattaaattctcaaatgtttgctaaatgctgcttttgcaaatgaaaccctattatgcgatcctttgttatcctgtgcacttgcatatttgctgcgtggcttgctgagtatgtcatatactcaccttgcgatcattcatcagaggaagagttctacaatgatgctgatggtgtggaggattaggtgtagccctggtcaagttgcctgtggagtggagccgtctgcgccgtttattttattttccgctgcttagatgtcgcgtcccgaaacgactctaaaatacatcctcaaaattatgcatagaataagtaaaatccatgtgaaagcctccaacaattaaaatgtgcaaagttaaaagtcgaataaggcttggaggatttttgtatatttcctaaaagcctaaaatgcgtaaataaattttagtggaattttcagagcacaaataataattaagaagaaataaacaaagttaaaagggttttataaaaagaaaaaccctaaaaagtctttttccccccccccttcccctcttgggccggctcggcccacttccctccctttctctctcctgtcccccgcggcccaatcggccccctccccgcgcgcgccgctgacgggcgggcccgcccgccaccctcgctgacgggtggggcccacccgtcatcccctacctcgcgccgctcccgccgccttgcccgtgccctagcgccgccgccgccgcgaatcccgccgcctcccgccgtccccgcgcgcaataaagagggggaaatcactccccatgattccctctccctttccccccatttttccctctctctctcgcgttcaaacgggcggatttgcccccgcaaacctcgccggcgccattgatggagcccgagattgccgcgccggtttccttcccctccggccgccatctctcactcccaacactatataaacgatcctcgtgcctccctccaccgtttccgccactcgccgctctctctctccgccggaaccgagctcgcgccgtcgccctctctctccgccgtcgccaccgagctccggtccgccgccgtcgtcgccccggacctcctcccgcttcggcgtcgcctccttcggcttcgccgcgtcctcgccgacctcgtccactcctccgtttcgcccgccgaccgccggaacgccgccgtcctcgtcgacccgagccgcgccgccacctttctccgctccggtcgccgttcccgtcgccgccgtcgacccggggtgagccgtggaccgcccatttcgtttcccccttccctcccctctctcggccgccgctccgccgtgcctatggccgccgccggcgaccataggggcgcgggcgcgccgcctcccgtcggccgtgccggcgaggccgccttcgggcgcgccccgcggctgccatgtggggcccggccgtccgccgcccgcgtcgtcgggtgcggctgacgcgtgggacccacggcgccggccggcgcaagccgcgtgcacccggtccaccgtggaccgtgaggctgccgcgtggtccccactcccgtggacccggtccgcacgcccctcccctcggctgacgcaataaatccgattttttaattaaaatttaaatgaagaaattcacaaatatccatttaaagagcatataaacttcaaatggccataacttggccatttgaactcggaattggaccgttcaagtctctaatttttccttaagaagtcaagaacccatttgtgtgctttgtttctgcttgttatatggagtttattagagtaaaagccttttcttttccgttggtcgtgtagacgctgcagcttcggaagatccgctcttcgtggaggttgaagccgacgtttgggaaagcgagcaaggcaagtcacatcatctttgaacatattgaatcccagtttacaaaattatgttgatttaaattattgcattatcgctttatttaaattcccgcgttatcactgttttatttagccatgcctatttacctttgttatgaccttattattattgttattgttattattaccttgttcaccctagattaaacaaaaccccaactagtggacactctactcatggtaccactagtataattttatgtagatgcttcgcaatttaattaggtaacattaggcggttttacaactctagactttgggaatattcatatcacctggacactttggaatggtttggttattgtggaaatggcttcacaccgccccctctattcaaaatccccaaaatggttttaggctgggctcggggtgcatggttttgatagtagcacctcggccatataaggaccggtcttcgggcctctgttgcaaagcactaccgtacttccacatgtctagtgggtaaggcttagtttgtggctcagtctagttataaacaaaagtacacggatggagatggacgaagtcgggggtcgatggacatctctaggacaaatgaaggctacacgagctgcggcccggtagtcgagatgtcatggcacagggccggtgtcctgctgtgtcacgcccggaatttctatccaaaattccaaacgcttacatgtgtgttaaaccctcgtccaggaatcaaccgagacacacaatgacaatattgataatagagtacaattaaataactatttaatattcgcaaataataaaatattacagaggtagataattcctcccaaaaatataaaacattctacgcagcggaaaaataaaactataacaaactacagaacagctatgacgactccactccacaggcatcttaaccgagaacaagcctaatcctccagatcatcaccttcactgagatactcctcttctgatgaatgaatattgcaagaatgagcatatgacatactcaacaagccacacagcaaatatgcaagtgcacaggataacaaaggatggcataatatagctcatttgcagaaaatagcatttaataaacatttaagagaatagtaaaacagttgaataattaatcaatattaaataaacaccatacaacacacccatgttgcataggcccaaccacatttgaacaacccaaccccagttgaacaaattgaacctccaaaccaggaattgtccattccaaaccaggaattaaattaattaccacattattaccattaatgagtagtgtgagactaatcacgaaaaacattgctcaactcacccataaccatgggtacggctattcgaatagtttaaactctgatcagaggtgtaccactgtacccacaagacacaaccccacatcatgtcaccatgtgcctcaataccaccacggtacctcggaaaggagtcgtgacaataccccttgcacaacataacccatacagtgcaccttttctgatcat

SEQ ID NO: 24675 - DNA, 748 bp, Oryza sativa
gatctgtgtgactggcctggctttccacaacgcttcggagccttcctcgacagaaacgctctcctccgaacggtcggatactagagcaattaaactaaatcaacaaaacagtgcaaaaacaagcataaacagtacatgtggatatttttaacatgtagatcttgattttagaagaatttagaaacttgagccacctgagacggatctacggttatttagttatgattttccgaagttttaatctattagaaaatcgagaaaaagaaaagggaaaggagatgatgacgtcatgctgacgtcagcaatggcggccggttagggtttgcgagctcgccggagctagggcggtcgaccgggtgattggaggacacctacgcgtagaaaacatcgagacgaacccgatggtactcaccacaacgtctatcgacgaacggtgatggccggcgacgaggaggaaggcggtggcagctcggcttgacggcgacggcggagctccggtggtcggcggcgaaggaggacgggcggccgagcttcctcacctccgtgcgcacctaacggcgacaacggcaagcggcggagacggcggacgcgtcggcgcgacatggccgaaagatggccggcggcggcggcggctaaatgcacgtggcggcggcgctacggtgcacgggagaggacgagagagggggcaaacggaagaggacgacgaggggaagctttataaagcattggattgaagagatcgaactcc

SEQ ID NO: 24676 - DNA, 2706 bp, Oryza sativa
cagtggcaaagccgctaacggtttggcgggacttctagaaagtaaaaaatgaacccaaacaataattatgttcgattttaaaaatcccaataacaataaagaaaggaggcaacggatggacattagaggagtcgagtggcagtgtttgatgggatttctaaaaattataaaaacgaaacccactaagacaataaactctaaaaattataacatcaaaattttaaagtttccaaggagaatgaataggaaaagtgatagatcgagcaagcaaataaagaatagggtaacttttaaagactataatattaaacacgaggatgatatggtttgatttttaaaagttttaaaataatgagataactattcaataaaatttaagtaaaatcatattaaaaatagataatttcatatggatgctagccgcgcaattgcgcgggccacccagctagttaaaactaaaaacatctcgaaacaaagaccacagcttctcccctgcatcccaaactgtgtttttctccataggtacaagaccctttcaagatttcgtgccgcaagcgccgtgtcgtccatcccatgccgcaagcgcaggcctccacggcgtagcggccaacgcaccggctctatccccggtctctcctgatctcctcgcctttcctcgtcccacttggagaagctcacgtcagccgtcctcaccgcacagggagccaccgcagagcaacagcactcggacccagccgcccggtcaattggtacaccaccatccatccccgtgagcgagcccatcccatcatcccacctcgccaaggcgccacgtgtgtttccatttccatattttttgccatttctatttttgtttcggtcgattaccaatttcacatggctcggccggtagaaagtcgaaaacaaacaccggtcggctcacccctgactaggcttccttatttctcgatcctatcttatctctttcccatgtatttctatattattcaacatcatatcagagcggatcatttagtcaactctctcacgcttccgccgccattgtccccgagtgggttctaatctcctggggacagccatccccactcgtttttttcttcatcgatgtcgttctcgtcctagagagatcaatctcctggtgctgtgcgtcgtcgtcttcgtgtcgttgaatcagcagcaacagcaccagcgacctccacacgtgcccggccagtcccttcatagacactgttccgttatcaaggacatgtcgacgctggtgccgagtcgctgctgccctggaacccctcgaccccgacctcatgccgtcacgggcggatcttgtcagccctcgccaaccatcgatcccgccgcccgatctggaggacgagcgcgccacctccggctcgtgcagcccaggttgtcgccaacacgctgccatcgactcctctgcagtcatcaccgccactcttaattaccaccactagccctcacctggattccaccggtcgagcacgcctgccgggccgcctcctttatcgacttcagccgtgatctgctctgcttggcgccctccaccagcccccacaactctgggatcctctactccatggccactgacttctcgctcgcaactatcaaacctagcaaacttatatcaaggtgggctatatatggctttcattttggcataaaagcaagttttagttcacaatcttttgcaaagggattttataaagcaattcaaaccatgaatatgaatatatcacaatatttataattgtaataacataacacttgttgtcctccatggcaacaagtctcatgatcatcgtcatagtcaccaaaactcaacacaaatcatcattccaatgccccattttcataaacacatttataaatcaagtactcatgacactccaccaagtcgctcatgactctgcctatttggtacaactttaccaacatgatgtgtatcactctagtctgtccggtacctgttggtaccaccgcacaatacacgttgaatgtggtctagaggtcacaacacaacctttatattatctaatgcctagccttgcaccagcacgatgcatgttactccacattacacctagaatgtagtgtcgctaggtggtgggtccatgccttgaacctaacaacgtaggcacaaccaacgtggtcccctacgaagcacaacaccattgtattcgataaacttagacgcccatgccgtgaggcggaatagttagtcgtcccctcccccgaacacacacacgaatgaatcatccgcacatcaaacacacatacacacatggatagctcctctagacaggtcattaaataacttaattggctaaggccaccccataaatagaacttgtggatgcacgatatactttaattggtgacacgaagtttagtccttaacagaggaacttgccttattctttggataaatcggacaactcctaaatctctccttcaccactaacgcaattaatctatacaaaatgacatgatatgcaaataccgagagatgcaaaaaaaatccaaaatgctctaaaatgcatgatttgtgcgcagtgggttggtactgacctatgatgaatttaagtgagagaatttctattttatcacttttcttttgggagttatgaattttataattatgctctattaaattttttatgcagtttagaatcaagtttttttaagtttcgggtc

SEQ ID NO: 24677 - DNA, 2796 bp, Oryza sativa
ttcggcccaacccaccatgccaccgttggatgcaggttttgactggacggttgagatgaagccccaatgacagttggagggtattaccgaccattgtaaccatcacaaccgtcatagttcagctataaaaggagctcctcttcttacttcactcacacacttcaagcaagagctctcttatattctctcaagttagtttagtgttcttaaactagtggaataggaatagagtagaaataaggagtttggaagtcttctgaagagttcgggtatggctctagtagctttcctttcctcttttgtaagccttgtactttatttagaatactcttctttatacatttatggtattgaaatactttccgagtatattaatgacaactttacattatgttcgtgttatactgaatatactgctagcttatctaggacatgctttggtgcgggtataatgtttgcatatgcaattactctatgtcgtgacgatgatattagagtagtatccggtagtttagacgtggtgtctagattacgggatatcattatttggggttatatgctgcggatgagatgtgggccgctgatggtgacagctcagtacgggtattcctccgcgcgtgtatataatactacgttaattccctggggagggtactcctacgtatttagccccggttgtatggtcatgacgggctgtcataagaaactcagcagtcaggggtggcttttcgaagtaccaggagggcattggatagagggtattagctagtatatcagaaaactagaatgtatgtatactatgtatactagaagtataggagtagattatctttctcttttctttccacttagcttatataatttagtatgagaatgagtagctacagcttgtgtgtcactctacccttggattatcttaactcctgcttaggatatgattatcacaagtaatatataaattattagtcaatttctttctacatgatcttcccacgggataaaataaatatgatactcttagaatactctcgggtgaaatggtacaatggtatatccgtgcgtttgtgggtgaactctataaccataatataacatgagtatttatgcgccattgctgggaattatatttttagtaatgtcgttaagaaataccaacagacaccatgttgccacgatgcactaggtcccacgttgcaacaaaccgtactctcgtgaccgtgcgtatcggctattagattcgtttgtaaatggattactacgaatatattgcaactgaaaaccccctatagccagtaatctatttactactgcctccgtttcaggttatttgactttcctgaaacggaggaagtaacaaacgaacgagacacgtgtcgatctgtaaattagaattgagcagcgtttttgtcacaccctaaaaattcaaattatataaattgttgtttaaatggaatttctagaaaataattttaaaagtcttgaaaagaagatctaattttaattaataaattccaatataaaatggggccagataaaatttcattaaatactttgcttaattctataattccaagatttttctgggatttatttgagctaaggaagtatttttaataaatggaattgcatttaagaaataatttaaattgaaaaaggttttaaaaagttctcttttggctttgggccgaaagtcggcccaaaaccttctctctctctccccggcccaagtcggcccagttcgcagccgcccgcgcgcgcgcgcgcgttcgatcgctgacaggtgggtcccacctgtcaggcccgtcatcttcctcgggccgaaaccctagcgcgccgccgccgagctgccgccgccgttcctttccaaatccggccgttcctttccgtttccggtgaaattgattgaggggaaacaatctccgggatctcctctaccttttgtcctgtggaatcatcggctaaatcggtttggaaatcgagggattcgagttcgaatcggatcgggctctctctctccaagccgagctttccttcgccgttgccgtcgccgtgggccttcgccgccgcctccgagtccctttaaaaggctccccggtgtctcctctacccgccgccaccctcgccttcgcctcttgtcgccggaaaagctctagcaccgtgtgccctagcgccgccgtcgtcaccgtcgctccagccgtgcgccgccgtcgctccagccgtcgccgtcgctcgggaaggccgacgtcgtgttcgccgtcgcgtcgccgtcctcgtcctccccttcgccaccgccgaagaccgccggagcgtcatcgccgtcgtcgacccgaagagcttcgccgcttcctcctcgtcgccgtcgccgtccgttgatcttccgccgtcgttttggtcgccggtgagtccgccgtgtcgtcctggtggtttccgttttcgtcctcgcgccgccgttcgccggcgagcgtgcgccgcccgagccgtctgccccgcctagccgccgccgccgtcggtgacgtcattgccgacgccatcggggtcgtccgccgtgagccgccgtggacccgatcgatctcggccgtccgtttggattggatcgaatctcagccgtccgttcgcgtgaaccgccgccgtgcgcccggtccaccgcaaaccctagcccgctgacgcaataaaccttcttttccttttcaaaaataattcattattgcgtcataattcatttaaaccgatttaagtgttttattccgattaactctttaaaaatcataactaattcatctagctccgatttagtgg

SEQ ID NO: 24678 - DNA, 8541 bp, Oryza sativa
  unsure (1)..(8541): unsure at all n locations
gttgtataaaaggtaatgtcacaactcctttcgagggtcccgtggtggtttgagccacatggtgacataatgtgggttggtgtcttgtgggtacagtggtacacctctgatcagagtaaaactatttgaatagcccgtgcccgcggttatggccgggtctaacaatgtctttcgtgattagtctcacccttctcaccataatagaagatgctataactggtaaaacttgattagctcctggtttggaatggtatattcctggtttggagatagaactgtgcagccgggatggttgttcagaatggttgggcctatgcaacagggtatgttgtatagcgttggattaatattgtttaattacttaactgttttattaaattctcaaatgtttgctaaatgctgtttttacaaatgaaaccctattatgccatcctttgttatcctgtgcacttgcatatttgctgcgtggcttgctgagtatgtcatatactcatcttgcaatcattcatcagaggaagagttctacagtgaagctgatggtgtggaggattaggtgtagccctggtcaagctgcctgtggagtggagccgtctgcgctgtttatctttttccgctgcttagatctttattgattgagaggaactatctacctctgtaatgatattttatacgcttaataattagagtaataactgtactctattatcaatttgttattgtgtgcctcggctgattcctggacgagggtttacacacatataagcatttggaattttggatagaaattccgggcgtgacagttttttagagcaggtacaatagcaggctataagccggctgtaaccatatatcgagaagaaaagagaagagagagaagaaagcgggctacagatttgtagccggttgcaacacggactccaagatattatgtgtgtatgagaggtgggaccgtgtattaatggtgcagtatatttttatagttaactattgatgaatgggctattagattggctatagatgttttggagccagtagttggctacactattgaccttgctcttaaagtaatccatttcctatcaacaagcgtgagacacgtgtcaaccaatttattaatcccgattattttgggacagaaccacccagtagtagtccgctagcgatggtttctagaataatgctctttcagtcccctcctttactcatttttgggagacggcggcgacagaccaaatcgggccgatgtagcaacccctgccgctccctgccgacggatccgtgtgaaagactgtcccaggtaattgttgcgctctctatcaacatttctgctattttaaatctcatttcttttttatcccaaagcgaagattggagacaatccccttcttcgttgctgacattactgtccctgccgccggccgccaccccgccagatcaggccggggcggcacggatctagcggtcgccgccgccgccaccggggcgactcccctggccaccggagcaggctggcgagaagccccgccgccgccatccttacggtctttgctggcgaccgctcaggcagcggcgaggtggaggaggaagaaggagcgggaaggggtggccggacttgtcgcctccggagccgtcccgggggtagggcgacgcaagagcgtgacggttgacgctgtgaggtcccttcagcggtgggaacttcatggctgcggatcaatggaggcggtggcgatgaccacggatcctgaggcggggcccccatttgccaccccttatggcggatctggctggtggcggcgcgccaacggtgttgccaggaggccggtggctgggtgagccagcaaggcttcatggtggctggtggcctggcaggaggacggcgcggctgtcagcgacggtgcgacggcagggacctctagggccggcgcgactcgggaaggtggcgacaacgggcagccgaagaaggagaatagatggggaccgacggcagcggggatggagatgatggcggggatggaaggcggcggcgaggatggtgacagcgggccggatccagtcgcgccggagtcgggcagatctggtgtgaggcaagcccgcagtggtggcggcgctgcggagttcgcgggctcatggcgatggtggtggcagcgactggacagcggcgacaacaggtggctggccaacggtagcatcggctgccggctactgtggcaacgacgctagtggctagacggcggcgaggtggctggccgtcagcagcagcgactactgtggctgcgatgggtggaggcacggtggtggtgaccgtgactgctgggggaggcatggtggtctcagacggctagctgggggcttggcagatggctgcacctagccagcgcgacagcgattggagcaagggtcggactccgaccatcggaggccggcttggcgcagagaggcgcagccgatggtaggaggccggactggtgcgagaggcgcgtctggtggcggtgcaggccggcttggtgcgacaggcgcgactgatggcgggaggccggactagcgccagacgcgcgtctggtggttgagtaggccagcggggcgcgatgaggcgcggtcggtagtaaaggaggcgaccacgatgcaaggaggagctactggtgggtgtggcgcggtcttcggcgcaagaaggctggctagcggggggcgccagtgcagtggtcccacatgtcggtagaggttgagcggtgttggatcatcggtgggtcagccgtggactcgcaggtgatgagcggcgggtgaaaacccagccccgccttggccagaccgaaaacaatggttcatcccccctcctaagggcattgtcgtgccgtctcatccctcaagggtagttgcgggcgaaagcccagtcttggctcttttgagtccctgacagatggcggcggtggttttccatcacttctctccttggagatgtcatttaggcatccccttgctgaaaaccactcgaacgattggtgcaagcacgctctaagatagagttgggctttgtattggttgtaagggcgttttttgtgcgatctcgtctatgctcctttgttggcctagcggcggtcggtcatggctagcggcagccggtccggtacagccttctcccggacctatgtgttggcgctatcggtgtgtgggtggtggtatatatttttcctttttcctggttacgaccttccaaggttgtaatcttgtaatttttttctgctctatcagtagaaccgcaccgtctcgtgtgagtcgtaaaaaaaaaaagaagataggagacaatgcggaagaagggacatataagtagaagcatcggttataattaatcgggttaaagtttagcagaactgatcggatgtttatatttttcttttcagccgcaagttgatgaggggcttgctaatgggcgcgggtgcgctagctgcctaactggcgcagccacgcacgtcccaattccacctctcctcaacgctaataacatgattagcattgatgacgttaattagcgctaatgataattgttagtattagtttttttaaataaaataatacataaatagaacttttaactcagatttggaaaactttcaacccggatttgaaactttcaacccagatttaaaaactttcgactcagatttggaaaactttcaatccaaatttgaaaactttcaactcagatttaaaaactttcgactcggatttgaaaacattaagtcaagatttttgaaaaacttttaactcagatttgaaaattttaaagtcaagatttgaatacttttaatccaattttttaaaaaaaattcaacttatattttgaaactttcaaatctcgatttgaaaaaattcaagtcaaatatttgaaaactttcaactcggatttaaaaacttttaactaaagatttgaaaactttcaactcagatataaaaacattcatttgaaaattcgaaacatttaactcaaatttgaaaacttttatcttaaaattcaaaaattcaactcaaatcttaaaaacttttaactcaaattcaaaactttcaactaaaattgaagatgaaagattcaacttctaaaataaaaagatcgcagaaaaaaaggcaaagagaaacgaaaaaggcacgtacgttaggtttaggtttttcgaaaaaaaaaatatggacgtgaacgccgtctgcgtgcgtacgagccagcgctgtgggccttatggcctaaacgcgtgccgctatcacgcacgcgcgaattagctctcgcgagttgatgagaccctgtgtcgtgttaaaacttgaaagccccggccgccagccccaagcccccgaaggcccgaacgtatcagattcctagcacaattcaactgtgcccaaaatcattgtgcctccagcctcccctggaggaggtcgcccgcccgccacctgcgccgatctccctcgatcccgcgagatcgtccgtcctgctccttccgccgcatccttgtgagcatcttgatcatctctctacaatatgcacctgttctcgtatttgcgttacccctagcaagcttctgctgtaggtctggaacgttagatccgctcttggtttattccaatctggatgcaaagagttcgttcctttcccatacgagactaatttcgtctaataatacacctatatcaaaataatccggtatatattctcaccgtattgtggtaccttttcagctaatctatatttctatatatgtattgaccctgtttaattcagaactcgacatttaacttccttgtcctgatatacaagcaacttcgttctgccgtactctcttttttttcggcgaatttgagcttgacaaccatggtgatgatgagctgcaagaggaggaaggtttcaccagccagtggtgctggtgcaccggtagtgctgccagaagagatgatgattgaggtgctccagtggctgcccgtcgaatccgtcctacgttttcgagccgtctgccgatcctgggccacggctctctaggacaaggaataatatacgcacgcatggaatgcctgttgggttatttccggtcgtgacaggagcggcgacaggtggcaggccgatgggcgggctagggtttgggattaggcaaccagctgtggcagaccgtcagcggcggggctaggtttcttctttttgagaattttatttttttcacaatattttgattttcatgcggttggcttaagcgcccgcatgaaaatttttttttttcgcatgtggttgggctgaacgcatgcaaaatcctgattttttgagcgtatgcctatccccatgggccttatgcaaaaatgaaatctgtagtgagcaaagcttattggatgtttagatttttcttttcaagccgcaaaatttgatgaaaccgtgtggtgttacaacttacaagcctcggccaccagcccaaaacgtgtcaaattcatctgtgccgaaaaatattgtgcctctccccctcgagtatctctcctccccgtcggcccgcgagggaacttcgcccgccacctgcgccgatctccatcaatctcgcgagcaggagcatcctggtgagcatctcgatcgatcatctctctacacaacacgcacctgttctcgaatttggtttacctctagggcaagcttctgttctaggtctggaaggttgaagcttttttctgaacctccatgtccacgttagatctgcaatttggatgcaaagaagagttcgttcctttcccgtatgagtctaatttcgtctaataatacacctatatcaaattattatcaatccgttatatattctcaccgtattgtgcattggaccttttcggctaattaatttatatttctatatgtattgaccctgtttaattcagaactcaacatttaccttccttgtcctgatatacaagcaacttcgttctgccgtactttttttttttggcgaatttgagccgatgtatccatggtgatgatgagctgcaagaggaggaaggtttcaccagccagtggtgcaacggtagtgctgccagaagagatgatgattgaggtgctccaatggctacccgtcgaatccgtcctacgttttcgagccgtttgcaggtcctgggccacggctctctcttccgaccaattccgcggtttccacacggccaagaacaagatcaagccgttgccacccaagctgttcttcgtctcgcagaccgcgggattcggctccacatcggtgcacacatcctcgccgctgtcgcggtcagtccccggcggtgacattcatcgtgatctgctacttccatctggacaatgtgcgcggcgatttcatgnccatgacgcctacaccgtgccatggcctcacctatctgcacgatgctatgggactagagtactacgttctcaatgcggcaacagggtcgatcagccgtctgccacctgccaaaccgtgccatctggatctgctggactgggattcgatgcccggacaggggagtacaaggtggttaggctgtttcgagagataatttctggagaaccgcataccaagtgtcagatatacactctagggggcaagcatggtgactcatggaggccagctagtggaggtgtacctttcaaattccgcactgctggaacttattctatttcagcttcacaacaacataaacttcttccagtgtttgtggatgggtttcttcactggcttactggctctttgttctctttcttgaggccacatgctgccatcttatccttctctgtgacagaagagacattcagattggtcaggtcaccgccctttcaggtttcaggagtgcacttggtggatctctctggtaacctgtgcatggtccgggaccttcgtcgcatgtcgtctacgctggagatttggaagctgaatgatctttactccagtgattggtcattggagcatcgcatcgatttgtcgacggagcatgttgcccgagatttaatgaaaccagattttatcagagttattggttctgctggcagtagtggtatgtcagggaagaagaatgtaatcattgctacatccaatcgcaaggcgatcgcctatgatcctacatctgaaacactagaaacaatccttgagatcaagggaactcctttgccttaccaaactgcacgttctgctcttggactgatcagtttgtttgaagacagtcttgctcctgtgtgtaaaaccaatgaagagatagcattgtcatctccccttgccaaggtgataaaggaggccctactacggcttccgggtgattatgccgtgcagttcaaacttgtctctaagcagtggcatagatttattgaaagttggagcttcgctcgtggataccacatgtataacaacagggacaggaggccaaagatcaggcttgtgggcatgggcacaggtggatcatacaggttttagttttgccagcatagaaaaattgcttcaagaatctcctagtaaagatacatggcttgatgcaaaggtggtttgctccaagccttgccatgggatgaatctcataagcactgagctggaggattatctatacaacccttgtacaggttaccgctatgtccgcagtacccgaggggctcttgtctacattccaaatagaatacctagtgatagatttcgtcacgatcatgcttttactaccggtaataagaatgtcggcctggggttcgatccactgatgcaggagcatgtcatttctatcagtggagaaacttcaaaacctgtcgttacaacataacatgctcgctttttacctgtaaatcgcgtcacacgtgtgattttttacagccgcctctgcctgtgaatgacatgcctccggcttacttggctggatttctgtactggatgagtgagccaaggttgagccagagtaagacaagcgccattctctcgttcgagatcgcgaccaagacatttgttgtcatccagtgcccttcgtgtgctctaacaagacacaacagaagcccttgcgaatcatttgtggtagagcttgaaggaatgctttgcgttgttctcgctaatccgtttgaagaggaattggatatttggaagatggagcatggtcaatgggatagagcatacagagtgtgtctgaaaggttggcctggttattcccttggagctaatgtcgtggttccgatggctgttgatccgaaggatggaaggattctgctcaacacagggagtaaattgggtctctatgatccaacgaagcgggttatcgaaaacctgtatgatcttgatgaggtgctgcgtgtcaaacagacagatgagacgctgcatgtcgaagataaagaaaaatcttagcagatccaagtccatgatggttcccagttaaaatgtcagcattctgtcaggaagtttcgcatatggctgtcacctctagaacatgacaggttctcttatgatgcgcctgcacccgcttcatctaggaagaattctgcttgctccaatgacactgagattatgccctttgttcctattttgtatgaggatagtcttgcgggttatcgcc

SEQ ID NO: 24679 - DNA, 2849 bp, Oryza sativa
cttgggccaactgatgggtttgcttggcatagaactggcaagccttgcatcacctgacccagtcctgggcatcctggagtgtagctggccactaaaatccttgacggaaggctttaccgaccaaagtgcgcgaggccgagtgggccccgcattttccctcgcgggcgtcggtgataagctctacgccttgctcccgagagatacatttcaagaggaccccattggcgccgctccggtagagggtcccttctacaagcatgtaccgtttggagatgtgcgcgagcttttcggcttcggcgcgatccttaggaagagtgtgattgtcgaggtatgcccggatgtcggccatccaggcgacctgacatggggggtcggggttgaccccctcgggccccgaggcctgtggctcaccaggcgtcagggtgggggtcgcggcgttaggcaccctcggggggtccgagtgcgccgacggctgtgtgagattttcttcaaaggcccctgggggagtggggctcgtgctgacgccatgcgcgacaactcatcggcgactgcattgtcgcgcctgggaacgtgtcggagctcgagcccatcgaagtggcggtccatgcgtcgaacttcgtggacgtaggcgtccatctgctggttggtgcattggtactccttagatagctagttcacgaccagctaggagtcgcccagaactaggaggcagtggatgcccattcctgccgcggccctcagtcccgctaggagtccttcgtattccgccatattgttcgtggctcagaaatcgagacgaacgacgtacaaggatagtcttgctagttatccccttgccatcaaaccaaggtgcttatttcgataagctatcacacatttaaatgtaatcaagtgagctctgttgcagcctttacatcggcgcagttttgcttttactttctaacatttgtgcttgagtgttagcatatcatgtagtgctgctagctagtgtgcatagaaagttagaaactatatttcttttattttccacaggtattacagaatctggtttgattttgacaaagccatgtatgtcactaacattgtaacaggtacctcacgactcagttacggtctcaaagaggttctttttgcaggtacattttaatgagattttgtctcaatagggcctctccaatctgttcatcacatgaattggaatcaaccttgtagaatttctttagttcttggctacctttagataccaactggtctgacttcagtctcgtatctctcatacattgcagggaaacttgagagcacgacaattttcagatcttccccaaatgcaatgtttgaaatttggtactaatggtgacttcttcagaaaatagacatttattcgtgagacgtttattgggggaccaaaagatgcattgatcttttttccttagaaaataggcatgagagacgttgggagttcttttaattttttcattgctgcagtttctgtcctggctggctgttactactatggtgaattgaggcatagagcgacactgcagacctaaccactatggtgaattgaggcatagagcgacactgctgacctaaccaaattttgctacttactctaacttttaaaatctatctttctaaagatggtcgtctcgagccatcccattaggccacatggcagtgttaaactttgagataaatctaaaaaaactatacataaaaaagtagcaaaaaataaaagacacaacctagagacttcccaattatctatcctttttagataaatatagaatatttataaaaaaatttatctatcctctttgagataaatctagaatactcatacaagaagaaataccgagaagcaaacaaaatatctttcccctttgcatctatctatctcctgttgattggtttcatgccagctgattgacttgagcgacacgtggcgagatacaagcggcggaaagatcgtcgggtaagaaaccatctataaaacagacaatcttaggatggtgaagaagagccgctccatgtgcatctcgcaagttaggatggtgaattgaaaagaaaaaaacaagaagaagagcggaaagatcgtcgggtaagaaaccatcataaaacagacaatgttaggatggtgaagaagagccgctccatgtgcatctcgcaagttaggatggtgaattgaaaagaaaaaaataagaagaagagcctctccatgtagttgggccacatggcaccacaacccaacagtgtgtgatcggaccagtgcaaacatgtaaaagagggaaaaaagaaaaaataaagagacaaaaaattactttttaaaattcttcacaaattatcccagggcaagtattgtgaccacatatcttatgtttcgagaaactaaaaataatagatagaaaactaaatgacagaaatatctgctccttctttctaatattgaatcaaactctataatcctaataactattttttaaatattgtttttttttgcttacattataaaataaataatatctagatctttcaaattttagaaaaggcaacgattatgataaaacaaaatatctaaatttttatgccaaatctaaacacaaggatactcaaaatcgtaaagaagaattgaaatattagtatgttaattatgtggtttttagaaatcatacacacaggctaatcaactgacactggtggagaaaccatctttcgtcggtcggccgatttccacaatagtcccggatgcaataaaaaccggggctaaagatcatctttagtcccggttcgaatgctgtcagggcctgtcaggcccccccgggatctttagtcccggttggtaacaccaa

SEQ ID NO: 24680 - DNA, 2191 bp, Oryza sativa
  unsure (1)..(2191): unsure at all n locations
agtcccggttggtagcaccaaccggggctaaagatcccggtgatctttagccccggttggtgctaccaaccgggactaaagtcccacccctatatatatgtcttcttcctcctccagctgcccgagtaagcttcaaaatttcttcaaaaaagaggggaggtcatgccaaaatttctattgaatttattttggtgattacatacaaatcggaggtgcctaaaaggtttgcaacttcatcctccaatgtttttttttgtcatactacatttgcacctatgttttgcacactttttttgtctccaaaatttagttgtaagttgatgagagagaaaatgtgtgtggggaagaaagaatatatagaaatttagttcatttgctaaacaagtttttataaaatagttgagaaggaaaactctagtgaaaattaatcttaaataatagaaaacaaactaaaatgaaaattaaaagaagtaaaacacattaaaattagtttaaaactttacaaatagtttttaagaattatttggtgtaatattttatgatttttgtatgaataaagatatcttataattattgtatgactgtcattattgtaagaataattatttgtgtacggtttttttgactcatgtagatggatcggcaatggatgtacgctgaccggcggtccaaagagtttattgacggcgtgcactattttttgagagtggccgaagctaacaggaaaaggggttttatttgttgtccatgcaataagtgtaagaatcagaaggagtattctgcatccaggactattcatttccacttgtttgagtcggggttcatgccaagctataattgttggacatcccacggagagcaaggtgttgaaatggaagaagatgaagtggaagacgacaatattccggactttgctcagtttgttggatttgaaggaaatcaaacgggcgaggaggaaatagctgctgatggtaacgacgttgcggatgatcttggtcagatgttgcaggacgccagggaggacagcgaaagtgaaaaggaggcccataaattggacaagatgttggaggaccacagaacttcgttgtacccaagttgcgagcaggggcacaaaaagttggataccactctggagttgttgcaatggaaggcaaaaaatggggttagtgacaaggcatttggcgatttattgaaactcgtcaagaacattcttccggggggaaagaaattgcccgagacaacgtacgaggctaagaagatagtctgcccgttaggactgaaagtttcataagattcacgcatgtccgaacgattgtatcntatatcgcggtgaggagtatgagaacctagaagcatgccctgtttgcaagcactacgatacaagattagacgggacgatccaggagaagttgacgggcagctaacaaagaagagaattcctgctaaggtgatgtggtattttcctataataccacggctaaggcgtttgttcaggaacaaggggaatgctagaatgttgcgatggcacgctgaagagcgtcaacatgacgggatgctgagacactcagccgatggttcgcagtggcgaaacatcgacagaaaatttaaagaatttggaaaggacgcacgaaacatacggtttggtttgagtacggatggcatgaatccttttggagagatgagcagcggccatagcacttggcccgttacgatgtgtatctacaacctccccccctggctatgcatgaagaggaagtacataatgatgccgattattattcaaggccccaagcaacctggtaacgacatcgacgtgtacctaagaccactggtcgaagatcttaaacagttgtggaagaaggaaggtgtccccgtgtgggacgaggacaaacaggaggagtttaacctacgagcgctgctgttcgtaaccatcaacgattggcctgcacttagcaacctatccggacagtccaacaaggggtacaaggcttgcactcactgtatggatgaaacagaaagtacgtatcttaagcactgtaggaaggttgtatacatgggtcatcgtcgattccttgcagcaaaccacccggtacggaagaaaggcaagcacttcgaacataaggccgaccaccgtacgaagcctaaacatcgcagcgggaaaacagtgtttgctatggttaaagatcttaaa

SEQ ID NO: 24681 - DNA, 3477 bp, Oryza sativa
gttgttatatgagaattccgcgtacggcaaattcttatcccaacttccaccaaaatctagaacacaagctctcaacatatcttctaaaatttggtttactctttccgtctgaccatttgtttgagggtgataagcagtactgaaattcaaacgggtacccatctctacttgtaatttctgccaaaacttcgaagtaaactggctacctctatctgacactatcttcttaggaacaccatgcaaacataccactctggccatatataactctgcaagcttatgccctgtataggttgttttgaccggtatgaagtgagcgacttttgtcaacctatcaaccactacccaaatagaatcatgtcctgccgacgttctgggtagaccggttataaaatccattcctatttcttcccacttccactctggaatcttcaacggttgtaacagaccggctggcttctgatgttctgccttgacccgctgacatacatcacatagagccacatattctgctatctcacgtcgcatactggcccaccagaattgttgcttcaagtcttggtacatcttagtgcttccagggtgaatggaatacaaagtttcatgagcttctttcatgatagtatccttcaactccttattatctgggacgcaaattctttctcctaaccacacagttccttgctcatcttctacaaaaccgatggctttacctctcctcatgttctttttaatttcttgtatgtcaggatcattcacttgagcttctctaatgtcacaccctgattttcgtcttaggatttataaattatttaataaattattaatagaatttatattaaatgttcattaatttacaagtgaagttaaatgtgggaaataaaatttcctaaatataaagcatggatggatttaatttttattaaattctccgtggttaattatactctctggaattttctcggatttttcggagctcaattcctaattttaatcatacaaagagcatttcagtaattacccacatattaaattaatcattaaatggtctaattataattttgttaagtacttttagtgtccaagtattttcaggatttttcttgaaattatttgagcattggaagtatttttaacaattgaaagatcatttaagtgattattttaattggaaaaagtttttaaatccttctctaagccgttgggccgaattcggcccaacatcctctctctctcgcgcggccgagccggcccaatcagcccagccgacgccgcccgctcctctctcctgtggagaccgacaggtgggccccacctgtcgggagctccttcaacctccggccggctgccctagccgagcccgagccgcccctcttccgcctccgattccgcctcaatccgatccgtttttatccgggtttttgaggggttttgatcctctcgttctcctctatcttttcccccaataatcggagcgaatcgttgaggattttatccgaatcgagttcgtttcgaatttatccctaaaaaccgagtttagttcttcttggatcgattcctctcgtttggagttcgatctcttcaatccaatgctataaatagcatcccctagtcgtcctcttccgtttgccccaagtcccgagctccctcgtcgctcgtagcgctgccgcgccgttgccctagccgctagccgtcgccggcgatctccagttgcgccgcgccgtcgcctccgccgtcgccgccgtttgccgtcgccgccgttaggtgcgccgtggtgagaggaatctcggccgcccgttccccttcgccgccgaccaccggagctccgccgtcgccgtcaagccgagccgccgctgccgttctcttcgtcgccggttgtcgtcgtgcgtcgtttgacgttgtggtgagtaccgttgggttcgcctcgtcgtcctctacacgtaggtgtcttccaaatccccggccaaggcccctatctccggcgagcttgctaaccctaatcggccggccgtgggtgacgtcatgctgacgtcatcatcctttctttttccctttttcttttaatagattagatcttctaaaaatcatatctaaataaccgtagatccgtttcaggtggttcaagttgctaaatttttctaaaataaagatctacatattaaaattgtccataaattgaattaaatttatttaattctttttaaatgggctttaattagatttgatcttgtaaaattcataattaattcatatgaagtcagaatgaggccgttcaagtcttataattcatctaaaattatgatctacatgtttgtttactttttatgtactgtttattttgtttttattagtctttttcttcgttttgcgtgttagcttgtcgtttccgtcgttgcgaaggttcgtgagtgcgtcggaagtgatcaagaagattaattgaagaccgattattgcaaggcaagtcacacagatcgtaaacacaatcctttgagcatgttgatcctatatttaaattctctatttatttcaactgtgcatttattttcgaatgtcaccgggtggtgtgaacctattcctttgttatggccaatttgcattgaatgtcctattccttgataccttgggtaataaattgattagcttgaaccttatgtattggtttggttcagctaaatgttatatatatataattgcttagcaatgcttagaaacattagctcactaatgggatgaatcatatatactacattattatttatggttatattgaatggtagctcacgatggttaatcgtgttatgataattaattggtaattaaaatatgattattggtgggttgtgagcacatggttttgaaggtcgtgctcatggcaattaaggaccggttcgcgagctactgttgtgaaacatttatcgtgccaaccacaagccagcgtgggcaacggctttatcttttgtatagcgtgattcattattgtgcaccagactgagaagtggcgagaagtccatgggggtcgctggggagtccatgccttgtttataagggggtgattatgatccaagtacggtgcactgtggtgagttgtgttatgcgaggggtattgtcacaactcctttccgaggtaccgcggtggtactgaggcacatggtgacatgatgtggggttgtgtcttgtgggtacagtggtacacctctggccagagtaaaactattcgaatagccgtgcccgcggttatgggcgagttgagcaatgtttttcgtgattagtctcacacctctcataataattatagatgttataactggtaataatttgcttagctcctggtttggagttagatctgtacagccgggtatggttgttcaggatggttgggcctgtacagcatgggtgtgctgttaagtgttgattaaaattttggattaattactccactgttttatttctcttaaatgttttgctaaatgctgcttt

SEQ ID NO: 24682 - DNA, 2001 bp, Oryza sativa
aggagaagacgttggcttataccccagttgagctgcctgtgggagtggagccggagcttcgctagattttattttccgctgcagttttcttcttggtgaggactaagtgcctcttaagtaagtatttatcgatttagttattatgatggatttgtatattaaattgtcagtttgtgtacctcggctgattcctggacgaggattttatgcacaaattagttcggaaattactagtgaatttccgggcgtgacatctaacttgatcaaacagagtaggtttagcttgtaaagcggccacaaaacctttgttgactattcccaagttcaagttttcaaattcttggcataactcccaaggtaaacgtcgaccttctgacatattacagtagcttttcctgctaagggcatcggctacaacatttgctttccccgggtgatagtggatttccatatcatagtctttaatcaattctaaccatcttcgctgacgcatgttcaagtcaggttgagtgaaaatgtacttcaaacttttatgatccgtatacatctctgtacggttaccgaaaagataatgacgccaaatcttcaatgcatgcaccacagctgccaactctaggtcatgcgtaggatagttattctcatgaggacgtaattgcctagatgcataggcaaccacctttccttcttgcatcaacacacaacccaaaccgagtcgggatgcatcacaatacacttggaaacctttcctcgaatcaggcaaaattaacacaggcgcagtcactagccttttcttcagttcttagaaactttgttcacaatcatccgtccacttgtacttcacttccttctgaagcagacgagtcattggtctggcgatctttgaaaagttctcaataaaactgcggtaatacccagcaagtccaaggaaactacgaaattctgaaaccgtcttgggttgcttccaacttaacactgactccacattgcttggatctactgccactcctccagacgagatgacatgacaaagaaacttcacttcggacaaccaaaattcacatttactgaacttggcataaagctgatgctcacgtagtttctctaaagctagacgaagatgctcttcatgttcttccttcgtcttggagtaaataagaatgtcatcaataaacaccacgacaaacttatccagatattccataaacaccttgttcatcagattcatgaaaaaggctggggcattagtgagtccaaatgacataacggtacattcgaacaaaccataccgagttgtgaaggcggtctttggtatatcttcctcacggattcgaagttgatgatatccagaacggagatctatcttggagaaaactgtagcacctttcaattgatcaaacaggtcatcaattctgggtagaggatccttattcttgatagtgacctcattcaacgctcgataatccacgcacattctctaagtatgatctttcttctccacaaagatgactggtgctccccatggcgaagtactgggtctaatgtatcctttctgaagcaaatcatccacctgtctcttcacgtcagctaactcattagctgccattctgtatggtctcttatggatagggtttgttccaggtaccaagtctatccgaaactctatgtctctcttaggtggcatacctggcaaatcctcgggaaacacgtctgggtagtcttgtactataggtatctcttgtagaacaacttggttcaaggtcacaccatgagatttaggagaggacgcaaagaaagaaacagtttccccattgctactggttaaagtcaccttacggttggcacaatctataactcctctgtgacgagataaccagtccatccctaggataacatctagatctttggattctagcaagataagcgaggatgggaaaggaacttcttctatttctatagtaacagaaggacaatactgtgtcgaaaatacttgattacctgggg

SEQ ID NO: 24683 - DNA, 2426 bp, Oryza sativa
gcaggacgagcaaccatgttgcggttgtcattgccacgattaccagtattgttgttgtagaactggcgttggggacggacaactgatgaagatcctacttgagggtacgatggagcttgaggtccagtaacgagtcgcggtctctggttactgccctgttgtgccttgaattgggcagccctgcgcttcttctgctccatccggttatacttgtcttcctgacgaatcgccttgtccaccaactgctggaaatcccggaaatccgtagacatcaaagcataagacaactcatcatttagtccctccaagaacttctcctgacgctcttcatcggtgcgaacatcttccggagcataacgagctaaacggttgaaatcatggaggtactcagtgaccgaacgagatctctggttgagtgctctaaattctctcttctttagagctacgacacccgctggtatgtgcgtcttcttgaaagcggccgtgaactcctgccacgtaataggctctccttcagccctgccttggcgaaaatgatcccaccattcagcagcaggtccatgcaactgatgcgaagcaaaagaaactttctcctgctcagtacactggatcaagtccaacttcttctccaccgcatgcagccaatctcctgcttctactggattggtggtgcttgaaaaggtagggggtctcacacgtaagaaatctgccaacttgttttggggaggtgggggtggattctgattctgattgtttgcctgctgattctgtgcctgctgcactaacagattgatcagttgtgtttgttgggccagaatctgagctagcgtgggatctcctccatcgttagtagctccacttccacttccacttccacttccggtgcgcgtgttcaccatctgacgataagcagaaacaacaggaaagaacgacagagagacacccttagaacgaagttatttaattaatttaaattctatattactcttaactgtgtatgattacatttaagttgcattaacactatctcaccaactatcttacactctgacaagcaaaagaactagactcatgctgttacatcccacccatgatgtaagcaacaactaaaacccacacactcacaagcaaacttaaacaagcaatctaacacaacgaactacggcaacgatctaactaagcgactactcccgccttgcgtcggaacgaagcgatggatcttcttcctctggagtagctggctctctttcttcagggtcttcctcctcttcctcatcacttatgatgtcgatgacaggttcagcacgatcgggcacagcttcacccatcacgcgaatcttcgaagctaactggagacgaggtggcggacaggttctctttcttagtgtgacgcgaagcttgggtgttggcggcggcgtttctcctttaagttcagctaattcgttctgtagacggtacaccttgctctccaacttgcaaatcttgcctcgattccagttttccctgtcatgagctgctttgtctcgctccacacttactgcatccatagcactaagcatatgcaccgcatgcatcagagtggcactctcttcaccatcaggacagatataggttccatagtcttgaccatgaggcttgtgaggatgatactggaaagctgatgaatccaactcttcttcaaaacgttgacgcaactctccaatggccaccaaagctacttcttgacaagcatggctgtacgatcttcctccagcttcaaacttaatggacagaaggtcttcacgatcactagccaacgtcacacgaacacgacacttctcttcgtcggggtcatgggaaatttggcgatactcgggagcaacttcatagcctacctcaaaagccatcaacctcagctccctgacgaatcctaacacctcgatcaaatttctcggtgaatgtggcggcatctaaggaaacatagaagagaggaattaatgcatatttttctaagttagctgcaccaacttgatttaactgatttttgaccaaaaaggaagaaaataaaattaaaatacttatgatttaatttgagcacggtacagtgtcaccacaagaaagatgagtagtactagtgctatcatgattgtatcgataccataatagatgtacagtgcggactaatcaataaaatttggtaaagagaaagaaagaaacattttgggaagaacaactttttgcttttaaaagaaaagaaattgaatttcaataaattttgtgcttaccttgcatgtgctgccaacttaattaatttataagagaatagagaagagcagttactattttttttcaaaatattttgaaggctacttaaggtttaccatttggcttatcctaaggtcaaggtggctctgataccaacttgtcacgcccggaatttctatcca

SEQ ID NO: 24684 - DNA, 1267 bp, Oryza sativa
ggatataataaaaacgtctcaaaactcatttctacacatgagatgttccaaaaacgtctcaatattcatctctaaacgatttaattttgtgctaacctgtaaagcgtcttaaactatatcctcaactaataaagcgtctcaaacatcgtccctattttaatttcacttataaaaaagagacgacttatagaatgacttaagtgaaacgtcttaaaacaatggttttgttgtagtgaacatcgagacgaacccgatggtactcaccacaacgtctatcgacgaacggtgatggccggcgacgaggaggaaggcggtggcggagctccggtggtcggcggcgaaggaggacgggcggccgagcttcctcacctccgtgcgcacctaacggcgacaacggcaagcggcggagacggcggacgcggcggcgcgacacggccgaaagatggccggcggcggcggcggctaaatgcacgtggcggcggtgctacggtgcacgggagaggacgagagagggggcaaatggaagaggacgacgaggggaagctttataaagcattggattgaagagatcgaactccaaacgagaggaatcgactcgggaaaaatccaaactcggttttagggataaaatcaaaacgaactcgattcggatgaaatcctcaacgattcgctccgattcttgggggaaaaggaagaggagaacgagaggaacaaaacccctcaaaaacccggaggaatcggagtcggattgaggcggatttgagaggagaaaggcggcggcaaagcggcggctcgggcggctcggccggaggtaggggatggatccgacaggtgggccccacctgtcggcctccacgatagaggggagcgggcggcggcggcagctgggccggcttgggccggttcggccgcgggagaggagggagatgttgggccgaattcggcccaacgaccaaggagggggatttttttgaactttttaaaataaaacaatttgtgaaatgttgtttcaattattaaaaatacttcccttactcaaataattcccagaaaattctagaaaatagaggagcaagcatagtatttaataaaattttatctagctcatttttatgttaaaaattttcctagaaaattagggtttagcttgtaggcttttaaaataatttctaagaaatgatttaaaatatgcatttttaatttagtcatttttagggcgtgacatgctgctaggggctcagttctgcctgcctgtcccgggggttcc

SEQ ID NO: 24685 - DNA, 23362 bp, Oryza sativa
gccgagccatgtacccaagttagtgttttaattcttaaaacctgcttatcaactaaaatgtggaatggttggcctaggttggcttgggacgagctgggacccagggtcgggttgccagttcggtctgaatcatcgtaggccttgggttaaggcaggttcgtgtgggttcacggccttgataaataatatggtatagttctagaatcgtgtttacaaaatagctttgagcaactaagtacctttaaatgctgtttactgcaaaccctaaccctttatagtatgactcctttgtactcccttgcatttattctgcacttgtgggtgtgtcttgttgagtacggtggttgtactcagtcttgctcaatttttcccaaccccagaagaggagccccttgaagatgaaggttttggtgtctagctcgtgcctgccgtcaagcgcctgtggtcgtcgccctagtcttccgttgtttctcgtttgtctctgtgtgtgctgggccttcgctgcccatgtaataagttagctatttacgcttccgcttgttaaactctgaattgtatcaacttttggtgtaccttgcctcctgggacaaggattaatgcacgcacgtaaggaacgcccgttgggttatttccggtcgtgacattagatctttattgattgagaggaactatctacctatgtaatgactttttattcgcttattaattagagtaataattgtactctattatcaatttgttattgtgtgcctcggctgattactggacgagggttcacacacatgtaagcgtttggaattttggatagaaatttcgggcgtgacatatatgcatatgaccgacgctaaggagttgtgggatgcactgaatactaaattcggtgctactgatgctagcaatgatctgtatatcatggagtagccccttgaagtgatgagaaaaagaaaactgcgtcttttccgatctacgtgtagtgctagatgctgggtgccatggatcgagtgatcaaatcagaatttatttacgttcagaactcagttgactgcttctatagataaggcggaatgtccttagttcagcattatagcacatagtctccaacgctacgccatatgtcgcttagacttgaccttttctcccgccccctaaaatcttcggctcctcgtttttattcaattatgaaattactcattttgatggagatttatagcatcattcaagtaaatacaaattgagatcgtagaaacatgagcttgcagtttcatgactacaagatggctgacaaccgttttgtagtcgaacaggctcatgagatacaaaccatagctaaggaactcgaactccttaagtgtgtcttacccgacaaatttgtggccgggtgcattattgcgaaactacctccatcatggagaagtttcggtactgcattcaaacacaagagacaggaatactccattgaggggttgatagcatctcttgatgttgaggagaaagctcgggaaaaagacgccgcgtctaaggatgatggtgggcagtccagtgccaatgttgtgcacaaggcctagaacaagagcaaggggaaatataaagctcaacagaccaccaacttcaagaggcagaagaagaacaacaacaatcctaaccaggatgagaggatttgctttgtgtgtgggcaacctggtcatctggctaggaagtatccacagcgcaaggggatgaaggcacctgcagggcagacttctaagtctgctaatgtgaccattggcaacactggagatggaagcgggtatggtaatttacctactgttttttcagttaatcagtctactaattggtgggttgatactggggccaatgtacttgtttgtgctgacatctcattgttttcttcttatcaggtcgcacggggttccaccttcctaatggcgaatgggtcacatgcttctgttcatggtgttggcacggtagatgtgaagtttacttcgggaaagatcgtgcagctgaggaacgtgcagcatgtcccttctatcaacaggaatcttgttagtggctcccgtctaactagagatggatttaagttggtttttgagtctaataaagtagtcgtgtctaaacatggatattttattagtaaaggttatgagtgcggaggcctgttccgcttttccctttctgatttctgcaataagtctgtgaacaatatttgtggaagtgtggatgatgaggctaatgtttggcactcacgtttatgtcatattaattttggctgatgtctcggctttccagcatgtgtttaatttctaagttttccattgtcaaaggttctaagtgccatagttgtgtgcaatcgaagcaacctcgcaagcctcacaaggctgccgaggagagaaacttggcaccactagaactcctacattcagatctttgtgaaatgaatgaggtgttgacgaagggtggaaaacaatatttcatgacgttaattgatgatgctactagattttgctatgtgtacttgttgaaaacgaaagacgaggctctagactattttaaaatttataaggcagaagttgaaaatcaacttgacagaaagataaaaaggcttaggtctgatcgtggtggagagtttttctcgaacgagtttgacttattctgtgacgaacatgacatcatacatgagaggactcctccctattctcccgagtctaatgggattgctgaaaggaagaaccgcacactgactgacttggtgaatgccatgttggacaccgcgggacaacctaaggcatggtggggggaggcattgttgaccacgaatcatgtgttaaacagagttcctaacagaaataagaacaaaacaccatatgagatatggattgggagaaaaccatcactttcttatttgcgcacatggggtgttgttggtcgctctgaagttaaggtgaattgtatgtttcaattgatctcccgaaggtgatgtcaagatgaaccccacacctgctccttggctattgagcgcgccatcgaacgccattgtccatgtttcattgtcggtttgactgtctaacctattattaggcatagtccaatcggctatgacatcggcgagaacctcggacttgatggctgttcgtggtacaaagtggacgtcaaactggcttagctcgactacccatttcgcaatgcggccgataacgtctttgtttctcatgacttcgccaagagggaaggcggagacaactgtgaccctgtgggcttggaagtggtggtgtagctttcttgacgtcatgattactgcgtagagcagtttttggatctgtgcgtaccttgtcttcgcgtcgtggagagctttgctgacgtaatagactggtctctgtacattttctctttcgacaacaatgacagtactcacagagtagggtgtggcggtaatatagaggaataactcttcattaggttggggagcaacaagtacagggggatttgataggtagcacttgagtgcgatgaacgcttcttaggcttcttgtgtccatacaaatttgtcctgctttttagcagtgcgaagaaatgctgtccttgttctcccatcctaacgacgaacctacttagtgccgccatgcatccggttagcttcagtacctccttgagtcttgtgggcgacttcatgttctcgattgccttgatcttctcggggttcgcttctattcctctgccagagacaaggaacccaagcagtttacccgacggtaccccgaacgtgcacttctcaggattgagcatgaggcgatattgtctgaggttgtcgaaggtttcccgtagatcgtcaatcaatgagtcgcatgtcttggttttgacaacaatgtcatcgacgtaggcctcaacattgttacccagttgatcgctaagtgccccttggaccgtacgctggaaaatatttcctgcggttatcagtccaaacggcatttttacgtagcagaatacaccgaacgatgtgatgaatgttgtcttttcctcgtcctcttttgccatgcttatttggtggtagccggagtaagcgtcaaggaagcttaacagctcacaaccagctgttgagtccactagttggtctattcgagggagagggaagtgatccttggggcacgccttgttgaggtcggtgaagtcgacgcacatcctccacttcccgttggccttccgcaccatgactgggttggctagccactctggatggagtacttctctgatgaaaccagctttgagaagtttatcgagctcttctcgtatggcctgtttctgatctggtgcaaatctccgcagcttttgctttactggcttggcaacgggtcgcaccatgagtttgtactcaatcacctccctagggacccctggcatgtcggacagttgccaagcgaatacgtccgcattatcgcggaggaaggtgatgagcgcgagttcctatttctcgttcagtgatgccccgatcttgactgtcttgtcggggttggcactggagagtggaacgattttaattgcgtcgtctggttttggcatcttagtcgttttgatcattttcttgggtggctcggctgtggcgggtgggctgggcgtgtgctcgaccatgtcgaggctctgcttgtcgcattggaccgccagctttgtgtttccttgaatagagattgttcccttcggctcgggcatcttgagtacctgatacgcgtagtgagatgcggccatgaacttcgcgagtgcagttcttccgatgatggcgttgtatgctgtatcaaactcagcaacatcgaatgttatcttctctgctcgaaagttgctcgcttggccgaaagacacaggaagcgtgatctagcccagtggcttggacgaagactaaggagtgattccatggaagggttgatcggtaggcgtcaactcgtttcgtggaatgcccattgcgtccaaggtgctggcaaagagaaggttgatggagctaccgccatcgacgaagactcgcgctaccttgatattccgaatagtgggttcaaccacgatcggatatcgtcctgggataatagcagttttggggtggttctcatctgagaactcgatgttctgttcagaccacttcatcttgggtgcaaccccctgccatgtcgaacaaacctcacgttccacttttttgtattctcgctttgaagagtacgctgtggaacctccgaagatgtgcgagacatgaagatcggaatctggatacgccgagtccgagtcctgagtggttgcctcagtggccttctcaactacacgtactcgcttgcccttctccaaagccagctgctttgccaacgactttttgaagatgaggcactcctccagagaatgtttgtccgacttgtgtatggggcaccatattctcttcgtatcactgccttgtgggtctgggtgtttgggcgggcgcttgtattcagacacgaggacttccgcttgagctttcctcttcccactcttgccgcttttcttcttgcttgattcgggtgtgtccttggctggcttcttctctcctcccgcctttgactcgtcgttcttgcgtctcactgcgtcgtctgcatgggcgcatcgatcgacaacctcaaacaaacttcgagtcgttgtgattcgccttgttgccaactcctgggtagtatagcgatctctgacaccggttttgaaagcacgaatcacagaagcatcggtgatatcggggatcgtatttctgcactcattaaagcgccgaacaacacgtgtaaatcgtcttcgatcgcgtggcgcttgtaagttccctggaagttagcgacgaattgctaccacaaatctgcccatgaagagatcgagtagggtgggaggtgcatcagccacgaacgcgcagaacctttcaacgccgttggcaaatagtttgctaacgcgttgtcgtctgccccagcagcgtatagtaccgtggagtagacctggaggaattcttcagggtcagtactcccatcgtacttctctattgctccgggtcggaatctctcgggccatcggacatcacgtagagaacggttgaaagctctacacccagtgcagggggcggtgggttgtcggcgattgtgtgtcctccgtggatgtctatcggatgacgaagatgaagatgatgacgatgatgacggtggttcactcggctccggtgtgcgattccgagggcgacgtttaggttctcgagaattctgtcgtcatccaccattgttgtcctagcgccgatccccattatcatcaccgtcatgttgacgccctcgaccagcatcgtctggtgtccgctgttcgcgatcgtcgcggtcgcggcagttgtgacgattatcgtggtcttggtcttcgttcgagcgacctcctcgctgtcacgcccagaagtttcccctttttcttgctttaaaaattggttaaataaattgcccgaagaaattatcttaattaacctagagctaactccataattaataaatgcaattaataatcggaaatagcgtggtggaatttttcttgagttccccatgctccaatgcattaacaagatttttagtggaattttcagagccttggaaataattttaaccaattaaaaatcaccaaagtgcaatatttaatcctaggaaaatccttctcctctttttcttatttcttttccttcctttttctctagatgggccatcggcccatctctctccccgcgctcggcacccctttcctgggccggcccgctcctcctttccactccccgaagtcctccctccctccctttctctttcgggcaccgacaggtggggcccacctgtcggtcgtcccctacctccggtcgttggagccggagctccaaccgcccgcgctgccgccttctccgctccacgtcgcgcctccactccgcgcccgcacctcgcgcccacgtcgccgccctctcccccgcatctcccgcgcgcgcgcgcgcccgcaagtggtgggggatttgaaatctcccaacaccctctctctctcctccacctctccacgtcgccggccaaataggggccatccccggccgtttccgcccctccctcgcccataaaaaccctcactcgagctctctctctcatttcccccattcaccgtcctctcccacgccctctaccgccgtcgcgccgcgctcgccgagctccgcccccgccgcccatctcctgccacgtgccgtcgccactagggccgccgctgtgccaagccgccgccgccgctagctccgccgccgtgtgggccatctcggccaccgcctcgcgtcgccggaaccccaccggaaccccatctccctcgcgagccggtgagctatccattcccctccgtctccggccagccactttggtcgtcgtggtcgccttatccatccctaactcctctcctcccctcctctaagtgtcgccgccgctcgtccgcccctcctcttgtcgggtcgtcgtcgccgcctttgtcttccgctccggccgccgtgtcgccggtgagtccttcctccccctcctttcctcaccttcccgcgagcgccggccacgccgctgctccggccatgcgccgccgcctttcggccgtcgcagccgcttcccgcaccgccggtcaccgccgtcggtggccgtgcctcgccgccgcctcgccttggtcggccggtcggccttgaggccaagctgagcctggccggcgcctccctcgcctcccctttgagccaccgcctggtggggcccacctgccaggcgccacctccctccctttggagccgctgacccgtggggcccacgtgccggtgccccccctttcgctgacgtcagccctgggctttattgcgcaataaaataattaaggctttttctttattagtaaaaacacagtttatcttctaaaattcttaagtaattcatccgagctccgtttaagtccattcaagtctcagtaaatcaagaaaaatgcaaagaatccactaaaaatggttttgtttcctgtttcagtagtcttatagcatgttttgcttgtgtgctttgtttgtcgcgtaggtttcggccgtttcgtcgatccgcggtttctcgaagacgttgctgaggtctcatcagttcgagagcaaggcaagtcatgcaatacgtttgatcatattgtacccaatttacaaatatcccgcatttctattaaatgttgcattcttttacaatgtaatgtgggatgggtcctattcctcagccacatattggttaccttatgccattgataacttgggtatcaaaatgactagatgttggcttaggaaatgcttagccatgcttagttcaactagtacacaaatggggatcacattattacatagactctgactattggtatagctttagattggcgccaccgcaagggtgtcagttaattaaaatattctgaatggcgggctgtgagtgcatggttttgctggtcgcacccatggcagttaaggaccggttcacgggaaaccctgggagacttaccgtgcttaccacaagcgggagtgggtaactgcttgatctgaagtatagctcgaccctttcctaggcaccggtggtgagggtgggcgtgatggagttgggtcggccgaggtgttcggttgtccagctgccggattcaccgcggcgcaagaggggaccgcccactgccttttgaggggtgggggtgaaaccttagcgtggtgtggatggttaggggagggttaggtggaggatcttgtcacgatttccccctttgcagtatcatggtgatacttcggggcatggcgacatgtgtggaatcgtgtcttgtgggtacagttgtacacctctggccagagtaaaactattcgaatagccgtgcccgcggttatgggcgatcaaccagattcaccgtgattagtctcacccctagtttagcgtaatgagctggtgtagttcaggtggttggttgggcctgttgcaacgtggtgtagcgttggacagtaattggttaatattgattaattactacagctattttactgctttcaactactgctttgaaatgcctgctttatgcaaaagaacccctagcttcctttggttatatcctgcatcatacctccttttccggtatgacttgctgagtacagtgggtagtactcagtcttgctctcttttcccccacaccagagttgaagttcttctcagatggagccgtctcagagaggttggtttcgtcgctgccgtcaaggtttgcttgtggagtggagtcgcccgctgctgaagtcaagcttcccggtttagctcgcttttatctttctcgctgcatttgtaatcttttatatttttgtaagacgtgggtctgtatgtcaacaaatgtcgtttgtgtaccctggctggtcctggacagggatttaatgcacattcagcttagaaattctggttcgagaatttctgggtgtgacactcgctcttcgttctcgcgacgttgtgaagaaacacgatgtcgggaatgattctcattgtctcgcgtgcgtcgtgcttctcggcggccattcagatggtcgcggagatcgccggtgctgcgaggtggatgggtagctcatctaggtgacgtccgctgctccggtggttcgccgttggcagcgccagctatcagtcgctcttgttgtgctctggtagcggcttcctcgaacgcgttactgagattggctaccgattcccatagtcgttctatccatcgtgcgagatcatcgttaagaacggggtcatagggagcttctctcagtactgcattgatggtgccgagatgttgggccggcgtgaccgtctggttctccgcccctgcgttagcgtgtgcagacgtgctagtcccaccgatggcaaacatgtcgcgtggtgtactggaagatgatgagccatagtcttcgagcaagtgtaggactgatggctcgtggggatcaatgtcgattactccaacaaatcgatccgaggtcaacgtcgctccttgttccttgtttgtgcccttacgagaggttcctacctgctggaccttaggaagcgtcgttttcatggcgtggagaaagaccttgtagcttgagaagtcgtgattcttcgtcttgtgaataggacaatagacatcatgagttggagaagtacgctggattccacgctctttgcaagcacgaattttagcttgtacgttgagaaaaacccagcaagcttgcaagttgtgcttcctggacttgtggataggataccaggacttttttacctcagaagttgtccttgtcggctcggagttcttgtcggaaggacaaggttcggccacactaggaaccttctcgggctcgtatgacgtcgatgttccattctctgctacggcgggaggatccttagacgcgggatcgtccggggttatagccacggcgttctcgtttccgataattgatggaccagccgagattggcaccgtggtgtaaaccgggaagatgatttcgccaacttgagtccacaccagcattgttcaagtagggactccatgaatggggccggtgctgacgccgttgtcgacgaagcttgatgtcatagtagtagaaccttgagcaccaaagctccctacgtggcgcgccactgtcgacgatgggtacccatagaccggatatagagggtattggggtacactggtacgatgatcaacgtagtacgacatgaaggaaacaagagacaaagattatactggttcaggcccctaaataggtaatagccctaatccagttgatataggattatatggagatgaccacaaattacaaagggaataatagaactggatgataccagcgagatcgtagtcgagttgattcgactagatcacccggcgacttggctcctgtaggctccggcttcgtaggctgtggtcgttgtgttgtgtcacgcccggaatttctatccaaaattccaaacgcttacatgtgtgtaaaccctcgtccaggaatcagccgaggcacacaataacaaattgataatagagtacagttattactctaattattaagcgtataaaatatcattacagaggtagatagttcctctcaatcaataaagatctaagcagcggaaaaagataaacggcgcggacgactccactccacaggcagcttgaccagggctacacctaatcctccacaccatcagcttcactgtagaactcttcctctgatgaatgattgcaaggtgagtatatgacatactcagcaagccacgcagcaaatatgcaagtgcacaggataacaaaggatggcataatagggtttcatttgcaaaagcagcatttagcaaacatttgagaatttaataaaacagttaagtaattaaacaatattaatccaacgctatacaacataccctgttgcataggcccaaccattctgaacaaccatcccggctgcacagttctatctccaaaccaggaatataccattccaaaccaggagctaatcaagttttaccagttatagcatcttctattatggtgagaagggtgagactaatcacgaaagacattgttagacccgcccataaccgcgggcacggctattcgaatagttttactctgatcagaggtgtaccactgtacccacaagacacaaccccacatcatgtcaccatgtgcctcaataccaccacggtacctcggaaaggagttgtgacaatacctcttatacaacacaatccattgcagcgcaccttcctggatcataatcacccccttataaacaaggcatggactccccagcgacccccgtgggcttatctccgccacttctcagtctggtgccccgcaatgaaccatgctatacaaaagataaagccgttgcccatgctggcttgtggttggcacggctaatgtttcacaaccgaaactcgtgaaccggtccttaattgtcatgagcacgaccatcaaaaccatgtgctcacaacccaccattaccaggttttagttggcacattaattaattaactaatcacgattgaccatcgtgaactatcattaagccatcattaaataatgagtcataagttatcccaatagtgagctaatgtttctaagcagggctaagcaattatatctaatatctagttgaaccaatacataaagctcaactagtcaagttataataacccaaggtatcaaggaataaggtaatcaagaacaaaagggctataacaaacaataggttaattccacccaatggcatttgaaaataaatgcaatagttgaatagaaacaatagctttaaataggatcaacatgctcaaagggttgtttgggatctgtgtgacttgccttgctggccttggaactcttcaaattcttctccggcgaaaacggattctccggaaacgacggaatctaagcagaaaagaacaaaatcaccaaaacagcacataaacaagcatgaacagtacatgtggatatttttaacatgtagatctcaattttagaaaaaattagagacttgaaccaactaaatcggagctaagatgaattagttatgaatttttaaagattaaatcggattaaaacacttatatcggttaaaattgaattatgacgcaataatgaattatttttgaaaaggaaaagaaggtttattgcgtcagcgggctagggtttgcggtggaccgggcgcacggcggcggttcacgcgaacggacggccgagatcgaaccgatctaagatggacggccgagatcgatcgggtccacggcggctcacagcggacgacctcgatgacgtcggcaatgacgtcaccgacggcggcggcggctcggcggagcagacggcgcgaggacgcaaacggaaggcaccagcacgtagaggacgacgcggcgaactcaccggtgaccacaacggcggcggaaggtcaacagacggcgacggcgacgaggaggaagtggtgaagctcttcgggtcgacgacggcgatgatgctctggcgatcttcggcggcggcgaaggggcggatgaggacggcgacgcgacggcgaccacgatgacgtccttcccgagcgacggcgacgtctggaacggcggcggagcatggctggagcggcggcgacgacggcggcgctagggcacacggtgctagagctcttccggcgacgagaggcgaaggcgagggtggcgacgggtagaggagaccacggggagccttttaaagggactcggaggcggcggcgaaggcccacggcgacggcaacggcgaaggaaagctcggcttggagagagagagcccgatccgattcgaactcgaatccctcgatttccaaaccgatttagccgatgattccaaaggagaaaaggtagaggagatcccgaggatcatttcccctctattgattcggccggagaagaaaaggaacggccgaatttggaaaggaacggcggtggcggctcggcggcggcgtgctagggtttcggcccgaggaagacgacgggcctgacaggtggaccccacctgtcagcggcagcgaggacgcgcgcgcgcgggcggctgcggactaggccggctgggccgaggagagagagaaagcggttttgggccgactttcggcccaaagccaaaagaggactttttaaaacctttttcaatttaaattatttcttaaatgcaattccatttattaaaaatacttccttagctcaaataaatcccagaaaaatctaggaattatagaattaagcaaagtatttaatgaaattttatctggccccattttatattggaatttattaattaaaattagatcttcttttcaagacttttaaaattattttctagaaattccatttaaacaacaatttatataatttgaatttttagggtgtgacaaacctaccccccttaaacagaatctcgtcctcgagattcggaagaactggcgaacagatacggatgggctgacttcaattcatcttctcgttcccaagttgactcttcttccgagtgattactccattggactttgcaaaaacggataactcgattcctggtccttctctcatttgtttccaagatacggattggtttctcaacataggtcagatcctctggacttctatctgttcaagatagcttcttcggtaggtacccttaaacacttcttcaattgcgacacatggaaaacatcatggactcctgccaaagattgaggtaactctaactgataagcaacctctcctcttctactgacaatcttataaggtcccacaaaacgcggtgccaattttcctttggtatgaaaacgatgaactcctcgaagaggtgtgacacgaatatacacataatctccctcttcaaaactcaaatctctgcggcgattgtcggcataactcttatgacgagactaagccacacgcaatctttcttgaatgattttcaccttttcttctgcttcccttaggatatccgtcccgaaaacctgacgctctcccgtttgatcccacaaaagcggagtgcgacacttccgaccatacagtgcttcgtaaggagccatctgaagactagcttgataactgttattatacgaaaattctgcataaggtagattcttatcccaacttccaccgaaatctaaagcacaagctctcaacatgtcttccaaaatctgattcaccctttcagtttgtctatcagtttgcggatggtaagcagtactaaagttcagcttagaacccatctcttcctgaagtttcttccaaaaatttgaagtaaactgactgcctcgatcagacactattttcttagggacgccatgcaaacacacaatccttgccatatacaattccgctaaccgacttccagaataggttgtctttaccgggatgaaatgagccactttggtaagtctgtcgactatcacccaaatagagtcatggcctgatgacgttctgggtagaccagtgataaaatccataccgatttcttcccatttccattcaggaattttcaaaggctgcagcaaaccggcgggtttctgatgttctgccttgactcgctgacaaacatcacatactgctacgtattctgcgatttcacgcttcatacttgcccaccaaaacctttccttgagatcctggtacatcttagtactaccagggtgtatggagtataaagtatcatgagcttcttttagaattgcatcttttaaatctttgttgtcggggacacagattctctcacccaaccatacagttccatgctcatcctccaagaaaccgatagcttttcctcttctcatattcttcttgatctcttgaatatcaggatcattaatttgggcttctctaacttgatcaatgtcacgccctaaaaatcgactaaattaaaaatgcagattttaaatcatttttagaaattattttaaaagcctaccagctaaaccctaattttctaggaaaattttcaacataaaaatgagctagataaaattttattaaatactatgcttgctcctctattttagagaatttttctgggaattatttgagcaagggaagtatttttaatatttgaaacaacatttcacaaattgttttattcaaaaaagttcaaaaatccccctccctaagccgttgggccgttttcggcccgactctctctttctctctctccccgcgcgcggcccatgccggcccaagccgccgccgcccgcgcccctctctctcgggacactgacatgtggggcccacatgtcaggcccttcttcaacctccggccgccgccgagaccgagcccgagccgccatcttccacctccgattccgcccaaatccgagcccgattcctccgggtttttgaggggttttgttcctctcgatctcctctttctttatacccccaagaatcaagcgaatcgttgagttttctctccgaatcgaattcgttttgattttatccctaaaaccgagtttgaattcttcccgaatacgattcctctcgtttggagctcgatctcttcaatccaatgccatatatagcttcctctcgttgtcctcttccgtttgccccctctcccgagctctcccgtgcctcctagcgccgccgcgacgtgttccaagttcgccgccgccgccggccgtcttcggcgtcgtcgccgcgccgtctccgccgtcgccgtcgcttgccgtcatcgccaagaggtgcgccgtggtgagaggaagctcggccgcccctcctttttcgccgccgatcaccggagccctctcgtcgccgtcgacccgagccgccgccgccttccttctcgtcgccggccgccatcgtgcatcggttgacgacgtggtgagtaccaacgggttcgcctcgttgtcctctacgcgtaggtgtcctccaatcgtccggtcgaccgctctagcgccggcgagctcgcggacccgagccggccgccgttgctgacgtcatgccgacgtcatctccagggctgacgtcatctcctctagggctgacgtcatcgtttccttttctttttctttttcccgattttctaatagattaaaacttcggaaaatcataactaaataaccgtagatccgttttaggtggttcaagtttctaaattcttctaaaatcaagatctacatgttaaaaatatccacatgtactgtttatgcttgtttttgtactgttttgttgattttgtttatttgctttagtttccgacgttccggaggagagcgtttccgttgaggaaggttccgaagcgtttgtggaagcccaaggcaagtcacacagatcccaaacaaccctttgagcatgttgatcccgtttaaagctattattttatttcaactgtgcattgttttcgaatgtcatcgggtggtgaacctttcccagttaattaatggccgaagatgactttattttcctatgggttataatttgattagcatgaaccttatatattggattggttcagctaaatgctatatttaggtttgcttagccctgcatagaaacgttagctaactaaaaggggttaaatataaattatattacataattattattgttaataatggttatatttaatggtagctcacgatggtcaatcgtgtgatgttaattaattgataactaaaacctggataaggtgggttgtgagcatatggttttgatggttgtgctaatgacaattaaggaccggttcgcgagctactgttgtgaaacatttatcgtgccaaccacaagccagcgtgggcaatggctttatcttttgtgtagcatgattcattatagtgcgccagactgagaagtggcgagatgtccatgggggtcgctggggagtccatgctttgttttaaaagggggtgattatgatccaggaaaggtgcgctgtaatgggttatgttgtacaaggggtattgtcacaactcctttccgagataccgtggtggtattgaggcacatggtgacatgatgtggggttgtgtcttgtgggtacagtggtacacctctgatcagagtttaatctattcgaatagccgtacccgcggttatgggtgagttgagcaatgtttttcatgattagtctcacactacttattaatggtattaatgttggaatggttaattcctggtttggaggtttaatttgttcaactggggttggttgttcaaatgtggttgggcctgtgcaacacgggtgtgttgtatggtgtttatttaatattgattaattatacaactgttttactattctcttaaatatttattaaatgttgtttctgcaaatgagctatgttatgccatcctttgttatcctgtgcacttgcatatttgctgtgtggcttgttgagtatgttatatgctcattcttgcaatattcattcatcagaagaggagtatctcagtgaaggtgatgatctggaggaataggcttattctggttaagttgcctgtggagtggagtcgccttagctgttccgtagtttgttatagttttgttttccgctgcgtagtatgttattttctttgagaggaactatctacctctgtaataattttaatttgcgagtattcaatagttaattatttgtactctattatcaatattgtcattgtgtgcctcggttgattcctggacgagggtttaacacacatgtaagcgtttggaattttggatagaaattccgggcgtgacaatcaattagagtgggcttcgcttctaaggctgcaacgaaacctctactgacaattcccaaatttaatctttcaaattccttgcataattccaatggcaactatcgtccttctgtagcattgcaatagcctttcctgctaagagcatctgctacaacattagcctttcccgggtgataatgaattcccatgtcataatccttaattaattccaaccatctcctttgtctcatgttcagatccggctgagtaaagatatactttaaactcttgtgatcggtatatacctctggacgagtaccgaaaagataatgacgccaaatcttcaacgcatgaactactgcagctaactcaagatcatgagtaggatagttcttctcatgcagacgtaactgacgagatgcataggtaaccaccttcccatcttgcatcagaacacaacctaacccaagtttggatgcatcacaatacacttggaaacccttctttggatcaggcaaaatcaaaataggagctgatatcaagcgattcttcaactcttgaaaactctgctcacattcttccgaccacttgtacttcacatctttctgaagcagtcgtgtcatgggcttagcaatcttggaaaaattctctataaacctccggtaatatcctgcgaggcctaggaaactgcgaatctctgaaactgtctttggttgtttccagttggttacggattccacattactagaatcgacggcaactcctccggctgagatgacgtgaccaaggaacttcacttcaaacaaccaaaattcacacttgctaaacttagcatacagttgatgttctcgtagcttctctaatgcaaggcgaagatgttcttcatgctcttctttggttcgggagtagataagaatgtcatcaataaagaccaccacgaacttgtctaggtactccataaacaccttattcatcaagttcatgaagaaagcaggggcattggtaagtccaaaagacataacagtacattcgaacaatccatacttagtggtaaaagctgtcttaggtatatcttcctctttgattctcaactgatgataccctgatcgaagatctatcttggagaaaatggtggcacctttaagctgatcaaacaaatcatcaattctgggtagtggatacttattcttgatagtcacatcatttagtgcacgatagtccacacacatcctctgggtatgatctttcttttccacaaaaataaccggagctccccatggagatgaactcggtctgatgtatcctttctgaagcaaatcatctacttgcctcttaacttctgccaactcattggctgccattctataaggtctcttatggatcggagttgttccaggtaccaaatctattctgaactctatatcccttttaggcggcataccaggtaaatcgtctgggaacacatcaggatactcccgaactataggaatctcttccaaagttatctggttcagtcttgaccttaaagactcagaagacaatgcatgaacagttacaactcgaccatcattactggtgagagttacttttctgttagcacagtctatcacacctttatgtctggctaaccagtccatccctaggatgacatctaggtctttggattctaacaggataagattggccagaaatggtactcctttaatttctattctgaccgaggggctacgttgcaaagaaagtgcttgattacttggggtactaaccatcaaaggacgtctaagatcctctacttccatcccatgatttcccgcaaaactcatagataagaatgaatgtgtagcaccagaatcgaaaagtactgttgcaggaactgagttaacagggaacgtacccaaaatcacatctagagcatcttgagcttctgcagcagcaacatgattgacacgggcctttgatactggtgcggtagagttgctctgggcagggacaaccttcacgcgtcggggcttcggacacttgtcagcataatgtcctgggtctccacagttgaaacacaccacaagcttgctgccttgctccctcttggcaggttgttgctgtgtcgaggctgcaataaggcgtggagcttgattgcggttgttgttgccagcattgttgttgaagaactgacgctgcggacgaacaacagacgaagaacctccatgtggcatagactggtgtcctaaaataagacgcggcttctgattattcccctgttgtatcttgaattgagcaatccggcgtttcttctgctccatgcgattatacttgtcctcctgacgaatagccttatccactaatttctggaaatcagaataatctccagtcatgagtgggtaagaaagctcatcattaagtccttccaagaacttctcctgacgctcttcatcattgcgcacatcttctggagcataacgagccagacgattgaactcgtgcagatactccgtaacagagcgagatccctgggtgagcgacctgaactccttcttcttgagagacaccactcccgatggtatatgcgtcttccgaaaagcagcggtgaattcaagccaagtgataggttcagcagtagtcctattcagacggaagtgatcccaccattcagaggcagggccatgcaactgatgtgatgcaaatgagaccttctcctgatcagtgcactgaagcaaatccaacttcttctctaaggcatgcaaccaatcactagcttcaacaggattagtggtactagagaaaataggcggcctcacacgaagaaattctgctaacttattctgaggaggtgcatggttatttccctggttctgctggttctgaagttgttgcatcatcatgtgcattagctgagtctgttgagcaagaacttgagcaagggttggattctccccattgttattgttattggggttgttggggttgggaccattcccgttgctgcgagtgttcaccatctggcatggacagggcacaagaagagaaaccgggggaaaactacttaggacagggaattactttaacttttattgatcttaactgagtttcattattacaaactgaagactctcacaccactaaactcaccaacttcctaacactcaaaaaaaacaaacaaacgcatgcacttacatcctaccactgatgtaaatcacatgcaagacccacacacaagcaaacttaaaacaagcaaactaacacaacaatctaagacaacgacttaacaagtcactctagttcttccgagcatcggaggtcgattgaaggctcgttcggctcgtcttcatcatcttgggtagctacccactcaatcttggatgagtgtgcttgggttcttcttcttcttcatcacttacgttgacgaccggaggatctgctggggcaacttctttctccaccacacggacctttggcgccaattgatagcgagggacaaatagagctctcttccttgcggtaagacgaatcctgaccttctgaggtggtgcttctcccttcaacgcggctagttccttctccaaacgatccaccttgtcttctagcttgcaaatcttaccacgattccaatcttcacgatcttgggccgctaacacagtttccgcacgactttcatccatagcccatagcatctcaaccaaatgtgttgtggtagcatcattctcaattccttcagtctcaaggtaactgccacggtcacttccctgtggttgacgaggatggtaacgatactcagtgtcagccaactgatcactgtaacgatcacggagctctcctatggcgatccttgccacttcctgacatgaatggatgtagtttcttcctccagcttcgaacatcaccgatgggatatcttcactattactgttcaaggtgactttgactcggcacttctcttcatgacgatcatgaggaatctgggcataaaaaggggcagtcccaaatccaacgacaaaggacattgtacgcaactcctggacaaaaccctcaacaccaaacaagtactcaggcttgtagcgcggcatctaaagacaagtgaaaggagggagttaagacatctatccaattaatagcacaagtttttggattaattttagaaattcaaagtaaaaggtaaataaataaagtaaaccaagtttgcaagataagttggaaaagtcagaaacaatattacaagttttatacttttgaataacaggttccaaaagaaataaaagaaagttataaaatcaacttgctaaatttattttattgcagcaagattaaatgaaacaacattgtaaaacttttgctggaaaatgagccattagtatagtaatagatgtacagtactaataacactggaataaattttaaatgagaaccattaaaagagattatgaaatgcatgtgccattagtttggtttaattaaaagagaaagggaggagaacagttctacttttccaatatttttagagggcttctatgggtaaccatttggcataacctagggtcaagggggctctgataccaacttgtcatgcccggaatttctatccaaaattccaaacgcttacatgtgtgtaaaccctcgtccaggaatcagccgaggcacacaataacaaattgataatagagtatagttattactctaattattaagcgtataaaatatcattacagaggtagatagttcctctcaatcaataaagatctaagcagcggaaaaagataaacagcgcagacggctccacttcacaggcagcttgaccagggctacacctaatcctccacaccatcagcttcactgtagaactcttcctctgatgaatgattgcaaggtgagtatatgacatactcagcaagccacgcagcaaatatgcaagtgcacaggataacaaaggatggcataatagggtttcatttgcaaaagcagcatttagcaaacatttgagaatttaataaaacagttaagtaattaaacaatattaatccaacgctatacaacataccctgttgcataggcccaaccattctgaacaaccatcccggctgcacagttctatctccaaaccaggaatataccattccaaactaggagctaatcaagttttaccagttatagcatcttctattatggtgagaagggtgagactaatcacg

SEQ ID NO: 24686 - DNA, 1353 bp, Oryza sativa
acgacgggcctgacaggtggaccccacctgtcagcggcagcgagggcgcgcgcgcgggcggctgcgaactgggccggctgggccgaggagagagagaaagcggttttgggccgactttcggcccaaagccaaaagaggactttttaaaacctttttcaatttaaattatttcttaaatgcaattccatttattaaaaatacttccttagctcaaataaatcccagaaaaatctaggaattatagaattaagcaaagtatttaatgaaattttatctggccccattttatattggaatttattaattaaaattagatcttcttttcaagacttttaaaattattttctagaaattccatttaaacaacaatttatataatttgaatttttagggtgtgacatgttggctatgagattcgatgccctaggtcttcccggagggtcccttttatatcgcaggtcaggaggtctccaagtaggactcggagacatcggaccctacacgatatagtggcgacccagtcctatatgggtaggaacctttccattggtggacttcgaaatgaatttccttaacgtattcagagaacgtccgtacacgcgccgatataccgtattgccgtatagcgtacatccaagggtagagggtataccttatccataaccctgacagtcttcgaggagtctagggtgttcagctaaggagtagtccattttcgctttgcaatacgactttaatgataggaaagaaggtggaaaggtggagtcgagagaaggttgagttaaggtggagtctcttaatgacggtgagtttggtgtaggctcatcgggtggcttacagtgaagattcaaatgaagacaattcaagtttggaggaccgatggatcggtatggtaattctactgcttctaggtatcatatattcgaagctggactttgttagaatatttgtcgaagatactagttctactaggagttggacttggagttggaatatgtcgcagggagtggagttagatttggactatataacccgacaatcctttaaataaagaagggcaccataatgtaaccatgtagtgtacatacgcaaggagaggatatactacaacagaaccattgtttaatgttgaaatagggacgatgtttgagacgctttatttgttgaggacatagtttaagacgctttacaggttagcacaaaattaaatcgtttagagatgaatattgagacgttttggaacgtctcatctgtacagatgagttttgagacgttcttattatatgcgtgtcatcgttattagacaatatataaatatttatatagagaaagacgaaaacaaacacactgatc

SEQ ID NO: 24687 - DNA, 3467 bp, Oryza sativa
tttggacaaaaaaacttgaatatttaatatccagtctcagattaaaaagaagagtatctgctacaggacgcatgtttgaagagttgcaatataaaaaaaaaagtgtatttaccttcaagattgttcacgtcaatgacttggttagtgcctgaactttgcaacccgtaggtgctgtgtgcgagcccggatgaaagcgttaaatattcaatatcaaatatattaagacgtatgtgcctatattaatgcttgtataaaagcgtttctatattttatagatatgcaatttacacgtctctagcaacgtcttatataatgtaggtacgctttaaaaagcgtctccataattttgagacggtgcaaacattgacattcctactatgctttataaaagcgcctcagttatctgtgggagacgaaataaaacgtcacgtctctatcctacaaataaaatgtctccgttgggttgttttgttgtagcgaggctatggacacttggtggctaggtgctatattaactagataaaacctcgcgcatttgctgcgggaattcggtatgataactttaaaaaaataacatgtagatagatagataacatcagattaagtaaattaatgtggtttatgataatttaaatttaattagtatatagattggtgattcaaacgtaaaaagtaagttggtatgactttatggaagaagaaaagtagggagataatttggaccgtataatcatctaaaggctaaaaacaattgatgtgatatgacttaattagaggaaaaaaggaaaaagataatttggaccatagattaatcatttaatcactaagtgaggatgaactatataagtatataggatatcataaaacataaaaagatatacattgaaacattatgtgaatgatgttggatgataatttaacatgtttgtagttgaaaagctgttaaattataaaaactataaagatatagcatgtttgcatgatgtttaaatgtgatgattgttaatggatgatgatgtagcatcttgttaattagtgaatgataatgtggtatcttgttagtagatgatgatatggcatctttgcatgttaagcttaaggagttagtgggagataactttatagtaagataggattgggaggagcgctcatgatcagagctatggagatatatacttcggctgcactttattaacgaatatttcgtgttcctatatcatcatctggtgtatcttgggtgatcattgactgaaatgatagggaagacacaagtcgtcgttccgctatatcggcaaacttgtacaacgtacggactcaggaaaacggaccatgtgaaaccctagttttacattccacttgttcaacgcatgaggatgaagagggaggtaccaccgtagggattcccttgcctggcagtagaggattgaaggatgttgaatctaccttaatgaatggctctaattacaggtaccaccgtaccaggaggtagcaaaggttctcatgactcatggacggttaaaaagctagctcttgcccgttatatggtcgtgtgggaacaatggatttctaatgttagccttgagaacccaacgatttaattattacaaagcaaaaaatatatcggcaaacttgtacagtgtacggactcaggaaaacggaccatgtgaaaccctagttttacattccacttgttcaacgcatgaggacgaagagggaggtaccaccgtagggattcccttgcctagcagtagaggattgacggatgttgaatctaccttaatgaaaggctctaattacaggtaccaccgtaccaggaggtagcaaaggttctcatgactcatggacggttaaaaagctatctcttgcctgttatatggtcgtgtgggaacaatggatttgtaatgttagccttgaaaacctaacgatttaattattacaaagcaaaaatagtttgtgaaacctggtggtacgaatatattgtatgtgtagcttgtctagctccatatattaacaagtgaaaagtgaaatcattgttagattaatgggctaggcccaattaaatcctaataaattccattggcccacattaagttctatgggtaataataccaccttagaaatctaagtgaagaggtctcaacttaaatacggagctagtggagagtctttgttgaccggttgagatggtgcgcggacaaccaggcggggcgaggcgaggcagacagctactgcgctctctcgttttgtaacggacggtaataaacaacggagaattgatttcgtatcaatgaacgcgtcggttacggaattaaacgtcgtgaattgattccgtcggttacggaattaaatgccgtgaattgattccgtattaacgagcgcgtcggttacaaaattaaacaccgcggttgatgactccgaacattaccctcgcgctcgcatatagatactccgcagcaaccagaaggacagagaagttcttcacgactcttgcacttcgagttcctcctccttttttcctgagctgcctacgcgcacaggtgtacaggatgagcaggtgcctccggaactccatccgcttgagaacttgcacgggtaggcgggcgatcaagtttttgggtatcgcttcaaacgcgactgctcttgttcttcgcggctactgctgctgcatcggtgccttcaccaagatgtcaacggagattggagacaagaagatgaacgacatcaacggaggcaatactgcctcaaaatccagcggtgggacgttctcggggtatactttcattctcccgattctattagatgtttctttgttaatactcttcgcaatggcagcattgcgttactttgtaaatgttgatgcttatttcatattaaacatactcaagttgtatatatctagcactgtcactacatctactcatattgcaaatgtcatgtttattgtcttaatattttggattaaaatataccgaattatgaccaaatttccaataatccaaaaacttgaccggtctttttcgatagttgactttgctgcatcactcaaaccagatgctttcgatggttcaaattataaaagatggaaagcacatacacttttgtggttgacggcgatgcattgcttctttgtctcactgggcaaaccgagtgaagcgcctctctctcctgaggaggaggctaagttcgaggcttcggattgcctgttccgtggagcattgtttagtgtactcgctgacaaaatagtggacgtgtacatgcacatgccttcagggaaggacatgtgggattctcttgaggccaagttcggggtttccgacgccaacagcgagcggtatgtcatggagcagttctatgactacaacatggtcgatgaccgttctgtagtggaacaggctcatgaaattcagatgctggcaaaggaacttgggaacaacaactacgagttgccggacaagttttactgatct

SEQ ID NO: 24688 - DNA, 6050 bp, Oryza sativa
cctctggcgagagtaaaactattcgaatagccgtgcccgcggttatgggtgatcaaccagatttaccgtgattagtctcacccctagtttagcgtaatgaactggtgtagttcaggtggttggttgggcttgttgcaacgtggtgtagcgttggacagtgattggttaaaattgattaattactacagctgttttactgctttcaactactggtttgaaatgcctgctttttgcaaaagaacacctagcttcctttggttatatcctgcatcatacctccttttccggtatgacttgctgagtacagtgggtagtactcagtcttgctctcttttcccccacaccagagttgaagttcttctcagatggagccgcctcagagaggttggtttcgtcgctgccgtcaaggtttgcctgtggagtggggtcgcccgctgctgaagtcaagcttcccggtttagctcgcttttatctttctcgctgcatttgtaatcttttatatttttgtaagacgtgggtctgtatgtcaacaaatgtcgtttgtgtaccctggctggtcctggacagggatttaatgcacaatcagcttagaaattctggttcgagaatttctgggtgtgacaagttggtatcagagccgaccttgaccgtaggacaagccaactggaaacctaagagccctctgaacccttttttttcatatgcatatgctcttttgcacttggatttgtttcaggaaaatttggggttttgcctctttggtttgtgggaaaaatcttggtcgttcattcggatcggatttttaaaattagctcagtgtagggttttagaaaaaaaaatctatttgggggttttaaaattagctcagtttaggtttgttgcttgtgggttagtcggcggtcgatatcatgtgtcagtggtatgactgcctcaattaggagttgcgtgcctctttttcagtgttttaatcaagattaagataattacacttaaattcataagcaagattagtttctaagccccctgtttttcttccttttctcatatttctccctatccccttcagatggagacaaggaatggttaacgggactccaacaatgccagtggcagcgaagagccgatcaatggagcacgtgccaacagtgcatctgacaacagtccgtccccatcgcctgagaacccaacaattgctcaggtgttgaacaatcagactcagataatgacaatgatgatgcaacagatgcagcaacagtaccatcaggtgttgcagcaggtgcagcagcaagcacagcagcagcagcagaacctgcagtttggtcctccacctcctcagtccaaactgttagaatttcttcgtgtcaagccgcccaccttctcaagcaccaccaacccaatcgaggcccacgactggcttcatgccattgagaagaagctgaatcttttgcaatgcaacgagcaagagaaggttgcttttgctacataccagctgcaaggccccgcttctgtttggtgggacaactacatggtgacccgtccagctggggcagaggttacttggacagagttttgtcatagtttcaataaagcccaggttcccgagggagttgtggcgcaaaagaagagagagttccattccctgcaacaaggaaccagaacagttatagagtatttgcatgagttcaaccgcctcgcgcgctacgcccctgaggacgtgcgtaccgatgccgagaagcaggagaagtttatgtctggtcttgatgatgaattgaccaaccagttgatctctagagactatgaggactttgagaagcttgtggacaaggctattcgtcaagaggagcagtctaacaaaatgaaccgtaagaggaaggcagcctagttcaggactccccaggggaagtgttagaagcctcgtttcacaatgggatatcagggtggaccttccaccatgattatccgacagcaccgtccctaccacccgggtagcttcaacaagaaccaccatagtggcagtcacaacaacagtgagtagcacagcctcaaccctactccgagttcactaaagattccagcccaatcagttcagccacctttgccagaacagcccaagaggttgggagaaaaacccgaactctgcttcaattgtaacaaacccggacacacggttggaaagtgcccgaagccaagacgtgctggacccaagttcgttcaggcccgtgttaatcatgcatctgcagaggaggtgcagtcagcaccagaggttatattgggcacattccccgtcaactcgacaccggcagtaatattgtttgattctggtgcaacccattccttcatttccaagcgttttgctggtgcacatgggttatctttagtgaagcttaagataccaatgcgagttcatactcctggaggtggcatgaccacaactcactactgcccatctgtgacagttgaaattcaagggttgatttttccagcccacctcattcttctcgaatccaaggacctagatgtcatacttggaatggattggttgacaaggcacagaggagtgattgattgcgccagccgcaccatcaagttgaccaatgcaaaaggagaggtggtaaccttccagtctctagtgccgcagaagccagggatcagtttaaaccaggctgctggtgaagaacaagaggtagcagtggagaaaaccactaagaagctagaggatattcccatagtcagagagtatccagaggtttttccggacgatctgacaacaatgccaccaaagagggatatcgagttccggattgacttggtacctggaactgcaccgatccacaagaggccttacagaatgggagccaacgagttggcggaagtcaagaagcaagtcgatgaacagttacagaagggatacatccgcccgagcacgtcgccttggggtgctccggttatctttgtggagaagaaagacaaaaccaagaggatgtgcgttgactaccgcgcactcaataaggtcaccatcaagaacaagtatcctttgccaaggattgatgatctgtttgatcagttgaaaggagctactgtgttctctaagatagacctgcgatcaggctatcaccagttgaggatccgcgaagaggatattccaaagacagcattcatcactcggtacgggttgttcgaatgcacagttatgtctttcggactcactaatacacctgccttcttcatgaatttgatgaacaaggtgtttatggaatttctagacaagtttgtcgtggttttcatcgatgacatacttatctactccaagtccgaggaagaacatgagcagcatcttcggctggtacttgaaaagttaaaagagcaccagctatatgccaagttcagcaagtgcgacttctggcttaaggaagttcagtttctcggtcacatcgtgaatgctcaaggagtagctgtggatccagcaaatgtggagtcagttaccaaatggaccccaccaaggacagtcactcaggttcggagtttcttaggacttgcgggctattaccgccggttcattgagaacttctctaaaattgctaagccaatgacacagctattgaagaaggaagaaaagtttatctggtctgctgaatgcaataggagttttgaagaactcaaacgacggttggtgtctgcaccagtcttaatccagcctgatcagacgaaagatttccaggtctattgtgatgcatctcgccaggggctaggatgtgtgttgatgcaggatggcaaagtggtttcttatgcttcacggcagttgcgtcctcatgaaggcaactacccgacgcatgatctggaattggccgcagttgttcatgctttaaagatttggcggcactagcaactacccgacgcatgatctagaattggccgcagttgttcatgctttaaagatttggcggcactatctcatcggtaaccgttgtgaggtatatacagatcacaaaagtctaaagtacatcttcactcaacctgatttgaatctcagacagcgaagatggttggagctgatcaaggattatgatatgggaatacattatcatcccggcaaggctaatgtggttgcagatgccttgagcaggaagagctactgcaatgttgcatgggtagagcaactatgttgtgaggttcaacgcgatttggaacatctgaaccttggtatagttgagcacggattcgtggttgccctagaggcacagcccacactggtggagcaggttcgcatagctcaagcaagtgatcctgaaatagcagagctcaaaaagaacatgagagttggaaaagcccgaggttctgttgaggatgaacaaggaacaatctggatgggagaaagattgtgtgtacccgaaaacaaggaattaaaagacctgatactaaccgaggctcatcaaactcaatatttcattcatcccggtagtacaaagatgtaccaagacctcaaagagaagttttggtgggtcagcatgagaagggaaatagctgaattcgtagcactctatgacgtctgtcaacgagtaaaggcagaacaccaaaggccagcaggtttgctacagccacttcagattccagaatggaagtgggaagaaatcggaatggatttcatcaccggtttgcccagaacgtcatcggggcatgattctgtttgggtagtcgttgaccgactcaccaaagtggctcacttcattccggtgcacactacctactcagggaagaaattagcagaactctatctggcaagaattatgtgtttacatggtgtacctaagaagatcgtgtctgatcgaggaaaccaatttacttcaaagttctggcagaaattacaagaagaattgggaacccggttgaatttcggcactgcttaccatccacaaacggatggccagaccgagcgagtcaatcaaatactagaggatatgttgagagcctgtgcgcttgactttggtggagcatgggacaaaagcttgccgtatgctgagttctcttacgacaacagttaccaagctagtctacagatggcaccgtttgaagcactgtatggacgaaggtgtcgtactccgctcttctgggatcagacaggggaacgccagttgtttggtacagaagttttaaatgaggcagaagagaacgtcagagctattagggaaagattgagaatcgcgcaatctcggcagaaaagctatgcagacaaccgccgaagggagctcgctttcgaaacaggggattatgtgtatctccgtatcactccgctcaggggagtacatcgcttccagaccaaaggaaagttggcaccacgctttatgggaccatacaggatcttggaacgtagaggtgaagttgcttaccagcttgagcttccctccaacatgcttggcatccacaacgtgttccacgtctctcagttgaagaaatgtttgagagttcctgaggaacaggcaagtccggatcacaccgaaattcaggaagatctgacatatgtggagaagccgactcgtatcctcgaaaccagcgagagaaggaccagaaacaaagtaataagattctgcaaggttcagtggagccaccactcagaggaagaagccacttgggaaagagaagatgagttgaaggccgcccacccgcacctcttcgccagctcttccgaatctcggggtcgagattccgtttaaggggggtaggtttgtcacgcccagaagtttccccctttttcttgctttaaaaattggttaaataaattgcctgaagaaattatcttaattaacctagagctaactccataattaataaatgcaattaataatcggaaatagcgtggtggaatttttcttgagttccccatgctccaatgcattaacaagatttttagtggaattttcagagccttagaaataattttaaccaattaaaaatcaccaaagtgcaatatttaatcccaggaaaatccttctcctctttttctttttcttttccttcctttttcactagatgggccgtcggcccatctctctccc

SEQ ID NO: 24689 - DNA, 947 bp, Oryza sativa
caactcttgaaaactctgctcacattctactgaccacttgtacttcacatctttctaaagcagtcgtgtcatgggcttagcaatcttggaaaaattctctataaacctccgataatatccagcgaggcctaagaaactgcgaatctctgaaattgtctttggttgtttccagttggttacggattccacattactgggatcaacggcaactcctcctgctgagatgacgtgaccaaggaatttcacttcagacaaccaaaattcatacttgctaaacttagcatgcagttgatgttctcgtagcttctccaatgcaaggcgaagatgttcttcatgctcttctttggttcgagagtagataagaatgtcatcaataaagaccaccacaaacttatctaggtattccataaacaccttattcatcaagttcatgaagaaagcaggggcattggtaagtccaaaagacataacagtacattcaaacaatccatacctagtgataaaagctatcttaggtatatcttcctctttgattctcaactagtgataccctgatcgaagatctatcttggagaaaacagtggcacctttaagctgatcaaacaaatcatcaattctgggtagcggatacttattcttgatagtcacatcatttagtgcacgatagtccacacacatcctctgggtatgatctttcttttccacaaaaataaccggagctccccatagagatgaactcggtctgatgtatcccttctgaagcaaatcatccacttgcctcttgacttctgccaactcattggctgccattctataaggtctattatggatcggagttgttccaggtaccaaatctattctgaactctatatcccttttgggcggcataccaggtaaatcatctgggaacacatcgggatactcccgaactataggaatctcttcca

SEQ ID NO: 24690 - DNA, 1147 bp, Oryza sativa
cggcgaccttcacccggaaccaaaggagaaaggaagccattacttgagtccagccagctacactcttagcaaggtagagaaggaaagtatgtttgaatgcttggagagcataaaggtaccgtctggatactccacgaatatcaagcgaataataagcacgaaggagaagaagttcacaaacctaaagtctcatgactgtcacgtgttgatgacacaactgctaccagttgtaataaggggtatccttcaagacaatgtccgggcaacaataacaaagctatgtgcattcatgaacgcaatttcgcagaaggtcatcgatccggatagattagatgcccttcagaatgaagtggtgcaatgtctcgtcagttttgagttgatatttccaccttcatttttcaatataatgacgcatctgctttgtcaccttgtgaaagagatccgtattctcgggcctatgtacctacacaacatgtttcctttcgagaggtacatgggcgttctgaagaagtatgttcgtaaccgtgctcgtccagaggcaagcatcgctaagggttatggaacagaggaggtcatcgaattttgcgtagaatttatcgaagaccttcgcccaatcggggtacctgaatcacgccatgaagggagactacggggaaagggaactctcagaaggaaagcaattatgacggtagacaacaatttattccgtaaagcccatttcactgttctgcaacactcttcattggtagctccttacatcgaggagcacttggctctagttcgcgccaggaacatcggtaagtccgatgcatggattacacggcatcacattgatactttccccgcgtggctacgacaacatctcatgggtaacgagtcgatcaaccaacaacttgccttcctggcgaggggaccgtcttggtcgatcgcgacattccagggatatgagatcaatgggtacacattctacacgagagcccaagacatgaagagcacgaaccaaaacagcgctgtttgtgtcgatgccatgggacacgatggaacaactgccacgtattacggtgccatcgaggacatacgggaacttgactatggtcctctcaaggttcctctgttccggtgccaatgggttaggttgactggtgga

SEQ ID NO: 24691 - DNA, 1896 bp, Oryza sativa
tagccgatgattccacaggacaaaaggtagaggagatcccggagattgtttcccctcaatcaatttcaccggaaacggaaaggaacggccggatttggaaaggaacggcggcggcagctcggcggcggcgcgctagggtttcggcccgaggaagacgacggacccacctgtcagcgactgaacgcgcgcgcgcgcgtgggcggctgcgaactgggccgacttgggccggggagagagagagaaggttttgggccgactttcggcccaaagccaaaagagaactttttaaaacctttttcaatttaaattatttcttaaatgcaattccatttattaaaaatacttccttagctcaaataaatcccagaaaaatctaggaattatagaattaagcaaagtatttaatgaaattttatctggccccattttatattggaatttattaattaaaattagatcttcttttcaagacttttaaaattattttctagaaattccatttaaacaacaatttatataatttgaatttttagggtgtgacaaacctaccccccttaaacagaatctcgtcctcgagattcggaagaactggcgaacagatacggatgagctgacttcaattcatcttctcgttcccaagttgactcttcttccgagtgattactccactggactttgcaaaaacggataactcgattcctggtccttctctcatttgtttccaagatacggattggtttctccacataagtcagatcctcttggacttctatttgttcaagattagcttcttcggtaggtacccttaaacatttcttcaattgcgacacatggaacacattatggactcctgccaaagattgaggtaactccaactgataagcaacttctcctcttctactgacaatcttataaggtcccacaaaacgcggtgccaattttcctttggtgtgaaaacgatgaactcctcgaagaggcgtgacacgaagatacacataatctcccttaggatacaactcaaatctctgcggtgattgtcggcataactcttatgacgagactgagccacacgcaatctttcttgaatgattttcaccttttcttctgcttcccttaggatatctgtcccgaaaacctgacgttctcccgtttgatcccacaaaagcggagtgcggcacttttgaccatacagtgcttcgtacggagccatctgaagactagcttgataactgttattatacgaaaattctgcatagggtagattcttatcccaacttccaccgaaatctaaagcacaagctctgaacatgtcttccaaaatttgattcaccctttcggtttgtccgtctgtctgcggatgataagcagtactaaagttcagcttagaacccatctcttcctgaagtttcttccaaaaatttgaagtaaactgacttcctcgatcagacactatcttcttagggacgccatgcaaacacacaatccttgccatatacaattccgctaagcgacttccggaataagttgtctttaccggaatgaaatgtgccaccttggtaagtctgtcgactattacccaaatagagtcatggccagatgacgttctgggcaaaccagtgataaaatccataccgatttcttcccatttccattcaggaatcttcaaaggctgcagcaaaccggcaggtttctgatgttctgccttgactcgttgacaaacatcacatagtgctacgtattctgcgatttcacgcttcatacttgcccaccaaaatctttccttgcgatcctggtacatttttgtactaccagggtgaatagagtataaagtatcatgggcttctttcagaattgcatcttttaaatctttgttgtcggggacacaaatctctcacc

SEQ ID NO: 24692 - DNA, 1362 bp, Oryza sativa
gttacttgagtcagtcttgaccttaaagactcagaagacaatgcatgaacagttacaactcgaccatcattgctggagagagttacttttctgttggcacagtctatcatacctttatgtctagctaaccaatccatccctaggatgacatcaaggtctttggattctaacaagataagattggctagaaatggtactcccttaatttctattctgacagaggggctacgttgcaaagagagtgcttgattacttggggtactaaccatcaaaggacgtctaagatcttctacttccatcccatgatttcccgcaaaactcatagatagaaatgaatgtgtagcaccagaatcgaaaagcactgttgcaggaactgagttaacaaggaacgtacccaaaatcacatctggagcatcttgagcctctgcagctgcaacatgattgacacgagcctctgatgctggtgcggtagagttgctctggacagggacaaccttcacgcgtcggggcttcggacacttgtcagcgtaatgtcccgggtctccacagttgaaacacaccacgggcttgctaccttgctccctcttggcaggctgttgttgtgttggagctgcaacaggacgtggaacttgattgcggatgttgttgccaacattgttgttgaagaactgacgctgcggacgaacgacagacgaagaacctccatgtggcatagactggggtcctaaagtaagacgcggcctctgattattcccctgttgcgtcttgaattgagcaatctggcgtttcttctgctccatgcgattatacttgtcctcctgacgaatagccttatccactaatttctggaaatcagaataatctccagtcatgagtgggtaagaaagctcatcattaagtccttccaagaacttctcctgacgctcttcatcattgcgtacattttccggagcataacgggctagacgattgaactcgtgtagatactccgtaacagtgcgagatccctgggtaagcgacctgaactccttcttcttgagagacaccactcccgatggtatatgcgtcttccgaaaagcagcggtgaattcaagccaagtgataggttcagcagtagtcctattcagacggaagtgatcccaccattcagaggcagggccatgcaactgatgcgatgcaaatgagaccttttcctgatcagtgcactgaagcaaatccaacttcttctctatggcatgcagccaatcagcagcttcaacaggattagtggtactagagaaaataggcggcctcacacgaagaaattctgctaacttattctgaggaggtgcatggttatttccctggttctgctggttctga

SEQ ID NO: 24693 - DNA, 875 bp, Oryza sativa
gcgaagacggactctccggacacgacggaatctaagcagaaaagaacaaaatcaccaaaacagcacataaacaagcatgaacagtacatgtggatatttttaacatgtagatctcaattttagaaaaaattagagacttgaaccaactaaatcggagctaagatgaattagttatgaatttttaaagattaaatcggattaaaacacttatatcggttaaaattgaattatgacgcaataatgaattatttttgaaaaggaaaagaaggtttattgcgtcagcgggctagggtttgcggtggaccgggcgcacggcggcggttcacgcgaacggacggccgagatcgaaccgatctaagatggacggccgagatcgatcgggtccacggcggctcacagcggacgacctcgatgacgtcggcaatgacgtcaccgacggcggcggcggctcggcggagcagacggctcgggcggcgcacgctcgctggcgaacgacggcgcgaggacgcaaacggaaggcaccagcacgtagaggacgacgcggcgaactcaccggtgaccacaacggcggcggaaggtcaacggacggcgacggcgacgaggaggaagcggcgaagctcttcgggtcgacgacggcgatgatgctccggcgatcttcggcggcggcgaaggggcggacgaggacggcgacgcaacggcgaccacgatgacgtccttcccgagcgacggcgacgtctggaacggcggcggagcacggctggagcggcggcgacgacggcggcgctagggcacacggcgctagagctcttccggcgacgagaggcgaaggcgagggtggcgacgggtagaggagaccacggggagccttttaaagg

SEQ ID NO: 24694 - DNA, 1166 bp, Oryza sativa
gggatttgtaccaggagttgcgtacaatgtcctttgtcattggatttgggactgcccctttttatgcccagattcctcatgatcgtcatgaagagaggtgccgagtcaaagtcactttgaacagtagtagtgaagatattccatcggtgatgttcgaagctggaggaagaaactatatccacgcatgtcaggaggtggcaaggatcgccataggagagctccgtgatcgctacagtgatcagttggccgacactgagtatcgttaccatccccgccaaccccaggggagtgaccgtggcagttaccttgagactgaaggaattgagaatgatgttaccaccagacatttggttgagatgctgtgggctatggatgaaagtcgtgcggagactgtgttagtagctcaagatcgtgaagattggaatcgtggtaagatttgcaagctagaagacaaggtggatcgtttggagaaggaactagccgcgttgaagggagaagcaccgccgcagaaggccaagattcgtcttaccgcaaggaagagagctttatttgtcccacgctatcaattggcgccaaaggtccgtgtggtggagaaagaagtagccccagcggatcctccggtcgtcaatgtaagtgatgatgaaggagaagaatcgaagcgcacccattccaagatcgagtggggagcaactcaagatgatgaagacgagccgaacgagccttcaatcaactccgatgctcggaagaactagagtgccttgttaagccgttgtcttagatcgttgtgttagtttgcttgttttaaatttgcttgtgtgggtcttgcatgtgatttacatcagtgatgggatgtaagtgcatgcgtttgtttgtttttttttttgagtgttaggaagttggtgagtttagtgttgtgagagtcttcagtttgtaataatgaaactcagttaagatcaataaaagttaaagtaattccctgtcctaagtagtttttccccggttcctcttcttgtgccctgtccatgccagatggtgaacactcgcagcaacgggaatggtcccaacctcaacaaccccaataacaacaacaatggagagaatccaacccttgctcaagttcttgcacaacagactcagttaatgaacatgatgatgcagcaacttca

SEQ ID NO: 24695 - DNA, 2722 bp, Oryza sativa
tgacgccccgaaagcttcggttgtgattccgaaataggacgtgtttaaatccaaccagaatagttcgtaccaaaatttgaatttgcgtcttagtaatttgaaagttttcaattagctgttgtgaagaagcggaattaactgacggagtgaaatcatcaggagaagcaaatggctgcattcccccgctacatattgcgacctgtgtgcaatgattgtactattaattcgctttggctcagccacgctgtcagctcgcaatcagataatgtaaccaattgctaaataacaaattccagagaaagaatgtgaatggcgtacgctaccatggcggaatcaaccaacgtcgcctcaacaacattaaataaaaacaatcagaatatacaaaacaaaaattgatcgatcatgggaagtggtacaggttggacggctggagcccggcggtgacgttgaagtacctgaacgccgccgcccaccggcggttgtccttgagcatgtgcacgaggacggtgtccggccggaagttgtccatgtcccagttgaggtcgtacatccgcggcctgaggctgtaccggttcttgccccggcggccgatgttgagccatttcccgacgaggaggtcctcggggccgtgcgtgtcgttgtaccgcaggatgtcctcgttggtcgacacccacgtcgcgacgtcccaggacacgacgtagcccatcccgtgcatgaactgcatcgggtcgtcgccgacggcgaagccgtagccgaggtagacgtcgtcgcggggcttgtgccggagctcgtcgaccagcgcggccacgcggaggtacgtgtcgtcgtcggtcttcatcacgtagtcgtagggcgacgacgcgaacatccgcggcacggaggagaggtactcgtgcgtcttgccgtcgttcatgttctccgtgcagttgagcaccaggatgtcgccgtgccgcgcggcctccagcaccaccagctgcgcgtccaccgggtcggccacgcggcagaacacgaagcggacgtccacctgcgcgacgccggggggcaccgccggctgcagcgcgtacgccaggcgcacgatgttgcgacgctcgtaccgcttcggcgtcgtcagcacccccaccagcagacggagctccggccgcacgacggccttcgtctcagcagcagcagcagcagcggaagctgcatctccacccggcgtgacgaggtagccgtcggcggtggatgggccggcgtggcagaggacgccgaggccgtcggagcggacgtgggaggagccgaggctggggacgacgagcaccacggcgaggaggccgagcggcaccagcaggagatacggggtgcagagcgaggcggtggccgggaacccgtgcgacgacgacgacgacgacgatgcggtcttcatcgtaaaaatctcgcggggaaatgcaagtgcccctcgcacgatcgcggcccgcgcgttactcgagctatagccgtactcgacttataaccaggcacgaacgcgcgctggtttagcgatgtgggactaaaatttcagcattttccccctctctctctatctcgtgtcaaaagcgtcggtggaaacgaacggttcttcgcggaagaagtcgtcgtggcaatggcaatgtggcatcacccacgggagtacgcgacacgggctcgatcgatcgatcgtcgtcgaggctgccgtcatcaacggcgacaaggaaccttactcgataagtttactggataattttgggttgtctcgtgccacatgacaggggatgtttcaacggccaacgccatatggtaggtggcagacggccggggatataccccagccctccagagctctagttttatcgccaatgtatggaaggacagctcaggggtacatcgaaaattcgaaagggatttgattaaaataacaagtacacagtgagcaatcattcaatcattcatgctgagattcgaggcatccagcttccagcatgcattgttggcgacttggcgtgatcgttttgagttcgggggcggctggaacagaagaaggtcgctgggaacaggcaagcttgtcggctactactacttgcgcgatagatatgcccggtgtgtgttcaattgttcatgacatgcctgatgccttggctggaggacgatcgaaaccgagatctcaccaacttatacaaatgatggtagattaataggcagggaaattgacaattcttgcggatgcttttgcctgtatgatcgccttaatttgagatcgtgatttttcagtgaaaaaatcgatttcgtgcaacttcgaaacgttgagggttaattggctaatgcagctggtcttctgttgagtaattcaacataagaattctactagcagatcgatatagtgttgacctgttctctctattttgtaaatataaagtttagaccttttctgggtatatggcatgtgttatggcaaagtcggtcagactgatcatacagtgaaaccaacttggtctggtctttctttctcagaatacaacctgaatgtacgcgtacccatgcatgtctacttcaattgattaattaagttttgtactttctagtaatatacggcattgtttacttttggatatgatatttgaccattgattttattaaaaaaaacctaagtaatatttatttagttgtgatttgttttattattaaaggttccttaagcatgactatatatattgttttatgtatttat

SEQ ID NO: 24696 - DNA, 6462 bp, Oryza sativa
gaaatacaatttagaaatagttgaaattcggaattaaaaataaggaatattagaacaggagactagagtccatatagaaatacaaattaggaaataactgaaattcggaattaaaaataagaaatattagaagtagagtatagagtccatatagaaatacaaattaggaaataactgaaattcggaattaaaaataagaaatattagaagtagagtatagagtccatatagaaatacaattaggaaataactgacattcaaaattaaaaataaagaatattagaagtagagtatagagtccatatagaaatacaattaggaaataactgaaattcagaattaaaaataaggaatattagaagtagagtacagattccatatagaaatacaattaggaaataacagaaattcggaattaaaaataaggaatattagaattagagtatatagtccatatagagatacaattaagaaaaaaacagaaattcggaattaaaaaaaggaatattagaagtagagtataaagtccatataggaatttaaaactaactaaaattcggaaaaaaaaagagtctccatgttcactctcatgacctagaaattctcatattaatcggagaaaaagaaaaagcaaagtccatatagaaatacaatttagaaatagctgaaattcggaattaagaaataaggaatattagaagaggagactagagtccatatagaaatacaattaggaaataactgaaattcgaaattaaaaataaggaatattagaagaagagtatatagtccatatagaaatacaattaggaaataacaaaaattcggaattaaaaataagaaatattagaagtagagtatagagtccatatagaaatacaattaagaaaaaaaatagaaatttggaaataaaaaaaaagaaatattagaagtagagtatagagtccatattggaatttaaaactaactaaaattcggaacaaaaaggagcctccatacaattaagaaaaaaaatagaaatttggaaataaaaaaataagaaatattagaagtagagtatagagtccatattggaatttaaaactaactaaaattcggaacaaaaaggagcctccatacaattaagaaaaaaaatagaaatttggaaataaaaaaataagaaatattagaagtagagtatagagtccatattggaatttaaaactaactaaaattcggaacaaaaaagagcctccacgttcgctctcatggcctagaaattctcacattaatataagaaaaagaaaaagcagagtccatatagaaatacaatttagaaatagctgaaattcagaattaaaaaataaggaatattagaagaggagactagagtagttattacacattagtagtttcgtaaagttattgcaaaatttaaaattatgttgtcattgtaatatattttaataataaaatgagaaaacatatatgctattatacgtgagaaaatataatgatgctaaccgcgtaatctgcgcgggccaccatgctagtttttttttttgaatgccaaaagaggtagtatatgacatggtacatacggagtaccttctattagtatcttctcaagcaccgtgatagaacaaatgtccatctatctcgaggcaacaaattgctcaccttaggagccaaactaccgaatgtataataagatcgtaggttgtgatatacaggtttaatgcttgagaatgcaacggacattgctccagtcaaggttaagtacatcttgcactattgttatgcacttttcttttgagtgagaccaccaaaaacaacataggaaatccccaaaattgatatggcaaagctatctgaaatatacagccttgacaaattacgttttgcaagaggagtacaagcaaattacagagctaataacaagcagagcaagcacattccactttggaggctacaagtctactacagcttcaccctgcggaccacttgcatcaaccctaatcgtatgaagaagatggatacaaactttgagttatcatatccatcagccggcgacccccccatcttgaatgctttcatttcctccacacgcggacacaccgtgctgtttctcatcaatccgccaattacaaccacacctatcgttgtcacgaggcgatcaatgacgaatcgatcgaacaggatcaacccgatgatcaccaagaaatcgagcagccgaaatcgaatttgagcgagtcaaaccgaggcacagctcgcgcatccgtgttcgtgcaccgcacaaccaatgcacgaatcgaattaaacccgttaaagaatgtgtcgaacgattagttaattagaattaatcaaacggggaagaaattaacaaacaacaattatggatcatcgaagaggtgatcgatcgatcgatcgatcatggtgagaggtggtgcaggttgatcccggcggtgacgttgaagtagctgaacgccgccgcccaccggcggttgtccttgagcatgtgcacggcgacggtgtccggccggaagttgtccatgtcccagctgaggtcgtacatccgcggcttgaggtcgtagcgattccggccgcgtccggcgaggttgagccacttcccgaccatgaggtcctcgggcccctccgtgtcgttgcgcgcgaggatctcctccgccgtggacacccacgtcgcgacgtcccacgacacgacgtaccccatgccgtgcatgaacggcatcggctggccgcccatggcgtagccgtagccgaggtagacgtcgtcgcggggcttgccgcggagctcgtcggcgagcgccgccacgcggaggtacgtgtcgtcgtcggtcttcatgacgtagtcgtagggggacgacgcgaacaggcgcggcacggaggagaggtacgcgtgcgtcttgccgtggttcatgttctcctcgcagccgccgagcaccacgacgtcgccgtggcgcgcggcctccagcgccaccagctgcgcgtccaccgggtcggccacgcggcagaacacgaagcggacgtccacccgcgcccgcgccgccgccggctgcagcgcgtacgccagccgcacgatgtcgcggcgctcgtaccgcttcggcatcgtcaggacgccgacgagcaggctcagctcgggcttctcctcctccttcggcgccgccggcgccgcgacggtgtagtcctcggcgccagcgctgcggcgggcgcagaggacgccgaggccgccatcggagccgacgcgggcgccgttgagagaagggagcaggaagacgacggcggcgaggaggagcagcgcgagcggggcgaggaggaggtaggagttggacgacgccggcgccttcatcgccatggccgcatgcaaatgcaacgggagacaacgtggttggtaggtgcaatgcagaacgagctgtagtagctgttatacgcgcactaatcaagctcacgtaatcaagaatttccattaagaaattccactgcctaacttggtttttttgtaaacaaatcgtcgaacagaacagctgacaagacaagagttctttctagcttgacgcgatgcgctggccagttagaactcgccacgtgcagtaataacaacacccatcgcttaccttttaacttatctacaaataaaacttaatattgaatttaattttagagttttcaattatgatttattttttacattgatcttttaatcgccaaggacgatatatatatgagtgtgtgtaatagttttatagctttcgaacgattaaacagaaaacatcttctctttttcttttgacagagacggttgctctgtctcgttattgacacaaaggttaagttaatcacgaaacgagtccatatcccatagaggttcagaaatggcacgttgagctgtcgccgttcaataatagcagccgagtcaaaggagagcgtgaagtgccgttcacgacgacggcttccccgctgcgaaatgcctagccttaccggtgaatgatcggatcaaactctgaacaggaataataataataacaataatgcagagaagtttctgaatatgaggcagaaaagaaagccatatggtccctagtagtagggtcgaagcctgtagtatacagataccagtattaatcaaattttagtccctgagttgccgtgccgtgctgtgctatgctcgcacatgctgatggcattgttgtttgtgttcatggctctgaaagtaacgggctaccaagaactgattccaatcaaatcgcacatcgctgtttcatgtgacgaatcctggtcatgggctggtgtcatctccagtcgtgtttcgtccagaatttgtaccgcgttttcttcctgttgctcgtcatctttgtgcttctcggctaagtaattactagcctgtacgagcagaattgttccacggcgaggagcccccgttttcaagccgtgctccccgcgtttctggagacaaagaaaacttgtcgatacccaacagtcctacctgattagctcgaaatcaatcgacaaaaaccggtgaaatccgaacaaattttgcagatatatacactgaacctttcccgtatttagccggcttactgcacggtttctcaattcgaaccgacttgataagattgataaccgcgaccgattacttaccgtcataggagtatctttgagaccctggtcaggtcaaaggtcatcggaaacgactcggaaaattaaacctccaaattcacaagtctccatcccactggtccctggacatggaagaggaggggaccggccgtgtgtacttgtacacggaaggaaccaagcaacagcactgtcgccggatggagtttggtcccggaggaaactgatcgatgaagctccaagactccaagcgccggcgacatcacacagctcgatcgatcggcagcagcagcagctacagaatatagatgcgtcgcgtagcaagctgagctatgccgatgggccctgtggcactaacggttgccaagagaggggattctaatcactcgagatgataatgtagtgatcgataggtcgcaataggcgccaaagccacccgtatagcctagtgatctttaaaaaaaaaaaatctgaattacccttcttactatcgtggtgaatagcagatattcaggtcccgtttgatagagctctaaactccaactcccaattctaactccaactccagtaagagctggctcctatacgagctgagacgggtatagaaagtatttggctagattactcagatccacgccaccacatccctcgtcgccattttgtcgaacaccttgtagacgtcaccctactgttgctgccgccaggcagcccgcgagccgccgctgctggtcagcccccgcatctcctccgccgccccgggccaccacctatcgccaccgccgccaacgcctgccgccgccaacgcaaacgccgctatcacagccacagcaagacgccggaggaggatggggaggaagatggagaggagagacaacgggaggagaagggtaggaaagggtagtttagtggtatttttacgtaaatacactaaaaaggtagtggttcttttgaggtggagtggagttgtggagcagcaaaaacccaactccatcccgtagtataattttgtggagcagctctgctaactctgctctaaaaaaataaagaatatgtatctatcgatgggggatacccgtagaccggataaatagggtattggggtacgttggtatgaggatctacatgatacgacatcaaaacaaacaaggagacaaagattatactggttcaagcccctcgttacgtaatagccctaatctagtttgtatgagattgatatgaaaaatcacagagtacaaagagaacaaaagaatccggcgttactggcgagatccttctctagatgattcgatgagatctcccggcaagtgggcttcgcgtcctcccgctccgtaaactatggtgggggtgttggtgttgtgatacaatgatctgaaccctcaggcggccttttataccgtgagttgccttagtctccaagtagaactcagagacaacaaaccctgcacgatatagaataaacctaatcctctctgaataggactctgataatcacttgcccataaggatattttccataatatcttgtaaattcccttatcgcatacggaaacatatcgtatacatgaaggtataccgtatccgtatattccataaggcgtgggatatgaggtatgccttatccgtaaccatgacagtaccgtttggcacagttctccagataagctggagttgggaggtagagctgtgccaaacggggccaataccatcaacttttcatactagacaattaaccccctaactcctgttttagatggttttgaactggggaggttaacgtggcattccaaggtgtcaaaaaaataaaaaaaaaagtaagtccaccaagggtggtaacaaaaatttaataaa

SEQ ID NO: 24697 - DNA, 6603 bp, Oryza sativa
cgtgttagttattaattatttttaatatcaaattcagttatttgtaaattatatatattcctatatatactctagactcgtcttttaatatttctttttttagtttcaaattttttttgtaaattgtatttctatatagactctatgctcttcttccaatattatttatttttatttctgaatttttattatttctaattgtatttctacgtggattctaaactcatcttttaatattatttaatttttaatttcgaatttcagttacttctaaactatattcctatattgactttaaactcttcatcccatatttttcttaatttcaaattttagttatttgtaaattatatttttatacggactctaaactctacttttaattttattatgtttattctaaattttagttagttttaaattcctatatgtactctatactctacttctaatattccttattttttaattccgaatttctatttttttcttaattgtatttctatatggactctatactctacttctaatattccttatttttagttccgaatttcagttatttcctaattgtatttctatatggactctgtactgtacttctaatattccttatttttaattccgaatttcagttatttcctaattgtatttctatatggactctatactctacttctaatattccttatttttaattctgaatttcagttatttcctaattgtatttctatatggactctgtactctacttctaatatttcttatttttaattccgaatttcagttatttcctaattatatttctatatgggctctagtcttctcttctaatattccttattttttaattccgaatttcagctatttctaaattgtatttctatatggactctgttttttctttttctccgattaatgtgagaatttctaggctatgagagtgaatgtggaggctcctttttctattcctttaataatataactagctaggtggcctgcgcaattacacggctagcacccaaacaaaatcatatatttttttagtatgatttttacttaaaatttattaaatagttatctcattgtcttaagactttgaaagacgaaaccttatcatccttatgtttctaattatatagtttttaaaagtcacaccaattgctaccccttatgtcatctccttctttatttgcttgctcgatctaccattatttctattcattctttttggaacctttaaaaattggattttatagtttttagagtttattgtcacattggatttcatttttataatatcaaaatgtcccgtcaaacgttgccattatactcctctacggcccgtccattgtctcttctctttattgtcattgagattttaaaaatcgaacataattattgtttgggttcatttttactttctaaaagtcccgccaaaccgtcaacggctttgccattgtactcctctacggctaacccgctaccttacttctttattgtcattgaaattttaaaatcgaacatgattatcattggttcttttttactttttggaagtttcaaacctttaaaaattggacttgtagttttattttttataacttttagaagtcccatcaaacgatgccactatgcccctctacagcccgtccgccgccaactctttattgttattatgattctaaaaatcgaacataactatcatttgaattcattttttattttctagaagtcccgtcaaccgtcagcggctctgcaactatactcttatataccccgcccactgcttctcctttttattgtcattgagattttaaaaattgaatatgattatcaatggggttatttttttttactttctagaagtcccagcaaccgtcttactcgtttgcttcacggcatgcctgacgtccctccttttaattgtcattaggattctatttggtgttttattaacaatttttatatctcgtatcaaccgccaccactctactcctttataggcatgtttcttaatttatctcgtcatgtgttttagatggtcttttctttcaataatctttatttttatcacaaattttagttatttataaattgtattcctaattgaaatcttacttttctttttcaaatttcagaatttttttaaaaaaaattagttaatatcgtattgtgttcttttaatgtttttattttttattttcaatttcagttgttttaaaattgtatttctacttgaattttcttttaattttttctaattttagatattattttatttttattctcaattttaattaatctcgtattgggttcttatatggattcttctttcaatattgcttatttttaattctgaatttcagctaattttaaattgtttccttcatgaactcttcttttattttcttttgctaattttggatttatttatttttatttcgaattttaattaatctcgtattgggttcttatatggactcttcttttattattccttatttttaattctgaatttctgctatttttatattgtattcctacttggactctcatttgcttttctaattttggattttatattatttttgtttttaattttgattaatctcgtattagattcttatatggaaacttatttcaatatttcttatttttaattccgaatttcagctattttaaattgtacttctacttgggctctccttttctttttttcttttctttttctctgaataatgtaggaatttctagcttccacagcgaacatggtgcctccttttaaagctgttttaataatataatagatagataatgaatggtcccacatgttaccttcttctcttttcttcccccattttcttcatccccagccgggtagatacggaggaggcagcgagccagcaagcgccctccttggcccgtggaggaaggcgacgatgatagcagtggcagccagccgacggagaggtgagctcatgcagggtgggtcatgtcttccctgtcacgccccgaactagtcccgaccggaactagcccgtgacgcttcaaattaacctgttaatcgataccagtcccaggaaacagtgctggtatcacagggagacagaatatcacagcaacagaggtctctttattatagagtagatgtacagtcatgttgggctgcggacagatcccgagctcacaactgcattacaaaaggaaagcggaagccaggacttggaccaatcaacacaggcgcgacttgggaactaggccgaaaccctaaaactcatcgtagccggcttgctcctggaaaaactcctcatcagcaggatccgcttcatcttcttcagcaactgggggggaattatttatatagagcaagggtgagtacgggagtactcagcaagccatgggaaataagtgtttaatgcaggcttcaaggaaaggctgatgtttttgcaattaatttttatttgaactcttttctgaaacaactaagtgagtgcttctcaaacgacacggatgagacagtgcgtctcgtccggtcggagtatgtgcaatgtatcagtctttagaatttaaacaaggttagcacccggccaacagctttttcaacggccacccgggccaacaacttttcaaacggccacccgggcctagctgatcccatcagctgcagatttttcaaacaccgaaccccttttcacacagcaatttcacaagcagtagtcaaaccaaactacgctaggaatcacctcacatccgcccatgaccgtgggcacggctgttcgaacagtttgttaacctctgcagagggggtacactttacccgcatgacattactaacccggatcacccagcccgtggggatcagccacgtcgggagacctccaagctttcatgacaaggcatttccaaagccgacacaggtttaccatacgccgacgagaggggtcccagaccaacaacaggttagctcccagaccatactgtgccaggaagcccaggggtcctccccgacaccaccccggcgaatccacatgtctctcggcatcaaggctcccctgataagctagttactcagccaggggtgtcccattccacccatgtggttgtacttgtcttatgtttggatgaaattccaaggaatcggtccttaagtgcgagagcgggaaaccgtacacccggtacgtttcccggtccgcggttttggaaattcatttagttcgcaagcaccgacccaggtgtcgggttttccaagtcttttgtaaaactccagttttacccaagttattactcagattttaagtttgaaggcgaccgtcgatactggcacagggtgcacgaatatcgaggcgcaactggatggttacaaggggacatagtatagcaattaacaatggaaggatcaaatgcaacaagttaggtaggtctgccaatctgccttgcagacggaacaacagattaagtgcaatcctatcaatgcataatattttacaagcaatataattagatttcaaatataggctcaagatgttcaaaggtggcttgccttgctcgagatctggagcttgatcctcgaaatcctcgcaatgcgggtcttcgggctccgaaactacacgcgaaacgggacaactcaacaaacggcgaaaatgaaaccctaataatgacctctaagcgtgccattagatagatctcgagatttgaggaattttggaagttgaacggagtcaaacggatctaaggttaggaagatattgaatttctaagattattggattttttggtcaaaaagaaaaggatttaattaaatccttttttggaaaagaaaagaaaagaaaagagggagggattatagacttttcctcgggcggctaaggcgcggcccaagggaattggagcggaccggccgagttaaatgggtcggccggcccaaggcggcccaagtgcgcgcgcgcgggagggaagagagagagagcgccggtggaccgggctcaccatgcgcgatcccgggtgggacccgcttgtcagcggcttggctcaccgtgcggagggagtacgcggctcatgcgcgcgggcgggggagggacgcggtgcacgtgcgcggttcgcggtggatgcggatgcggcgggcccacgcgcagcctcacggctcgcggtggaacgcgcgcacggggagggactgaccggggtcggctcgacccggtctaggctgagctggcgccgacgtggcgcctacgtggctgccacgcgggccggcgggaggtagacgacgacccggccgcgaatggacggcgggcagcggcagcgagcggcggagcgaaccacggcgatacggacaaaagcgagcacaccgggcggttgctcgtgatgaggggagacgagccaacggctcggatttgccggaggaagcttgacggcggcgaatcgcggcggcgacaaccggcggggagggaagagggaaacggcggcgaggccacgaggggtcgattcccggcggtgagagcatctacgcggtttcgggaactcgatgctagcgtcggattggacggagctacgccgagcaaggctggtgacgtgtgagtgctacggagctcgagcggcgacggcggcgagcacgcggcgagcgacgacaacggtcggggtggcgccggctaactacggggagtctactcgagctactaccgaaagctagggggaggagatggagcgaggaggaagaacagagggaggcatcaccgagatgaggaggggcgctgtgacgagaggccgacggcgcgggagtaatctctccggcctcgggccggggaagaggaaggagagggcgcggccgaagtccccttccgcgtccttactcgtgccgactccttcgacacgcgcaacaacgaacggcgacggcgaacagagcacgggggcggcagctatggcgaggaggcgaaaacgagggagattggaggggaaggagctggggtttaaagggggcggcaatgtcggtttgggaaccgacttagggcggtcaaggcgcgagctggcactcggcggtcgcggccagagcggcgacagggaggatgacgccggcggggggaaaaggggaaaaaggagggggagaaaggggcttgcccttttgccgattcgggaaaaaggaggaggggagcgggggcgacgcggcagagggaggaggggcgctgcctccatcccttggcggcttgcgcgcggagtggcggggccgggcggtgacgacagcgatgacggcgggcggtttggagcggcgcgacgacacgggcgacagacgcgtgaagaggctaacggcggcggcgaccgggcggtcggccactcggcacgcgcgtgcggcttgcaacgggcggcgtccgcgcgggcgtgcgcacgcgaacacggcgcgcgggaagtggcagtgagggagcggagagggaggacttcgctcggcgcgggcggctcacgcgcacgcacgcgggcggagcggaggaggaggagcactcggcgcggctcttcgcgcacgcgcgcgcggcgcgcgggcgaggtggagcggagctgagcgggggggggagcggagcgcgccggggaggggagagggccgggggagagggggagatg

SEQ ID NO: 24698 - DNA, 19214 bp, Oryza sativa
  unsure (1)..(19214): unsure at all n locations
cccccccccagggggagatgggccgggaggaaatcggcccatcgacccccgggggaggcaaaatagacttttgtggaggaatttgatttggaaggattggattcgggattggactcgacgatagatcggggattgagatcttgagatggcacgaacactagacaacaagcaaagaaacaaatttcgcaattagggtttttaagagataattttcccgctaggcgccacgacggaacgggcgctacattccctcctcttccatggaggccgatagctaccgagctagaggactccaacaacacaggtgtttgctagctgcggttgcctccagtcttctcccttcttccttcttccctcctcccctcttcacccctgccctcaatctccaatcaagccagcaaccaagccgattgccaaatccacatcccgttgttcgttgaggttccctcctattccttctcctccggccgacaagagaggagatggaaggagaagcgtgggcatcactggattcaccacctcgaccctcgcgtcgtccacttcctccctcacctctctttcttccatcccccatctgtctgggctccatcgagctcacagctaccaaactgcctactgcttccagccctcctcaccgccgtccgccgcgccacaactggccccttcctcgcgcagcccaccatctccagcgccttcctcgccaccgttcaccatgccctccttgccgccgcatactcccgccttcctcaccattactaggctcccactgcgttgcaaccccttcctcacctcgacccgccacctccaacgtcctccttgctagcgtgcgcagcaccctttctgctgttcccgccatccccgcagcgcctacatcgccgatagagagataaccgaaacaaatgaaaaacaaactcgtaactgaaaaacgatgtgtggtcatgtgaagtggtcttttaaccgaaacaaatgttagcttggtgattataagcataattaggaacaaaagaagggatggaaagctattgcaacagttcgcgaaattctcacgcacccgaacacccgcgagggcactacgcgtcgagtgcccgatctggggtgcaaaaaatcgggcgcccacgtcagctgaccgtcagcatgcatgcatgcaaaactattttaaactattttttctcttaagttatttatccaaatcatgatccgattgcaccattaaattcattgcaattaaatttttaaaataagaccacacatagatatattacgatgacaaaaatttagcttattattgaattgtttttaaatgttgcacactgttacaccaaatatatcggaattgtttcactaagtagatcgaaaatgtttcaatcgtttaaattggatgttgtttcaccttatataaaaacaaagtttcagcaaatagcgaaagaatgtttcaattcactgcaacatttaatctatacatagtgaaacatcacgagtacactaggtgatacatttttggtggaacaaaaaataaaacggattcacttaatagagggttttcataatatgtgtgtgatttgttgtaaaagaatgtttcaattcactgcaacatttgattcatacacattgaaacattgtgagtgcattaggtgaaacatttttggtggaacaaaaaataaaacgaattcccttaatagaggttatgtgggtggtttgttgcaatagagtatgtggtggagatacatggcaggtgggggcaggggcacgtggtggggcctaggaggcagcacgcgtcacgtggggagggagcgtctgatttttctccttcccctgagcgaccgacgcgaaggattttggacaagactttacccggaattatactctgttttaaaacagagtaagaaatgagggagacaaaatagacatatttccaactgattgctgatgactcgttgttcggttgggccattctgatcccagaaggatggcaaggcccagaaatacataaaccgtcggcgttgaggcacttgtcccaccgggcctggtttaatttcgatgtaactacacattcgtagtcggtgagactaaggctctgttcgttatgaggagataggggagattgattctcgttttccgcgtgcacgcttttcaaactactaaacggtgcgttttttgcaaaaaaatttctataggaaagttgctttaaaaatcatattaatccatttttgaaatttaaaatagttaatactcaattaatcatgagttaatggctcacctcgttttgcgtatctccccaatctcctcaatccccttctcctcaaacacaccttaatagaagtgagtgatagcggagtacattgttgtgtccagccaatatatatagtgtacatccatttctagcgattatgccgtttgtcactggattctagttgtgtggccttgccgctgtggatggctttatgccgacggtgacgttgaagtgccggaacacggcggcccaccggcggttgttcttgagcctgtgcacggcgatggtgttgggccggaactcgtccatgtcccagttgatgtcgtacatccgcggcttgaggttgtaccggttccgtcccctgccgccggcgttgagccacctgccgacgaggcggtcctcgtgcccgcgcgtgccgctgcgacgcacgatgtcctcgttggcggacacccagcgcgcgacgtcccaggacacgacgtagcccatgccgtgcatgaacggcatcgggtcgtcgccgacggcgtagccccggccgaggtagacgtcctccgcggcttgccgcggagctcgtcggcgagcgccgccacgcggaggtacgtgtcgtcgtcggccttcatgacgtagtcgtaggggcacggcgcgaacaggcgcggcacggaggagaggtacgcgtgcgtcttgccgtcgttcatgttctcggtactgcagccgtcgagcaccaggatgtcgccgtgccgcgccgcctccgccgccaccagcaccgcgtccgcggcgtccgtcacgtcgcacagcacgaaccgcacgtccacctgcgcccccggcgcgggctgcagcgcgtacgccaggcgcaggatgccgcgccgctcgtaccggctcggcgtggtcagcacccccacgaggagtcggaactccggctccctcgcggccgtcgtctcagcacctagaccgccgtcgttgttagtgttgtcgacgacgggacgggagcgcggagcactgaggcagccggagacggagaggacaacaaggctcgacagcgccatggctacgagtccgaggggtaggaggaggcggaggcacagcgagcaaaacgaggtggccggaaagcgcgacgacgtggcctgcttcatggctcccgaatcccaaccggcgaaacgagacgacgagacgaacgaaatggcctggttacggggtgttgcattgcgcagttatccagcttatgaagcagcggaagatgacgggtggacgtcacactcattcattacatgtcaattataacgaaaaaaaataacaagatagatcaacatctaatatatcaattcacaaacatgtgtttttacaagttgtaacaaagataacaaatttaattgcaaatatacctatactaattttgagttttatttattattcttgttacaattcgtaaaggttgaattttaacttgcatctatattgcatattgatgtatcttatcatatttttttatttttttcgtaattatttaaatggcatacaataaacgggagaacatccacccatgtgattaaaagagtttcctggcatgatgatggaggtggattttaaactctcgagagaatacctcctcattaatcgtatgttattcaaataattatgatgtttttttaaaaaaataaaagtttgtattaacacgtgatatatcagttaattaaaattcaacttttaccagcaagaaaaaacattaaactacagctagttaacgtatattcataacgtatattcatagttgaatttgttttttgcattgcaatatgtactagttaaattttaccttgcatgtttatgaagtaatttatcatatattaatttatctttttttattttaaaaataaatcataactatttgagtggcatgcaagttcttaaatgtttataatagttccgtgataatgtccatacaatttgatgataggagaaggctaagtcggacagagctcctctaacgtaaaatcagagagacgtgggtcgctgataggtgggtctcacctttatgggcccacacgtaagtgaccacgtccctctgactttctgactttatgataggagatgcttctagcttccggctcagtcacagtcacacagtaccacgaacgaaagtggtttgactatatactaattgcaaaagcaacaaacaacgatttgttatgatgtatacgtaccacatagtagtactacatctgaaaaaatctgcccaaaaagttatgaagatggagattaagtaaggacatctaaaacaagaaaatcatttgaaaatgataaattaaatttaaattactacaaacctgaaaaaatagatttatttaaatattttagagcaacaactatacataaagtttttttttacgaaatcacggtttaaccgtttgaaaaatatgctaataaaaattgagataaattttgtattttaatatgaaacggattatgaagcttaggacgagatatgcggcccgtgcaactgcaagcgaaaaggaaaaatcgtgaaaaaaataaaaattccaaaagtcgaaaaatacacccactaccggttcgccgtcgtccttaagccttcgcagccactgtcgacgtcgtcctcctcctgtcacggtgaggaggcaccgggagggccacagccgacggatcagggtgggggagggcaccggcctgcggatccaggcgggggagggccgccgccagcggatcggagcaggggagggcaaccaccggcggatccaggcgggagagggccgccgccgtcgcccatgccccccagtgccgccgccgtagtctgtgtcgtggggtggtgcctgctcccagcgcctgctcgtcggccgcaccgcccgttgcccagtgcctcccgctcggtgagagaaagagagagagaggagacgaagagaaagagagggagaggagaaaatgagagaaagatagaggtgaaggaagagagagggggaaatattagagaggagaaagaggagaggataagaggtgaaaattttgaagtggtgaggagggaaaaactgtaataaagagaagataattttgcatgcgaatctttaagagatccgcatgcagatctttaagaggcccgcatgtgaatagacttatttttacatgcgaccccttaagagacccgtctgtaaaaatagaattttacatgcgggtctcttagggagtcgtacgttaaaatggaggtcgatttttgcagacgccgttagttacggttcatctgcaatctaaaggggtcctcgtacagaaagattgttttcctaccagtgttatttaggagtttgagaataaatgcgtgtgcgcggaaaacaagaaaggtgagttgggaaaaaagagggaagaacacagcctacaacaataaatttcccatttgaaagaagaggtagcagagagatagaaacatgaacggagagatagtaatcacaaaataactcaaatcaagaaaaaaaatactcctatatgacaacatatttttttaagtagaactgttacgattcgacgtgagcgcgctgagcaagagaagggtgttgcagtggagtggaatgtccggttggccaagcttgtaacacaattaaacaagcctggcctctgcatgtgcatgtgctcgcttttaatttgcttgatatcgactcgctcgtactagttttacactattcatcctatttcgtcttatttaaaatttttttataattactatttttattattattagatgataaaaacatgaataatattttatgtatgactaatttttttaaaatttttcataaattttttaaataaaatgaaaagttaaacattggacacggattttcacggctacatttattttgggatagaggtagtatacgcttgggatcgatgaacaatcgaacatgttacgtacactggtcacctcaccgcccgttcctacggatcgagaaatgtttaatttgcagctttacgtatacaacaatcaaaagaatacaaatctcacgaaccgaagttgactcggctcaacaaaaaaaattcaattgcggtaaaaactcacgagatcgatatatcgatcaacctaaatcaccgggtagaacggcttgagcgcggcggtgaagttgaagtactggagcgtcctcgcccaccggcggttgtccttgagctggtgcacggcgatggtgtccggtatgaactcgtgcgagcacgggtgcctcccggggaagttgtacatggccggcttcacgtccacccggttcctgcccctgccgccgcgtcggagccacgagtagagcgtccggtcctccggcccgcccgtcctcccctcgatctccgccgccgccgccacgatccactccacgaggtcccacgacagcaggtaccccatgccggacatgtactcgttcgagccgcggacgtagtcgcacggcaccatgcacccgtagtagaggtcgcgccgcggcgctcgcgacagcgactcggcgagctccggcagccggaagaaggtgtcgtcgtcggccttcatgacgaagtcgtaggcggcttcgccgccgccgaagaggcgcggcacgctggagaagtaggcgtgggtcttgccgttgtccatgttctccgggcagtcgagctccaccacgtcgccgtacgccatcgcctccagggacaccaggacgcggtcctccggcgagccgacgcggcagaagacgaaccggacgtccacgcgcgccctcgacgccaccgccggctgctggagggcgtacaccatccggagcaggtgccgccgctcgtaccgcgccgggagggtcagcacgccgatcagcagccggaactccggggccgcctgcacgccaccgccgccgccgccgccttgatgatcgccgcatgcggcggcgccggccagcgaggcctgcagggcgaactcgttggggtagacgaccaagagaagggcggcgaggagtgcgacggggagcaggaggagcgccgcggcggggacgggcggcagcggcagcctctgcggcttcatggcagaatgcgtgcgtacacggtgtgtggctgtggcccaaacgaagttggttttggcagaggcagaaatggtggtttttctggggatttttgcagcaggttcacgcggtgcggagggaacacacgatcgagtacaggctgctgcatatttgcagcggagtagagagcacatacgctgtgaagaagtatagtgcaagcatatactcccttagtctcataatattaaaaccttagactggatggaacgtttcatagtacaacgaatatggacagatgcatgtccagatttgttgtactatgaaacatcacatccaattctagattgtaatattatgggacgaagagagtaacaagtcttcttcgcctttgcgtggaatatagttgtggacttgtggagctgtggtggactggtggtggcagaggaaccttggtagtagtatttggtttctcagaagtccattggccgggccatgcttcgattcctggatggcaggccatatcatttgcatgaaaaagggtccaggttttaacgattcacaagtaatcaaagacggcatgacacgtagctttctagactttttaccgaggaaacctgcacatgctcatcgcctcatccgtagcacattgccatttgccagtgcgcccagcgcagcccagcccagagctccaaaaataccaaaccaaccaggcaaggctgtgccgactgccgaaatccatcacggcgcaaaactcgcaaagctcgcgccgcgcatagtccaaaccgcgaaaatttcgctctcccaccacgaaatccccaaatttccccgcgcggtctccactctacactccccgaaaccaacctcgccgatccgcgcctccctcaatccaacggcccacgctgcactcctcaccactcacgcggatcgctccccatccgacggctccccactccccactcccccacccaaatcctatataacatcgccctcacctatctccccaatacagatcaaccaaaaatcgccaccaaaaatccccaattccatcgtcgtcgatgtcggggcgcggcaagggagggaagggtctcggcaagggcggggcgaagcggcaccggaaggtgctccgcgacaacatccaggggatcacgaagccggcgatccggaggctggcgaggaggggcggggtgaagcgcatctcggggctcatctacgaggagacccgcggggtgctcaagatcttcctcgagaacgtcatccgcgacgccgtcacctacaccgagcacgcccgccgcaagaccgtcaccgccatggacgtcgtctacgccctcaagcgccagggccgcaccctctacggcttcggcggctaggagccttttgcattgtgtttgtcttgttaggaatctgcttgtttcggatgtagccctgtatcctgtaatgaagaaaatgctagcagtaaaacttgtttgaattcacctatgaatctagtgcgaaattctgcaatcacaaattcttcagattaattttgctgggacatgtattgaattacgaacaaactgctaatttgaccggtagtttgagacataaaccaaggaaaatctgaagaactttgaacttgctgtagttcagttctcccattcgagagcgaaggctgactcgaacgacgcacggtcgaacaccgcagggccgaccccggtgtcgccgaccagcagccgcatgagctcgccgacggtgtcgaagtaccagtcgcacgggccgtggctggcgtccttcaccgccacctgcatcatggcacgctgcgcggccaccagcgctggccccagcggcgggaggtcggcgcagacgaacagcttcccctccggaaaccgcgcccccgacgcgaacggtgccgccgccgcaccgacggcgaagaacgcgccgctcagcgagcgcgacaggccgtgaacgcggagccggaggtcctcgtgggacgcgccgagcagggcgcggacggcggacaccgccgccgcgtgagggacccagcggagcgcggacgcggcggccacggcgggggccgggttgtagccgcggaagcgagactggaactcgacgttggagaagaacacccagtgggacgagaaggccgacctgaacagcccggcgtcgccgaccagcagccgcatgacgtcgcggacggcgtcgtagtagcagtcgcacgcggcgtggtccgcttcctccgccgcgacacgcaccatcgtgcgctgcgcgtcccgcagcgccggcccgagcggcggcacgtcggcgcagacgagcaccgccccctcgttccccgcgccagcgaagaagacggcgctgagcgagcgcgagagctggtgcgcgcggaggcggaggtcgtggtgggaggcgccgagcagggcgcggacggcggagaccgccgcggcgtaagggacccagcggagcccggaggacgccgggccgtggggctcgacgtcgtcgtcgtcgtcgtcgtcatcggtggtggaggtggagtacccatcatcctcctcgctggcggcggcgagttcgctcccccggtccaccccgtgagccaccacaaccatgctggtatcgaacgtaatggcgtggcgtcgtgcggttactcttgtgcgtagagggagctgtgactcctgggctgttgatcactccatggaccatgttccatcccgttgcgacttgcgacccaggggcggagctataacgtggtccgtgtggtccatggaccaccatagaattctggtccatggcccattacctctatgcgctacttaaaaatatagatggcactttgacgctttgttttttcgccaattcaaccaccgcgtcgggcatcgggcgtcggcgcgtcgcttcgtttccatcgcaattgtcgtttccaattttcgagcgcgcaagtcgacgagtcacgacgaccactgtccattgaggcactaacgagtgagttgtgacgtcgccacgtcggcggccggcgactgcgccaccgcgggcagcgaccgcaccagcgcgcagtgccacaggccagcagcaaccagcagggagaaagcaatcagcagcactccattcatcaggaggcacgcaacaccaaagcacagcaaacagcacgttagcaaacagcactatagtaggttctcaacttctcatctgcttctctctttctcctccctaacagtagggtttttttttctttaggtttaaatgttcaatctcatttcaattttaggatatccggtcgattggaattggaatggtaaattcaaattaaaccttacaatcctatataatctatggtagatttgctgaacaagttgagttagaccaccatatcttaaaaacctgggtacgccactgttgcgaccgttggtcccgagacgacgcgcgagcctcgaggcagagagagagtgcaggactctcatctgtcatttccatttcatgtgcagaagtcagcttttacaggtactttctcggtttctccttctggttgggttggcatcgtctgtctcggggtgatacggcaaacttcgccgttttttcatctcgagcatccaaacgtgaccgataactggatgagcaaatgttcgatggttgtgtttagttcacgctaaaagttaaaagtttgattgaaattaaaattgagcaaattgtttagtttcaacttttctgtcacaccaaatgtttggacacatgtatggagtattaaatgtggacgaaaaaaaaccaattgcacagttcgactgtaaattgctagacgaatcttttaagcctaattacactatgatttgacaatgtgatgctacagtaaacatttgctaatgacggattaattaggcttaataaattcgtctcgcagtttacaggcggaacctgtaatttgttttgttattagtctacgtttaatacatgaaatgtgtctccgtatacttaaaaaattttggcacacgaactaaacacagccttggacgttaccaggtttacgattcctagatgatctttcgttttgggctctgacggaatgacagttttcacgaaattcggtggaaagccaaaattccgaacaaaactccggcgattccgaacaaattttataaaccaaaatttaaatacaaatttcttaagtttaccgataagcttgcgaaaaccgataggctttggtgaaattctgagcgaaatcatcaaaatttcaatcgataactagaaaaagaggtaaacagattttttttccttttttaattctttattattttctttcctattgtaaatttcagtaaatacacggaatacatcaattttttcgaaaatttatatcccaataagttctatgaatatcatactatttataagattttatttgatttttttcttttttatcaattcaaatttaaatttggataaaactcatcgaaatctcagacggcttctactttgagccttgtcgaaacctcaaaaattcgcgggattcgaccggttttcgtcggaattgtaatccctggacgttactaatctacgcatcagttgaatggagaatctaataattaataagaagaagaaatgtgcaagtatgagcatgttagaaataacaacagaacaacactgaggtggtgatagaatctcctaaaagataaagattaacaatttcacgtaaaacgaggtggtaataacatgtgattaattgagttttaattattacaaaattaaaaaatggattaataacaactttcatatagaaagttttcgcacgaaatataccgtttagcaattcaaaaagcatgccacgagtacctaaaaatttatctaatttatttttacagaaaagaataggcctgaagtcatacaactaactgaacaaattatggaataaaaaagaaagctggctaggatcaatgtcaaggaaggccctaagcgtcggatgcccgatgctttgggaaaaaatcgggcgctgacgctagcatgacgtcagcgcccgatttacgtgtaaaaactactttaaactgatttttctcttaaattacttatctaaatcatgatccgattgcaccattaaattcgttgcaattaaatcttcaaaacaagaccatacatggatatattccgatgaaaaaaaattttagcttattattgaattttttttaaatgttgcacgatgttccactggatatatcggaattgtttcactaattagataaaaaatgtttcactcgtttaaattgggtgttgtttcaccttatataaaaataatgttttactacctccgtcccaaaatgtaactatttctagcatagcactttgtcccaaaataaagctatttttctacctaccttctcctctcaaccaatcacaaccattctttttcacctactttctctttttaaccaatcacacatcttcttcaatcattctcacctactttcttaatacccgtgccaaccttaaaaatgcttacattttgggacggagaaagtagcaaatagcgaaacaatgttttagttcactgcaacatttgatccatacatagtgaaacattataaatacactaggtgaaacatttttcgttggaacaaaaaataaaacgaattcccttaatagggggtttccaaaatctgtgagttttttttgttgcaatggagtatttcagttcactgcaacattagatttatacatagtgaaacattgtgggtacattaggtgaaacatttttggtggaataaaaaataaaccgaattcccttaatagggggtttccaaaatatgtgatttttttttcaatagagtatatggtgaagatatgtagcaagtagtagggacatatggtggggtcccagtagaagcacatggacacgttgtggaggggggaggaggggagcgcccgattttctccccctcccctgggcgaccgagcggcagcattttcgcaatgtcaacgcacgtagaattaaatcttaacctttttttacattcggacaaaaatcttaacctttttctaattgaagtaaatcttaatttaagccagtaggaattgaaaggatgtcatggttgtaattggtgctgattttctgaattcatttgatcccgaaataggtactgcaggatgatgttaggtgcttgtcagatacggtggttggaatccagccataggtcatgtatggatgctctgatgaagcaacggcaaagtttgccgtatcagcccaaaggccgacgatgcctggttagaaattcatgatgagtgtttggatgactttcataagtgtgataagatttctttttttaaaaatattggtaaatccaatattttttttataaatattggcaaatccaatatttctctttagtgactctaaatagtatagcatgattttatttagattatggcttggattttgatgaccttacctttgacaagtttgacgaagaaaacatgataaaccttggcaattatagattgtgaaccaaacaaccactcattgtttcatgctttattttgttttgccacttaggagtaggctttttatgaaaattcagtatcccatactttattttgtttcccatttaggagtaggccttttctactactccctctcccaaaacataaaagattttgattggatgggacatattctagtgctgtaaatctgaacctctgtattcatgatctgctatactctccatggaaaaaaaaatgatctgctatactcaaatataatcatgatcgagaaaaaaaaatcatgtacagttacataaacacatacgtacagccagtatacaaacgcaaatgaaaactaaggcacacagcacgcgttcaactctgatcaatatctgatcaacaagcgagttcatgcgtacacctcgcaacatttccactcgtgtatagtgacagccgaaactctttcgccatccaagatatatccaacgaaacccccctacctgtcctctcgacttcctccgatccgctacgggtagctagggtcgttcggattcaagtgaagaagtcgtacttgaccggcgtgccggtgggatcgatccatggctttgcgtgcaggaagttgtcgacggtgaacttggtcgcgtccgccttgctgatcaccttcttgtaccccggccacgcgacgcgccccgccgtgtcggcgccgggccccttgttggcgtactcggcgtagtagagcgtcttgagcgcgaactcgccgttccacggcatgtacccggccttgtcgatgatcgccgggatgtcggactccatgatgacggtgcgggagaactcgcgccacggccggccgaggtagttgcggatggggggaagcttggcgtcggtgagcgccggctcggcgttgaactcgcacttctggagcacgaaccccgtggcctcgcggccgtcggcgcggccctgcgccgtggcgatgttctgctggttgtccatggggcggcggagcgtgaggacgcagttctggaacacggcggcggcgtcgccgaagacgaagtcgatggtgcccgtgatgacgcagttgcggtagaactgcgccttggagtgcgcgtacagcgtgtcctggaacccgtccatccagcagttgaggaacaccgacttgtccgactgcaccagcagcgccaccgcctggtgcttcgccgcccccgccgtgttctggaaccccatcccgatcgccatgaacccgtccccttgcgccgctgcaaaaatcgccatcgatcacattgcgcgtcaatggcggaagctctgatattggtttataccgaaggttgctgtcttgaaggtggtgaggccgtcggcgaagttcttgctgccggtgacgatggacttcctggagccgtcgccgtacatggtgacactcgccatcttcttggtgatggtcacgtactcggcgtacacgccctccttcacgtagatcacgtaccttccactgtaggtcttgggcatggcggcgagagcttcgttgatggtcttgaacttgccgctgccgtccttggcgacgatgacgttcggcgtgaggttgttcttgaacccgccgcccttgagcaccctccggtcgccgtcgggcacccactccgggatgccgtcctcggcgagggccaggtgggggtccgctgctcctcctccgttgtcttcttccccggcgagcagccggcgttgggagcccttgagggcggagaggaacgaggaggccttctcgatgagcgccagggcgttgctggtgaactccctgccgttgttgaacgactccttgaccttgtccctgaactcgccgtcggggaagccgtcgatgcaggtctccatgttggcgatcaccgcgctcagccagacgcggagctggaagccctgtttgaggccgtccttgccgtcgatgcccttgagcgtgcagttgaggtcgtccttggcgtcgtcgaagagctccttgcagtcggcgacggcggccttcacgcgcgggtcgttgctcatgatcaggtcggcgcggncgaacgcctggtcgaccgcgccgccgatcacgtccacggcggtgcggatgatgtccttgggcgacgacacgctggcgttcgccgccttgccgatgctcgtggcgcacgagtccgcgaagtccgtctgcgcgcacatcatcttgatgctcttcgacacggcgcgcaggtccgctttgccgccgccgccgccgccgtcttcgtcgtctccacctccgccgcctttcgatttccccttcgacgagcccttggagccgccttcgtcctcctcggatttcttcccgctgtacgtgatggcggcggcgcccatgacgatgaggataatgatgatggacaccgtgccgagggcgatcatgatgcgcctgcgctgctgccgcgccttctcggcgcggcgccgctcggtgagcgggccgaagtcgccgaacgccgacgacatggccggaatctatccctagctcttctcttcttcccccactcctctttctcctcctccttattgactgcttcttctttctctctcacactctctgcctgacatcaccattggcagagaggacggaggaggaagaaggccggaggcattggagaacgagggttcattcatgtggccgcgctgacgcttcccgggaaaaaagaagggcccggagacgattgtggaagctatgtttagaagctttggcatgcaacaatggccgccattctcggacgctcccgccattttcttggaggggtcaatgtactctcttctctgcgagaaagctccatgaaaattttggaatacaaggattcttctgcgtcaactagacattcaaccagaaagtatagaagaattcttctacgtcgactagagattcaactagaaaagaaaatagagacggcggaggcggcgctgcgtgccgccagaatcagggaagagcggtaggactcaaactacatattttacaaacgaaaaatatactgcctccgttttttttttatagatgacgttattgactttttctcacatgtttgaccattcgtcttattcaaaatttttatgcaaatgtataagatataaatcacatttaaaatactataagtgataaaacaactcataacaaaataaattataattacgtaaattttttgaataagacaaatagtcaaatatgtgagaaaaagttaacggcgtcatctattaaaaaatgaacacagtatgtgtttttagcgatctaaaagcaaatactggaaaacaaacaacgacaaaaaactttaaaattaactctaaatctaaaattaaaattttaaaactttgctcgtataagtataagcgaaaagatgagtagtctcgatccgatctgacgatcgaagtgacccaaatgggctactttcataggcccatctgggtgacttgggccgttgaggaagcccatcgcgccgtccccgacacggaccaggcggcccagttgataagccgaccgaactgagccgccgggctgcggcgtccccatcgtcggcgtccctttcttcctcatcaacggcgagcttccaattatgcaaccagggtataactataaattctatcgtttctcgggagagaggaaagagcaatgatttgtcgagctgtccctgcctcctcctgtccatcactctactgttagaacgagatgaaacctctacctcgagtggtccagcagcagctgcccctgtggaattggttctccggtccgctttcacttccaacagggagcacagcatcagtgatgcctaccgcctcatcaatctgccggggggaagattaggcggagaacgcgtcaagcatccaaatccatgtcagtatcagtgtagcaagatcgagcggcagaggcctctggttggaatgtaacgggtcgaatctactccctccatcccaaaataagtgcagttttgcacattcatgttcaacgtttgaccgtttgtcttatttaaaaattttttatgattaatatttttattgctattagatgataaaacgtgaatattactttatgtgtgactaaatattttcaaaatttttacaaatttttcaaataagacggacgatcaaacgttgggcacgaatatccacagctgcacttattttgggacggaggtagtactactgatggattcttgcacgagtgagaatctttgatcttgatgaggagcttcttgatcaatgatcatcctctggaattttcagatttgcagttgaaagatgcgcggtttttctttttttttggaggagtttcttttgcgtggcctatagattcgtgcctgcttcaagtctgcatcgtccagttgtaagtacaatgggggtgttgcatcttttcgtgtttggccaaaagagaggaaaagggtaaaggagattcgtgcctactaataacttctgcagttcagcgattctctagaggtgacaagtcacaactcaaaagtgagcggcaacttggccaattctcgcagcagaatagcagtgtaggtgtagcacagtagcacatgctggttttactgaactgaacaatgagcaagaaaaacgtagaaaaaccaaatcattttaagatttaagtggatgatcagcttaaattactgcaacatctgggatccagaagagaataggagatgataaagttcctgtcaggaagtatatcatgcacattaagatttacgatcatgaataaaaacgttgagcacaaacactggatcctaccaccgtattggtgcgtcggaaagcaaagtaaaccacttaaagagaaaattctagatttatgggtgatgtgtgattaggactgcaggattatcttgatccaactggtgataacgcactcgtctgacttttttcccgggatttgctgaggaaaaaccacggttagattccacaattgccgcactaactccattgttcatctctagttttactgaccacactaactctgtcaccgtgtctgttccatgatcggttttagcaagctcatgctttccttgaaagaacaaacaagagcagagaagagaaaagcaaggcatcaactacagctttaattctcactcccacaaaataccaatcattcatcagcttagctagctagctagcacaatcaacattgctgtcaaattcccagcagcatcagttgcatcatcatctttgttaaaaaaaaattgtatcattatcatcttttttttaaaaaataatgaaattgatttacatcccggtctctctaccataagacacataaccaacgagttttgatacctaaaaatcaaaccatataaggtgaagggaaaaaccctcaactccctctaaacaagttcaattgaaaaaacattccaaaatcaaataaattctagcatgtcattcggtatatgctaagtcagccaaagtggaataaaagaaacttggctaccaattccaataaccgaaaattgaccatttttaccatcatttggccccaatttcagatattaagaagataattatatacaatactaattacttaattagtgaccagtgatcacttgtgtgtgtggacagagtggctttaaata

SEQ ID NO: 24699 - DNA, 4964 bp, Oryza sativa
ggcgacggccatggcgatcacggtatcatcagtatccaccagcagcgccttcgtgtcgtcgggctgcagatcgtcctcgcccagacgaggcaccaccaccgccagcagcacggccatgtcgtcctcaagcagatgcagatggtgtccccgccgccggcggcgcgtcaccggcggcggcggcgtccttgcggtgacttcttgagcgcgtgctccctgtgcaggctggagctcggccccgacaaggacgtgtacatgtacaggtacgtacgtacggcaacggcacgccgacgacatggccggcggcgggccggcggctagctggagctcgatcgatcgccgcctgaattttggggtggtttgcttggatgcaggggtgaacaggggttctgcagcgaggagtgcaggtggcagcagatcatgacggacgaggcgagggagcgggacgccatggccaagaaggagcggctaggcctgcatcatcggacgccgcggccgccgccggcggcgatccgcggcggctcgccgaggagactactcgccgtagcctagcacgagcgaagtacagtatgctatacttgatgagaccgtgacccatgcttggatgatatatgatcaaaagaaaattttctactgtactctctgtaaaatatggagaaatcgatgtaattaagaaaaacttgataaggaggaaggagagagagagagagagagagccaggttttgagtaatttgaggcaaatttgaggaaacgtatacgcataactgcatgcagtttcatatttcaaatgaacacgaaatgtttggtgggggaaagaagctttccaggtctcatgggtacaagtgtgcaacttaactgtaacctgctcctgcttatgtgcaaaaaacctggtaaattctggataaattagtttcctgtgcgtgtaaatttcatctcgattatttttagaggatgcgaatgattctcagtcgagtagaactcgtggaatgattctgaacacaagtaaaaaagctctgatgaatcctggggcatctgccatcttttgctttcgagatgccgaggtgccagaaatttgatgccaaagacgaagtggagggaacgaaaggatggtggccgtggcatcaagcaccttgatcgatggggagacagtgagacaccaatcgaatcaaagtggaatcttctcttgctagaaaacgaccaacaaaaattggaagcagctagaagcctataaacattggtcaaggaagagggagcagcctaagagaggcagacagcgattgctacattttagtgccacgaaaatctattaggacagttcgaaaagaagccatcacgttcgtggtgaagactaaaaacacttagatcctgtttagataggactaaaacttttaaatccctatcacatcggatgtttggacactaattataaatattaaacgtagactattaataaaacccatccataatcttggactaattcgcgagacgaatctattgagcctaattaattcatgattagcctatgtagtgctacagtaaacattctctaattatggattaattaggcttaaaaaatttgtctcgcaaattagctttcatttatgtaattaattttgtaagtagtctatatttaatactctaaattagtgtttaaatacagatactaaagttaagtctctggatccaaacaccaccttatattaatcagagaaaaaattaagtaaaaaataatttagaaataattgaaattcagaaaaaaagaaatattgaaagaacatcacataaaaaacccaataaaagattaattaaactcagaataaagaataaaataaattctgaaattagaaaaagaaaaaaatgagatttaaataataatataatttataaataactaaaattcggaattaaaaataagaaataatagaagagagtccatatgtataatccaatatgagttgaactaaaatttttaataaataaataaattttggaattacaaaaataaaaataagattcataataatataatttagaaataactgaatttcagaattaaaaataataaataacagaaaaagagtccacatagaatccaacacaagattaattaaaattcaacataaaaaatatatcattacaatttgacataaattaaagatatagctctacttaccctttaaatttcatttatataaaaaaattatacaaaattaccccctccttccttctccctctctcctctcttacccaagattcagttgaaaccacggtcgccggcgacggagctagcagcggcgtggttaggttaatccattgacaggggcgattgaaccgtgaaagagattgacagattagaaagagggagaaggaagaagggagtgaagaaaggaggaggccggggtatagtttagtacaaattttttgataaatgcattgaagaggtataagtatggcatatctttaatttctatcaaattgtaacggcatatgtctttaaataaacgaataataatgctattttttccaaatcaaagaagtcctaatgggtatgatatagttattttttttaatgtgaggactggtgagcccttatattttctttttttttataggtgaagccattaacttttggacacataatttgaccattcgtcttattttagaaactttgtgcaaatgaataagatataaatcatgtttaaagtttttttagtgataaaataactcacaacaaaataaactgtaattacatactctctcgtcccataaaaaaccaacctagtactatatgtgacacatactagtacaatgaatctggacatatgtatgtctagattcgttatactagaatatatcacatccggttctaaattcacttttctgaaacggatgggactcaaaagttatatcatagtcatcatctattaaaatacagatgtagcatgcatccagttgctttctcaaatttcaggcgccagcccgatcatatcgatgagaaagcagagaacaccatgcaccgccgaacattgacgccgcgcgccgaaccaccgcggcgcgctccgtctccgtctgccacacgtacaacgcggcacgacgtacgcgcgcccacacacaccccgcgatcgattgacacgggtccgacgccccagtgtgtctgtgttccccccctacccgggacgtgtcacctgcatacgctgcctagcgaccgcccaagaagctctcgcgtcgtcgcccatttagcagcgcacgcgcacgcacacgaacgcgccgtgcagcatcagcaggcagcagcagcagcttcctcctcctcctcctcatcttcaccgacgacaccgcacgctccgcttgctcgtctcgccggcgccatgtcgtacaaccattcgccgtccatcaccgcagagaccataaaccagaaggtacgtggctacgtgcgtcgttgcgttcctccgtcgatctgaacctcagctcgcgatcgatcgatcgatcgatggctagctcgatcgagttttattaactgatcaaatatgtgcgcattctcattcgtcttgaaggtcaggatcttcacctacgagccatgtggggagattgtccgccacgcacgggtaactataaatctcatcaacctacactgagggcaaagccaatgtttgaagcttacaattacttgagatgagacccataaatagttaatttttgttgtagtatgttatacaatacttatgatcataagataagggcaatgtatacgggttaagtagtccttatggtacggttaggccctgtcacaatagacttcagttatctctatttctatcgctacaaacatgggatgggaatcatgggacccactaacaaataaaaatgtattccctccgtttcaaaatgtttgacaccgttgactttttagcacatctttgaccgttcgtcttattaaaaaaattgtgaaatatgtaaaactatatgtgtacatgaaagtatatttaacaatgaatcaaatgatatgaaaagaatacataattacttacattttttgaataagacgaatggtcgaacacgtactgaaaagtcaacggtattaaacattttaaaacggagggagtagtaagtaacatcaaacacaaaagatgaagaggggagcaaaggagagagatattcttatttcttatgggtagtcgttagttactccatggatagctcatgctattgactcccataaagactccttccacaatatatacattggtacattgaaacatgagctcactacataccctatcttattataagttgatgtccactatctcctaaaattcaacatgtaagtgtaccatatcatcaccactagtaaaatataacctttcagtgatggtgggagtatagatggccaaaaggcctgaggcccgacgggccgccccacggcacaacattttggcccgtgcctccccccccccccccccaccggcacgttgggcaggcctaggccaggcccgacacacaaagaatagggagtaaaaatagacatattatatgccacggttcaagaatagggacgcaaaatatagttattttagctatatatatgtcaacctaaagaggagggagaaaaaatagacttattttatgtcacagcccaaagaggagggaagaaaaatagattcatttaaaaaaaggcatgatgtgccacccgtgccttcgggccggcacggcatggcccgactactggggggccgtgcctgggccggaggtgcagcccatgagccggcatggcccggcacaaagtgctgaccgggccgtgccggcccgatggccggtgggtcatgcctagccatgcctgggccgggccaggctgggcgggccttatggctatctataggtgggagagagcaaaggagttgtcttttcgttaagtagcgctagattaaatttatctcagattccaattagccatcctccaaccccattgcat

SEQ ID NO: 24700 - DNA, 2859 bp, Oryza sativa
atttctgcttgatggcttgaaggctccaattattgcgtttaggttctttctctgtgtgacaatccatctctcatagacagagacgaagctcgtgcattattcaggttggaccaaatagacaaacagtataaccttactttccctatgtaatttccaaagttttagctttgtacagtctttttcccactatattcaatgaaatgggcacagtctggtgccgattcgttttaaaaaaaacttagcatgtgctctctccatttgatattgtaagacatttttattttttttctaagtcatttttttaagaacattaaccaagtttatgaaaaaaatgtgatagcattttcaacacaatatagatatagtatcaaaatatattcaatgctagatttagtgaaactaatttggtgtttgtagatgttgctatgtttttctatgatatggttaaacttaaggaagtttgatttttaaaaaagtcaaaatgtctcataatataaaacggagggaatatatatcaagcattgcaaattattttcacttcttgtgtggcaataaatttttggcctaaaaagaaaatgactgacattctttcgatctacaaatgcagtccatgtgcgctaaaacgagccaggaagattattgaatcacttccaggcagagattctggttcctatactagtagtcaggtactgtaaatacatgctccttatttacaaataacaaaaaaaaagttttttacttggcgttgtcctaggatgatttttaacctttttcattgtgcattacacttgttattacatatatcagggagtcagaggtttgcgtgaagcagttgctgatggaatagctgccagagatggttttccatcaaaaccagataacatttttctgacagatggagcaagttcagcagtaatgctctgcatttccaagctccattagtacagaatgatgcttggtctatctggatatcttcaacttaattaccctcctttttcagatcaacatgatgatgcaaatactcatcaggtcccatgaagatggcattttgtgcccgctgcctgaatatcccttatactctgcttctattattcttcatggtggaacaatggtacggtgctagcatttggatttttcgagaaagtgtccattgatatgccaatggtatctcaaacttccaataacaacttggagtatcatgccaaaaaaaaaaaaacacggagggctaacctcaccttatacagttctttttcctttttttaatgtttcttccctatttcttattttatttcccttttgccttttcgcagtctctttttgaactctttgactcaccatcattacaatggttataagttagagtatgcaccttttccacgtccgaaaaacacttccaagtggatgaatgttcaagtgttattatatgcaagaaataacgaaggatctaaattgaattgaaggtaccgtataatcttactgaagacagtatttgggggcttgagattttcgaagtcaagaggtgtttagaggacgcccgtgcatcgggtttgactattagagctatggtggtcataaatcccggcaatcctactggccaggtgtgctgaatattttttattttatcttacagtttcatgacttgatagaataatgaaggaaaatcaaaagatttctcgagaattactgcaacctatatcctatatagcaccacataatgctagtaagtatctaactgttattcaggtcattaaagaagtttcttgttccacatttgcaacccttgttgtaggtactgtctataaccaaccaggaggagattgtggaattctgtaggaaagaagggttggttattcttgctgatgaggttcacacttgctgattgtttgatatttcaaattagattcatcgtgttgaaaaaaaaaactcggttatatcgaaggtaattgtcttgcagattagtgatgtaaatgcatttacaggtataccaagaaaatgtctatacagagaataagaggttcaattccttcaaaaaggtggccagatcacttggttatgatcaccatgacctctctatagtgtcatttcactcggtctctatgggtaagtcttcatgtcaaccagagtatcttccaaaaatttgtcttctgatttctgaattttgcaggatactatggagaatgtggtagaaggggaggctacatggagatttgtggttttggagatgatgtgatcgatgagatgtacaagttggcttctctaactatttgtcccaacatagctggccaaatccttatcagccttgttatggatccacctaaggtttcctaaaagatgctttcgctacaattttcgtctttagcatattagtatcttcacaatctggttgtacaatagaagtactttgacggaggtttgctgaacttttttatccttgtgaagttctcccttgactcttgcctataaaatttaagaaacagaatgttttttttagtttataggagaaccatagagaacttattacaccttacaccttcaaacttgtgttttaactgacttgtgggtgagatttgcagctaggggatgaggcttttgagattttcatggtcgagaaggaagagacttattcatctctactcaagcgcgcaaaggtcaggaacaaaatacacatatcagcaaatttatatcagatatatccaatttgcatcacacaatgtcaaaaaccagaatttgtgtgctagaaaaaaaatcctcttctcccaccatgattaacccgcgtgtgtcatggtttgaaacttcgtttcgaaatttccgaaatttcggtaatccccccccccccccaccggcaagctcatatctcgc

SEQ ID NO: 24701 - DNA, 2120 bp, Oryza sativa
cctttttgtctcaagctggtgcatgcatttgcctgactaggatttggtctcctcctgcaaaaaggtttccgggacattgcacatccggtgcaccatcctccccggcgaggagacgatcacggcgatggttcccagccttcaggcgttccatgaggcgttcatggacgagtttcgcggctgatcgattgagctttgtgaagcaacagaatttggcagatcacaagatcggcagctgtgccatgccttgagttacacaggagatacagctagcggagctgttgcttgtcgtctggcttgcttagcttcctgtttgtgtaatgtccatcggtccattggactccatgcatgtgtgccgtattataactgcaagtgcgttttagttatgcgcctatatgcaaaactcgtggaattggtgttagtgtttgatcagtttgttactatgatgtaaggagttatcagactacgatctagtactgtatggctgtaataatcaagtaatcaactaccccttgagggacaagtcctatttgtattgtattacaccttagtccactgtgtgtacaggctaaaatgggttggattaattccgaaaaaaaagaactactccttccctccctttagtcagatagtaaaataaatatgactattaatcaattttaaaacacttagtttaaaaacaaacaaactgatgtgaattaatcgtttaaagcacttgcatagcaccataaactttgtccaaaaaataaatattgtcctaagaccagagaaaaaatcgaacgtagtaccattccctctccgcataaccaaaaacagaaatgtttacatttttaaatggttggaatgtacttttatcagaggatgtaatacaatatcacggaattattgtattttaaagaatgaaataaggctctatttatcagttagtgtcaacaacaacaaaaaaagcctgagtgcaaattaagcacaatccttgtgtcaggagaaacaggagatacaaccaaaacatatatcaacaggctcttaacttaatttgaccagctaccgtagtagcttagctgtgttgtcagttgttacattctatataaaacttaagcttcctacgctgaaccaaattaatagggtaatacagatcacaacactacacaccttcctctctctatcagcagcctgcctattctctactctactgggctcttctccccgaaacacagggcaaaaaagaagaaaggaaaactaaacatttcgtgatacagacactgtattcgcaaagccattagctaccttttggggaggaggtttcttcttatagtttgctagactacagtgagggcagatgtattccagcccatctgtctttgcataatcctgtaaagaaggtgactcatataagatcaagctatggccaatagaaaaggactgaactaaaagttttttttttctaaccttgaaagtgcctaggccttgtcgtctgtcacaaccaaaatgtgcccattcaccacacaaaccacagttcacccaatctccaggagcgctactggaattacacaggagatggtgttagattcgattatgacaaaccataatcgcaaattggggaaccaaaggaggcatagaaagggatgtcctcaaacctgtggcaaagcaaacagcattccccgtctacatcatcatgagctagctcatattccagtaaatatgtttcgtaatgtcttttcagtgtgtttccaacaccctaaacattttaggacaaatgtgtacagttaacatttaacatttcacttaacagaatttgttgaaggtagtagcagagataaataaggtggcactttatgatgaatttacatcaaaatgaactactactccgtatatatatttcaacatagatgaaagacaatgatgctgaagctgagtagtccatcaattagttagtagcttttaccagactcaccaacaaaggaaatgataaatttaatacgtgaaagtagtgtgaacaaaatggcataaagacatatgttagtggcactaagataacagcaaaactatagcatgctaaaagtggcacaggttaagatccaataagaaaatgccttcaaggttacgcattctatttgtcacagtag

SEQ ID NO: 24702 - DNA, 26213 bp, Oryza sativa
tgcttagatgtgatgacgttgttaagggccttcatagggcaacgtggctttcagcccgagcactccaccttggagactcagcatcacgtccgcgtctgaacctatcaaaacctgaagatcacgcgttcaaagaggatcatgtgttctttgaagttatcgagagcgtgtagcgtggagagggagagatcttggccgcactacggaggtgaggcttgtggcttccaatacgtgactttgggtatactccctcctaccctaaatgtttgacgccgttgaattttttaaatatgtttgaccattcgtcttattcaaatcttttgtaaaatgtgtaaaactatatgtatacataaaagtatatttaacaataaatcaaatgataggaaaagaattaacaattacttagattttttgaataagacgaacgggcaaacattttttaaaaagtcaacggcgtcaaacattttggaatggaggtaatatttattgaagcttctacttgatgacacatgcaccatagaccttgtatctttcatgggtcttatgcctacgtggcacctgggaccaaacaggtttgtgtctggttactggtcaaacaaaaaaaaaccagtgctcctatctgataaagacatcgaaaagttggcatagccctagaaaagtcttccctagaaggggtctcagggtcataggtaggataagtacactgttaggatactaactcttctagtggagcggccacggcaaccacaactttaggtttcaaagcagctataatggcggtggatctacttgagcggcccctggtgctagcggattggggacggctgaccgatgagcttcctacagtctggcagtaagctgcccttccccgtgccgcactcattctctcgtcccaaacactatttggtcgcttccttgggagttgttcctccacgtgttcctgcccttggcctggtgagggcaagtgctatggtagatgtgactatcacctccaaatttatctattttattcaataatgaattaagaggcaactcatacaatgtatcacctctagtatacaaatattaatatatctaatactctcacatcctttttgaaatttgtgtggaggttgcctcttgatttaggggtggctcatcatctctctcctcacttctctcatccacatcatcactcaattcaatgtggtattcttagggacaacatatgggtcattatagtactcgccctgaggccattgtgcctctgcggggatagaacagaggctagggtggacatgtagatccaacatggcaagctagggatactcactatatccccgctctgtgcatggcctatggaggattccaagagagattttgattacatgctttagaatatctttgcgtgagcatgtggggcgccactgagagatccctactcagtacgtgatcaatattagaacaataacgtgatctatgcattccatgttgggggtttacctcatcttttgtcagtgaaattcgagcactaacgagacgtcgatttttttcttttaaaaaaaattcaaacaaacaaaatgcactcaagaattaaggggaagaccggtggagatatgttggcagtgtttaccccatgaaactagatatttttttgcgaacgcagaccgctggatttcccaatcaagtttttaaaaatcaaactaaatttcaatatttttgataaaactaaaccagatttccgatttcacaaaaaccaaaaaaaaaaactgttaaccctgtgtttttttctcaagaatggtttggtgaacctcgcatgttcgaggtcgcttttgaagttttgataatagggttgcactcggtgcagtgtgcccttcgcagttcactgttgcgttgtggccgatggtgatcgattatggtatctataacgttgaatatttcttctgtcaaatcccctggtagagaagtgtattttagtcccagtttgtaaccccatatagttccagtttactatcaatccggaactaaagatcgctatctttagtcccgggtgaaataaccaaagatggcccccttttcttttttttcctttttattttctcccgaatcaagtggcatgcaaatcaccaaatcaaaccccaaattcccaaatcaaagtaacatccgaaattcacatcacaaatcttaaagttacttatacacacaaatcaaatacatcacaaatcctaaaaaataacacacaaatcaaatacatcacagatcctaaaaaattacacacaaatcaaatacatcacagattcatacaataaatcacaaatttatacatatcagtgaatcacatattattaaaaaaacgaaaaacgaagccgctgccgccgctcgccacggccgccggctgccgggcgcagcctcaccggcctccggccgcctgtccgccgcccaccggcccgacggataggaaggggaggagggggaggagaggaggaggtggaggagaggaagagagggtagatttgtaggagtggaggaggagaagaagagaggcctgtaggagtggaggaggagaagagggagagattcgatctatgtgttgcgattgtggaggagaggataagtaatagggattatatattacgcgttcacttgatctttatattagtcccggttggtattactaaccgggactaaagtggtaatctttagtcccggttgatgccaccaactgagactaaagatcctcggcctcctaacatacatctgactggggataaaccgatctttagtcccggttgggaatcccaaccggaactaaaaatcataaaatggcagtagggttttcaaccgggattaaaaatcatttttagtcccggttctttttggaaccggactattgtggttttagattgatccagcaaatatcatttctccactaatgctagttcgataacgtatgcctcttcttacctgattctaagaggcagtgtatttagatgaccattgtcagtgttaagttactcgaactaccccgggacagagatgacagaattagaataatatatatttgcacccagattagcaatgatctatctctgggcagccgttatcacaagcccagctgaagccaaaatgacaacttgaattgctgcccaaagtccctgtccgccgtacattttggctcgtcccaacgaaggcgacggcttagatgcgtcccccgtcaattacatgtactatctccttgcaattgccaattgcaagcaaaacgacagggaattggtacccgtttgtttacccctccgtctaaaaaaagctcaatcctaactacgaatctggacacgtatatgtctagatttatagctagagtttatctttttttttttaaggacagactggtatgtcggacgaccttttctatcgccgagcagtaagatatatccaatcacactgatcgagaagtttactgttatctcgtagaagtggctgccattcactggatccgtcttcagctaatcgctagtgatgcctcaagttggtaagccgaacacgtacgagagcaaagttgccagacaaatttaaggcttggcgtttcgtcaaagctgctggattaattagcttagctctgctacttgcgtcgagttgtcccatccatccaagcttggtcaccactaccataatgtacgtactgtttgatgtgctcgacacggcgggaggatcaattcgttttgtattgttgattgggtgatcgatcgtttttcgttaggtgcagtttggcgagagaaatgttactacgtgctgcaggtagcacgcactcgaaaatatctgaagatacatatcacttgtcctcgtgatcacctcatctatgcgatgatgatgatgattcataaaaggttttgctacatgtttgttcacaaattttctttaagactttattaaatataaatactacatctatattttaatgtatgacgccgttgatttttttttcaatgtttgaccattcgttttattcaaaaaaattatgtaattatcacttattttattgtgacttgattcatcatcaaatgttctttaagcatgacataaatattttcatatttgcataaaaaaattgaataaaatgaatggtcaaacgttggttgaaaagtcaacggcgtcatacattaaaatacgaagggagtacaacgtaacttgatataattacaaagtaactctgatgtaattttaaaccgttagatttactttaatatttgtataagaatggatggaaaaaatcacagtgcaggcacaggtaaggggatttgatcccgtgaccttcgcttggtacaaatagcgtgttacgatgtgatttttgaaagttacgtgtgagttatactatagttaaatacaagttacaatatataattaaagaattatgttatacttacgtctgatttttttagagaaaattcaacgttaaatgtgtagacagccccatcataaagggcaccaaaaagcgcagcgttgggagccgtccgatcgcggaaatcaccggtcgacagagatttttttttttggctcgatggcgtgtgacgatccgatccaaccgcgcctccctcacccgcgttacgccgctgcatatacacgttgtccgtatccccgcgctggcggataaggaaaaaaaattggagggactcaattacactgtttctttaaccttcagctatttagaaaactttagtttatcatttatatgatgaaaaaattaaagggggtattccagaggtatctataggtctggtgggtgtaggggggactcgagtccccctgcacctacgttggatccgccctgctcgtgtctcatcaaacaaccttagccactgcgcgcgtccgccggcgtacgtacgcacgtacgttagccgcctcgcgcgccaccgccacgcgacgatttccacctccacgcggccgcgtactgccgcgcccggtacgcggtcgagaaaaaataaaaccacagccgagaggaggagacggcgcaaacgcgcgtggcgcgcgcacgccgcacgtacgtcatcgcgcgcgcgtcgctagctagcgaaacggcgccccccacccctcgcgcctcggctcctcccgcggctgcgcggccgcggacgcgcgcgtgcagcgaaaaacggcgcggcgcacgcagcaaacacgcattctgcacgcacgcacgggcacggcaacggcgaggcccccacggcggtcaggtacgaggaaacaggggcaaagcgagcaaatccaccccccaagctagtgacgacatcatatcagtggaggagggggtaataaccgagcgaacgaatgatcggtgcgtgcaagtagggcacaaacggccgggagcccaattgcaggtaaagaacgaaagaaaccggcaagcctttttccactctctgcgtgtggacagggaatgaatcatcatgactgtactacggtgtacgtgtctatactccacgcacccaaacaaacaaaaaggtgacgtgtcgtgtgtgcgccttggcagtggcgaatctagcgccaacttggtactaccacctctccctacgccctcctagtgcatactactacagacgatcgaccggtagccaaccaggccaggcaccaccgcgacacagttcttttcgtcatcctcttttccctttcctgttccttttaagaaagagctgagcaacagtactgcggtagcacatgaggaagcccagctctcgctgattaacacaatcgctgacagattagcagtaagtgtatataagccattcaatctcctcaattattttcatcaggtcctaatccagctgaattaattgcatcaccacaccagcagtatgcatgcagtgtgagtaggggtccagtattccaatactactcactccatcccacaaataacatatttttatgattatgttgtttgactatccgtcttatttaaaaaaattttaaaaaatagttacgcataaagtattatttatgttttatcatctaatataaataaaaatattaatttctaaaaaaataaataagatgaagagttataaaagttgtatcttaaaaactgataaatgtattttttatgagacaaaggaagtagtagtccataaggaatcgtctaattgttgctttgtatgatagtgtctatggaaaggagaaaagaaaaggagggagagatctacccaacaaattgctggtcactagggagaggtgagggcgatgtggcaggggggaggagggagggggggttgagttcagtgaacctggggagggagtgggatccatggcacggcaaacggacgccggaggtaggcatcaacgctggcaagtagcagccaaccgaagcactcatcgatgattatatttgcacctgtcaatgcggtccctttctgacccccagcacaagtgctttgtgtcctcatcgtcgatgttcacctctctcctgcataggagcaacatcttgcttgcttagggagcttaaaattctgataagtatatcgtgagatcgaagccagctagtgagaatatgaaaaaaaaactgggttttccaacttttgagttctggttattttttttggatttcgtaactataaattcttagaatcattgaaaaaaatctaatatgtttgagaaatctacaggtttgaaaagaaactacatatgttaaaagttcatccaaaacaggcctttctttgattacgtcttcagaaatcagaaatatctccatgacaagagggtgtgggggctgtgggcgttcgccgagacaggctagaacgcatgaactttacctgattctcgtacgtggttcatttccttcgttccaaaggagacttcaaacactgaattcctgtactctcaattgtcaccgtattgttctattatgattttccgttgttgcaaacggctcctaaatacgagacatgaacattcgtcatgcactagaagtccaagtgcttacgaatgattttttttttcttagctgattcagattctgaatttttgttcaaagatccgtgtaaactctgccgtgccgatcactgccctggtaaaataatttaaggccggagctagagactttctgagagaaccacttggcggaaaatggtgatcagtgaaaaggttagaatccttaaaccacgatgcaactgaacccaggccgtctctgtcactgactatctctcatggcaataattcggagaggaccacacccaatggcaagagccagaggagaaattcccaacttggccaatttgctccctagttttcgatttgttgtcagaagcaaaatctcgagatataatccgccatgaagcagactcgccctggagcctgaaatttctgccttaagccataaacattggctacttgctgaaaagtacatcactaagcatcgcaaagacgaaaaagataagctaacagctacgagtaaatgaaagactttgtggttgcagatccgaatgccaatatgataaagcaaaaccaggaaccaaatccagtgtgcaaatgatcttatttaagctttttttttcaggtcacagtcctgtagccaatcaactgccccagtattaaatcttcagcatcaaagtataaatatagcacgaaagaaaagccaaaaatcagcttatgccttaaccaccgactgctcagaatatacattgctggaatgagacacaaatcattcccaacaagtaagctgggcaagacaaataagctcatacatcgttaacatgtaagcttgattctgtcttgatttctctagatttctgatgtcacacactagctgttgacattccagaaaagcagaactgcacaggaaagcgaaagcgagcactttcaaagttgcagattgtagatacgcaatatgagcacaactatataacttaataagcacattacagcacacacatggccaaggcagttatttgaatcagtctccaacatacttcaaatcatagaccacaccatacagcaaacatagtataaacattgtcatagagagtacagctgatagcagcttgtaatattctagcattactttggtagcatccctctacaaaacatagcagacatcaccagctcttcatcttggccatacacattcaacctgacaagaaaaccatatcccattttacaacatatgtaatctgtacatgaaaatgtatctacaagaaatcaaaatagtaggtagtgtggagtgccttacatggtttgctagtgacagaccacactgaccagaacatttcgtctcctcagtaggcaccagctgccatgagcagctcatcaaggctccagatgccctcgttgcttgccccgtcttgtgtagcatcattttgcagaaggttgtccattgattcatctgagctgctctcaacataaggtaatggcaaatacttcatctcgggatcgaaggtgggcatgttttgtgcgagattaggcatgccatttccctggggcacggcgataccatagttgttcctcattctctttggcgctccacctgtcaggtaagcaggttcaccatatgctggcatggcagcattaggaacgaagactgaagtgtagtctggggtcagggtgtcatcctcccaaccaaagtctgaagagccaaatgagttgctgctcgtatcagagagcatgttcatctcgaatgtctcagtggaagcaagaggtttgactggaggcatgagatcaacaggctctgccggctttgcaggcacctttgcaagcattgcaaacaaatcattgtctgaactgtttagctgaaagaaagcatcatcgccacaggtcttcagaggtggagctagtttctcttgcttggcagcgttttgcttcagggagagcttctgagcaacagctggttcatcaggaaagttgaccttggctttcttgccacggatcttgcgggcttcagcgtcatatgccctagctgcctcctcagcagtgttatatgttccaagccaaacacggacacccttgctggggtctcggatttcagctgcccatttgccccagggacgctggcggatccccctgtactgattcttcctcttgtgctttgctgatctagcagtaggtccatcatgttggacaagctttgtagtcaacatcccatctacacgaaagcttatttgttagtatacatctcaacaaacagatttggaagaaggatataaaggaaatatcatagctataaactgtaagttacacaatacactctcaagcaacatgaagatgaagttatactggatgttcacagacaggttgagacatgaatcagttcaattgatcacttctcaaataaatcatgacatatataagaaatcttaaagtccatgaatatagcaagcatatggtgtaagcactgtcaaagtgtagaactactcacttgccctatgattaacaatagataataatctacatatactgtctacagtagtcatctactcacctgcaacgttctatccaggaatgagatctcagatgcataaaactaacgaggtccctctgagggtatattttgatgtagctcaaaatcaactgtacaaactactaaattagagttccttatattcgttagtttttttaaaaaaataaaataattctttaaattcgtatcccttgaatgagagtacgagatcaccaacaaagttcaaattaacaacctaaagtttcttctgtttagaattaacaagaaaaaaaaaagaagggagctttgacagcatcacctaaagtttcttctgtttagaattaacaagaaaaaaaagaagggagctttgacatgcatctaacaatctatataaagagtggaacaactaaagaacccatcattttttttatttttagataatactacagaacccatcatactctgaaaactaacagctaaatatgataaatcaagagtacaagaaaaaaatatgcctcaaagagtactccaaatctcaagatgagatggtggcacagatgaaactttgccaaggaaaaaaaaaaggccattaagttttgcgtaattacactactagatcacttattagaaacaaagcaagtaaatccagcgacagaagagcatccataaacataggttaatccaagaacatactacaactctacaaagccaaattttctctaatccaacacaaatattagtgattaaaacacataatgacactgcgaaatcacaagaataaatatctaaaactcatcactctctctttgctactccaattcaggaaaaagaaagaagagtagaatctaggacaaagttgaattcctatttcgtagtgtaaattcgtaaaccaccaaacctacagatgctatccatctaaaagaaccagattcgctagcaagtttacgtacacaggtattaatgaagttaagaactaataacacgctagattgaagaaaaaaaaactatactacacagtgccgtcccatggttcgcatcaagatcaaatccatggcgcaacctgatgaagccccatttggcagctaccccatgagaccccaattctctccccaaatcacacgaagaacgcaagaaacggacccagaaaaaaggccgcatcttgcgctcgtctaacgagaaaagggggaaaaagagctagctttatgcgttattttttcacctgcagttgggggcgccgccttggccgcggcacggacgacgaacctcgccgccgccggcggggggaccaccacgaccacgtcgtcgtcgtcctcctcctcctcgccgccgcccccctccgcctcgtcgtcgctcatgccacgctcgaactcgcggaagtcggcctcaaagtcctcctccgccgccgccgccttccccttccgcagcatccccggccacagcacgtcggccgtgaccctcctgccctgctgcttcttggccaccgcagccgccgccgccgcagcggccgacggcgggatgaacccggagatgattgctccgccgcacatggccgctaataagctacagatcaagaaaccaagaaagataaatcgagaagaagaacgcagtgaacacttgctgccgctcacgcggagggcgcagtgggagaggaagccgggggtggtgggtggtggccgctacttataaccgcggatgcagctgacgcgctactcgacagcgacggcgtaatcaaataaaaagaaaagaaaaaaaaatggaggaagaggaggaggaggacgaggacgaggagtggaggagacgagctctcgcgtcgcctcggtccttttttaccccgcctaattaccaacctcctcttctgtccatgatgtcactacaaccactaatcaaaagattcctcggtaaaaacaaaagattcggccacgaacagggatgaacaggagagggacggtgtggtaagaatttttctccgaggagatattttgggatgatttttactatcagctttttggagcgaaccagatcatgtgacgaactgccttgcatggtgtcatcacggtatcatcctcctcttttggtttttcttttctttctttttttttttgagatttgggaaatgtttgctgcgagaaggaacgcaagatgtgtggggcgagagccataaccgatgggcggcaccgaattcgctggtgctgttttttgtttttgtgttcttgcttcgattggtggtttggactttggaggattgcttcgctcaagatcgacaaaaagaaaaaaaagaaaagagaaaaaaaaagttggtttggagtttggggttgattgaattggtttgacgtttttaatcatttgacgatgctttcatttgcacggttgcatagtgttttgtttttttccctcttttgttttttaaagacgattatggaacggaatatcacaccaaaatcaatgtgggaactgatcagcagtgtatcagaccccattttgatcatacacatcggggtatctctaagtttgtcttaaatgactttttcttcgtttcagggtatttttcatttggctttcaaataaaagtaaaagtttttatatttgtatcattatcaatttgaaatcgaagaccggaaagtaaacttagatgaaaaataaatcctataatcaaagcttcaaatttcaaaatttggaagctggtggtcagctaaaaattagatgatgagagtataagattaatcggattagctagatatgtcaaatgcgatttattttaccaattagttgtgttttcgttcctgcgagcctaccaagcttaccaattagtgaagtttgtgtgatttggtttgtcctatgtaaccatttgctttgtttcaggttacggtttctacagaaactatgagaacaataacgtaaagctaaaacagtctcataaaacttccatatacacctaatagataagatgatttggatttatcctatgtgactattgtttcgtttcgggctctataacatggttcaacaaaaaccatgagaacaataacgtagcgctaaaacaatctcataaaacttccatatacacctaatagataaggtgattttgtttatcctatgtgactattgtttcgttctaggttctataacacggttcagcaaaaaccatgagaacaataatgtaacgctaaaacaatctcataaaacttccatatactcctaatagataaggtgatttggtttatcctacgtgactattgcttcgttccgggttcttctataacacggttcagcaaaaaccatgagaacaataacgtaacgctaaaacaatctcataaaacttccatatacacctaatagataaggtgatttggtttatcctacgtgactattgcttcgttctggttctatagcacggttcaacaaaacccatgagaacaataatgtaacgctaaaacaatctcataaaacttccatgtacgccctaacacctaagacgatttggtttatcctacgttactagtgctttgttccagttttttataagacggttctatgacaaccatgagaacaataatataaagctaaaacaatctcataaaacattcatatacacctaatgtgattaggtttatcttacgtggttattgctttgtttcaggttttatgacatggttctacgaaaatccaagagaacaataacgtgaagtaaaaaaaaatctatgaagcttccatatacacctaagatatgagatactctgtattggacaaccatacaaaattttgcgatgaaacttaaattcatagcatgatattaaaatgacaaacaacaaacaaaaatacagaagccaggattaataatgtactccctcttcaaaaatataagagattttgggtggatgggacacatcctagttccttgtccagattcattatattaggatatgtcacatcatccaaaatctcttatattttggaacggatggagtactaatttatttgtcgtttgtccatgttaagaacaggtacaataatgggcggtagtagttctacgtaggattttgtgatgatttggaggagagctgggaagagagagagagagagagtgagtcggcgactaatttgtcatcgggttgcacgcgccgctcgaggagactgtggggcccgccttgcgctgcctcttctcgtcgccaactcctgcatcgggcatgcctttcgctgcttgcctccgtcgccaactgccgcagccactggaccgccgcccctcagcctcgccggcaccgacgcacgcccgccgctatctcccacatccggcgcacggcccctgtcacccccgcctgcacaatcgccgccgtcttctgcctccgccgtgcgggccagccgccgctgcccccgccgcctgccgcacggcagccaccgtcttccgatgtccgccgcatggtcgccgccgtcttccgcctcagccgcgcgacccggtcgccgctgcccccgtcacccgccgcacagccattgtcgtcttctgcctccgccgcgcggcctggccgccgctgtcttccacctcagttacgcggcccagctgccgccatcttccgcctccgccaccatttcctacgtccgccgccgccgtctttcatcatcgatgacaggaatcgagggaataggagaagaagacatgaactatgaggggatagaagagagagagaatgtgaggtaggagaagatggtgggtcccacgaatcaataaaatatttgtgttatagtatttctattgtattgacattagctatactgcttaagctgtttttttttggagccaacagcgggttatattattgaccttcctctaacatgaatgaaagttgtttgctattttgtgtgtggttgtctaaatcatttctctatatgtgggatcgtttttagaatttttctaatttttaacatggaagtttccaagtttctaatactagtcattaattatctcatttacatatttttaacttataaactgctcatgggtaacttctaaaatatcctggttgctttcttaaaaaaaaatcctggttgcacaattgcacgtcgccctcacatatccttttttatttcttttttgtacatgctcacatcttctcgatgcatcatgtatgtaacacaataaaaagaattcggcatggtgcatgcatttccctctccatttacccaatggattagcattatcacgagtaagtttctctatgttcatccaccatgcatgagaacaactactcgtccgctgtaaatcacatgtcgatcgaaggtttctttcccgggtcaaaaaacgttctcgttcatctcatggccttggtaatctcaacaagctgtacaaaactgccactggcacacagactggagtactggacgtatcacaccgaccaaggaggatcatatggctacgatcctagaagtgtctgcacgtaacaaattttggctgtttttgtgacaaactatcggcttttgatctttcccttcgtagtattttgttggattatactccttattttccaaaattcttttttatttttttgtgtgtgtgggtgtgatgagtcgtatcgtgactgaatggtacattcacgcatggatgctcatctacattgcacgccacatttatgaaatcgacaaaagcagctactcctcctgcctaaattgcaggccgtgtcgtattcagaaactgtataaaaacatgtggacagatctttttttgagaacatgtggacagatctgacatgctcctgattagctgtactgtgcattgtataatatactccctccgtcctataatataagggattttgtgtttttctttcaacgtttgatcattcgtcttatttaattttttttttgtaaatataaaaaacaaaaaattgtgcttaaaatactgtagataataaagtaagtcacaaataaaataaataataatttcaaaaatttttgaataagatgagtgatcaaacgttgcaaacaaaaactcaaaatcccttatattatggaacggatggagtagtactaggggtgtgtagttccacgctaaaattgaaagtacgaagaaatttggaacgatgtgacggaaaaattggaagtttgtgtgtagaaaagttcgatgtgacgtttttttttcaaactttggttctaaacacggcttatggttgtgtttttcgtgtgccaatttttttcttaagtatacgatcacacatttgtagtattaaacgtaaactaataacaaaacaaattaaagattctgcctgtaaactgcgaaacgaatttattaagtctaattaatctatcattagcaaatgtttattgtagtatcacattgtcaaatcatggcgtaattaggctcaaaagattcgtctcgtgatttacatgcaaactgtgcaattggttttttcgtccacatttaatactcaatgcatgtgtccaaacatttgatctgatggaaaagttggatgtttgaagaaaacatggcctagtacatatgtacacccttcgtcccagaatatagtaacctagaaccggatgggacatatcctagtactacgaccccctgtctagatttatagtactaggatacgtcacgtccggtcgtagattgctagctatattatgggacggagggagtacatacagagaggaatttttgactcaattgtttagttttttcttatatttttgcctctgtaagcaaactgagcaagcgatagattgacttcgattacaaaacaatactggagtacatactctgaacatcttggattcagttgcagatagtgtttatctgtttatctctccaatatacaatagttctaacaagatcatggcagatactgcacattattgcatgaaagttcagcccatccctctggtttgttggacaagaccatttcctcatattttgcagctcaagggccaaattagcagaggtcgtcattgtatttcttattcttctttccaaccaacttgatttttatatctatactgtatttgtgtgaaggaaatgtcacccaactgaaccatacttcgctgcacttctgtgtccgtatccggacgtcacctttatttttggctttgtcttggtttggcatttcgcatggcacttgggagcaccacagaaatctgtacttctttagttaattatatgtcatcaaacttcatgatacattgaatggaacaagatgctgaatttggactatgcattagtgtgtacaatataatttgtttaaagaagtgatgaattccattggagcaattataaatcacaccctttgcctgacgaagagtccgagaatgtgtggtgctgtggacaccagcacagtgtacatttagatgtcttggatggcaccagggccgtccattcacgagggttcccccgtacaaagttctaacggagacataaactcaattgacgaaataaaatgataataatttatacgcgagtccatgtagtattttgtagcaactaggaagatagctcgcgcatttgcgcgggcatgtgtgttaagttgtttcaaaaacaattataacaaattaaatttaaataaaaagtaagatgcttttttttttaattgaatgttcattctctctcttttttttctgtagaaatcttgaaaaggttatattgctaaatgctgattaatctatccgtcatgctggtcctcccttttcaatggggctatctttatgatagaattttacttgtatatgctataggtgcatagtttcagcgaaaaacaattagaggtaatgtccttacctaatgaaatataaacctaacctagctactactacatttgtttactcatgcccaatctgaataaatttgtaattgcatacattcagtatatatgaaattcttacgctctctggatttttaaatgtccccaaaagcatcaatgaattaactttattgcacaattttcaatagggtatttagtagtttaaaattaaataatgatccaattttcaaggtttcaaacaaccaaattttgcaagcaaggacaacacaaaaatatatgtgaacaacccttatgcatctagttgttgtattattcaaaccttaatttaaggattaataaaattaaattcatttctaattcagatcaagaaaaaaataattttgctaaccctaaggcatataaatattaaaactattattatacgttgccaaaattaaataaatcttagaggattaaataaactcatataatacaatttattatagctaaatcgattgcaatgttttgatttgaatttgcatggattgagatatatcgatatgtaatgttagcattagcttatttatattgtaaatagaggacatgcaaatttgtataagagaatgcagactaacctcatcatttaatatttggttggatcagataaagtcaactcatatatatactctctctatctgggctcatagctaagattcagcaatgcaataagtgtcaataaagtttactataaacactaaaatattaatcggattcagtaagacaatcaattaatgcgcgcgttaatgaggcttatgacaaaattaaatttgaatattatgcctaaaattaagtggtagacggcatgctagttgatagcgagttgtgtgtggttacttcatcgttcataggatttgtcagcctaatctcttaacggtgctcaaagatctatagtgtgtgtatatttatcgaaataagtgtgtatgtgtgtgtatatgaggcacatttgtgcctcggaaaaaaagtaataggagttaaaataaatgcatgcatgtgggatcagatcaatggctttaattgattgaaagtattttgctaaaccaaatagtatacttactcatcaccaagataaagcagctaccagagaaactttacattgatcgatcatgcatcttgtcgcattatctgctgctatactttggccacatgcgttgctatggatgcccatgcaagtagccaagctgccaacgtgttgcacgaatgcatgactaattttcgtcttctcctgtatgcatcaaatcccatagatagttatttttttagataatcagagataattatagatgaaatcaaatcttgattgaggaaacaacaccagagttgtaaaggatttgtatgtagtggtcatcggtcctcttgcactcgccgcgtcaatatgaatagatcgatgaagctagggcgcgctggcatacaccgagagatcgtcatggccagccggccgccgtcgctaggtttggaacaggctccatcgctgtttaaaaatcccacctgcgccgtgttcctatctactaatggctgaacgattgatacaaggataatgatcggttgttgattggatgcatccacatatacgtactacgtatgtatgtacataacaaataattataggatagatctaatggttaaaaaaaatgggtccaccaaattaaatcaaaatagatggttggatgttttgctttcttttttagaatttataggactttctttaatttattagagcgccacgtgtcggcttaagaacgtttgtaaaatgccacgtggcggcttgagagcgtttgtaggaagtttaatggacttttagtatataatagatagataatagataatagatagatgatagatagatagaagatagatagataatagatagaagatagatagataatagaagatagatagatagatagatagatagataatagatagatagatagatagatagatagatagatagatagatagatagatagatagatgtaaaatataacacaatttagttatgaactattatccaatattcgataatttagttcgaatcaaagcattaatcaaaattagagaactagactacacaagaaaaaggatttggtggatctgatgcctgataggtgactacgtttgctgttggagttttggggtgttacggtgcgccgtgctctctgcaggcgtgttgcacaactagccagatagagattaaggcacggcagcacgtcggcaagtagccgagcacagagcgcgtcaaccgccaaggatgatccagctacaatgtactcccttcgtccctaaatataagaaattttggtttgacgtgacatattctagtacaataaatctgattaggcttcatgggcatgttcggctgccggcagccccggcacgaacagtgccgcactcactatgcgcagccgcagccacagccgtagccgtcgcagtcggcctgccaaacaagccccatattcagattcattatattaggatatgtcacatccaaccaaagccccttatatttagagacggagggagtagtcaataatcaatcgagaaaacaaatcaatgctcttgatcctaggaaatcaatcggagtaacaaagttcacaaatggtttacaaaaccaatggtaatcgtgcttaccatcgagtataagtaaagataaaaccacaatagccacaccaaattcagataaatttcaaatataatttaaatttttaatttgatatgatttcttacagtttgctgcggttaccgacgataacatacttattgtcgggacgaggtaactccatcccgacggcaaggaaaaacatacccttattccattcgctacttggtcttgttggcatacgtctattcatatacgcagttgataatttaaatgggggactctgaaattcgggagcctgtactgtcccatacttcactcgtccttgtagatgggcctaaatgacgcttgaaattatggaaaaataatactcaccataatgtaaggtaggagtggttcatagtacagtagtactattttcacaagactggtagttcaaagaatggtagggactagggagacgatgaatcgctgaaccgaacaaacctcttcctacttttgccgctaacataagacccggtcatccgagaaaatcgtcccacctcattcattttaaccacaaattttgacaatttgacactttgcaaaaactatttttacaaatgaactgctgccaaaacttatttcaaatatgacccttttgctcaacgccaaatcatgtggcgctgaatttagacacctcagagccacgtcagctagtgctgaatgccgtgccacgacggatgggagactaaatcagcgtgtaaacgtacattcagcgtcatgctatttggtgctgaggtgtttaagttcagcgtcacacgatttggcgttgagcaaaagggtcagatttaaaataagttttggcagcggttcatttgtaaaaatagtttttgcaaagggtcaaattgtcaaaaattatgcattttaacggtcttcagattttacatggacatggtcatacgagaagtaggtgtcaaagtacataggcccatctttttctcgccccaatcgtaacttcaattttacgaagatgaacagataaagagaaagcgacgagatcggtgagacgggacctcatcacaaatcatacagcccgtgaggacggacggacgcgcggttgagcgaatcaaagctcatccgcagcagagcgagtggcactgtggcatgtacaggcctacagtgtacaggagagagagaggaggttgaggcgatctctgcggctcccgttattacacgcgtgtgtcctgtcccctagcagcggtgcgggcgacttcctttcgttgcggcgacgcgacgcgcggtgggatgatactgggacggtggttttgtgttgtgccgcggacagaagaaccgcggcgatattgcggcggccgagcctgggcaggggctagggtggtagtagtacgagtagttcgtgggctgttttgccgacttcggttttgccgtgccgccgcagcgcgcgcgcggggaggcggcaacggcgatagcccctggtctcggtcgcccgccgccacacccgcggtcacgcaccaaattgcggcgccacgcgcccagcacacgcggctacggggaggggacgggaaaaggttgtgccgagtgccgacgcctgtgggggaatatctcgatttgactctcctaaacatataatctaatttatatccttgaagcacaataccgaacatcttaatcttttaactattaaaacatgtataatttaacttacttatcgattttggagagcggcttatgtcattctcactcttcccttttatctctctcctccttatctcccttcggcccctcctatctaactctcctgcactaccagcgccactacctccactgcaccgccagcgccactaccgccactcccccatctgccacttgcgaaggatggcctagatccaggtgcctgtggaggagtcgacgacagacattgccaaatcggggtcatcaagcccgccgagctcttccttggctgttgatctacattgacttttgcgccgacctgctccatcacgtcgcctctcataagtcataactggactagcgcactgccgtcggctgtatcttcatctcctgagctccgcgctattctccgtcctgacgactagccaccgtcttcgccatggggaccccgccactgcccagggagcgttgtctcatcctcggatccacgccatctctcttgaccagccgagcgcaccgtcatcaggctacatctccatccctcaagctccgcgccgttctccatcccaacgaccgctcgccgttttcgtcgtggggtcccctcccctcccaccgtctagggagaaccatctcctcggatccatgcccgggcctccaccctcgtcagctctgttgacacagtgataaaagtggagaaagtgtgtggaatagagaaggagaggaagagagagggggagtatgacaagtgggtccccactttattttttaatttttttttctgatgactagtatgagacgtgaatgccaacgctctcaatactgtcctaggagtaaaattgcaccgttttaaaatagttggaggggttttcaaaatatccggtatcgcggttgagtgacatacgaattgaattttacccataattgaggggcccgacttattcccgcacgtggccgtaatgttggtccgtcagttacactgggcctctctgctgtgtttcggggtcgcgagggccgtcgatggacggcccagtaggccagtgctgaaggcccacacagtttccccgattccccacccgtcacggcgccgtctgcagtaaacggcaaagtcctcccctccgtctccgtgtccgtcgacacgccgccaccgccacgggggttggggatttctttcccctcctccaagccaagccggacgcggacgccaccgccctcgccttcacctccatttatacctccggcgagcgccgcggcggcggcgacgcacgcatccttccttcctcctcccgcaccaccggcgaccggtaaaacggagagacccgtgggcgagcttgttcgaggcggggcaccaccaccatgtcggcccccgcggcggtggagcagcggctgcaggcgctgcggcagaagctggggaggaagcagcacttcgaggaggccgtcgccgacctcgccgccgcggtccgggaccaccacgccgccgcctcccccgccctccgcgatttggtaaatgaggccgacctcccctagccagcgccccccccccccctctctcacctcacgttacttcccgatttcctttcgttgcggcctgggttaggtccaacgtcgccgccgctgtggtaatgatgaatctaggttcgattggtccggtaatggagtagaattcttactctaaagtcatcatcaatgggcagaagaaattaaaatgatcttctctgggattgttaatcctattaaaatgatcttctctgggattgttaatcctatgaaaatgatcttctctgggattgttagtcctgtcgtgtcagtaaggaacacgtccttagaataactcatctcatcccaacgaaattgttccttttcttttctccaagtagcttgatatctaaatttataacaagaggctaaacgttacaagtaaataccaatcaaaatgcagtgaaatcagtacgtacccatcaaaatttacatattcttcaagctagcatggagcatggttaaattcaaagcaagcaataaaaagaatctgccggagtagtagtttattataatccaatgaatcggcttggtaagatgtgacgttaacgttaacatcgcccaattcacgggaatcaagaaaccgaaataacgatcaccatgaacgattggaattatttgtagacagaagtagcgatgagtgacagagtaatctggctcaggtgtttcctgtggctttatgcacactcaatcgagcaaatgaggaatgacatacatggacagaactatgctaacaaaagtgatttccttggataatactaatccttttgtttcattatcttctgatgaagtaatcctgttaatgtaaaaacttctgatttttttaagttaaggttaacttctgatgctgatgcttttttagttaaggtcgtcctcagggattccatttttgtgtaccagtataccacacccctacaatcagttgtttggattagcattcttttccatactctaccttcattaatatcatccatcatatcgacatatataatgctcatttagcacaatcttttgttctttggcagatgtattctacagtttgccgtgtggcaactgtccttcagactagatatacagcacctggattctggcgtgctggtctgaacctcttcttaggtacagagaagctggtaactaatccttcagaaaaggagcaactgaagactttcattctgagggcccgggagcatcttgatgagaaagagaacgaggaatccatgccaaacaacagggaaacaggtatgtcattaataattgaataggatgatgtgacattcatagacacatctgcatacttagattggctatactctaatgattattctggaggcaacctgtgatgcatatgcaattaaatttatttcttggtgaaattgataaacataggagttcttcaagtacatatttgtctgcagtgtattttggtgaaataaactttccttaaaatattcacccttataaatatctatttgctaagaagatgtaaacttttttttccagatacaagatttctttttgaagggcatcttacagtgggacctgaacctccacctcctgcctggcttgttgcccagaatttagcacgagaacttagcattttagctgaaccttctggagatcaaggtgcgaacaacaacggagagtccagggctgaggagatggcacctgctgctgctataatgaatttcttaaacaccatgacagtggatggagacctagaagccgctttggaagaatctctgcaggtaagaaagaacaattcttgagagaatcaatttatttggtatacttatttcattattttttcagccctgaacttctatgttagtttcttgttgcacttttgcacactgcaaactggagtagtatccaaactgtgcacaaccataggcttttggcccatgttaggtgctatagagaaacaagcaaatttgataaatttgttgaatgtcttgatcagtggtttgtaaaatgatttttcaattactagtctgctgcgcattcaagtgctgatcaagttgctaaaagtggagctcatcatgctttgatgcatgccaaatttcttcatgttattatgttattgcaattatcaacttggtttagacccacattctcaaatttatataagcttgtcacttgctacaacgagaaggatatacttgtatctcttatgattgtctagtaaccaccactgaaattcttcgaaaatggaaagcccgcatttcatcattttgtcattcagttcaatagggtaacaagatttgcatattgttatggatcttgaatttggaactactattttcagaatgtgatggcgaatcctaaggtgcctccagcttcaaaggaagtcgttgcgaatctaccagttgtaaccgtgacagaagaaatcatagctagattgggcaaagagactcagtgtgctgtttgccgggagagcttgctggtggacgacaagatgcaggagctaccgtgcaagcatcttttccaccctccatgcctcaagccatggctggtaatgtccacataacccctttgaatcatctgaaagtagcctcgacgcatcgttacaactcggtgtagctgaacattatacccatcatggttgtgttgtgttgcacgcaggacgagaacaactcctgcccgatctgccggcacgagctgaggacggacgaccatgtgtacgagagccggaaggagcgggagcgagaagaggaggaagacaggaagggcgccgcgaatgctgtcaggggtggggagttcatgtatgtctgaacatctgaatttcaaccgaacgtgattatctctctgtaacgatttcctgaaattcagagtgcactggagttgaaaattcatgtacaaacaacgtttgcttcggttcaccaccgtatcttcgttgaatgatactaccactatacagccagcttattacagcatcattgttcgttgatgtgcatgtgatgaagtacttgagttgagacattgttattcttttattccctttttacacacagtattcagtcgcgttagtctccttcgaatatgggggtggtgagataacggatgacgctgatgataactattcgatgatacaaatgaataaactaagcattgtaaagttaaattttattttaacaaggtttcctaaagaaatagaggactaagattttttttaagagagattgtaccgtcgagattgaacaaacgcgaactatattactactgtagccgttctacgagcttagtagcactc

SEQ ID NO: 24703 - DNA, 5118 bp, Oryza sativa
ggtatttctattaccgtacctcggcgataagaccggtaaccatggtaaccgcatcgtttatcagtaatgtaaaacctggtagtagtagcctagcagagtaggttgtgttggtggtcacttgaaaaattgcgattccatgggctgatgcccttacgtgggcccaccacccacccctgacgagtggggcccaccaggcagcgaccccatcacacgtgagaagtccagtccacagctcgctccatcgctgcgatttgcaacacggcgagacggatcaaacgggcgcctgcccccacgaactagacaagcagcaggtcaagcacccaacccaaaatcccagagaaaaacacacaaacaaaaacaacatacaactgcacacaccctgccgatgcagcgaacgtgtccaaataaattaaaaatcccccaatcgatcaatatacgctgcaccacaccacatactcaaaagaaagaaaagaaatccccccaatccccatttccagcgaaatctaatctaatcatctaaaaattcccttcccttcccttccgtccgagccagagcagtagtagtagtagaagtaatgaggaaaagaaaacgaaaagcgccaagaaaacaacgcaccaacacatccacagcagcagcagcagcagcaagcatcatcggctcaggcttcatcaggagaataggttagatgtgagaggaaggaaaaaaatccgaggaaaagtctcgagcccaccccccacatctccactgctgcagctttgcttgctcgagagaaagaaagagagaaagaaaataaaataaaaatctctcacaaatctctctctcgcagccgtcaaaatccaatcttggcgcatccccggccgcctactgttctcgccccccctctctggtaataattgtcaggctggtggttggtttgctgctgctaataatcgagtcttttcctcccaaggagaggcgttcaatttcttggtcaggatttgtggaggtttttcttggattcatttcgtcatctcgtcgcggagccaaagcttttggtttttttttttcctttggttggtcttggctcgatcgggatggatgcggggtgggttgggctcgcgtccaattcgcctccaccaccacaagtacgcttcttttttattgtttccggagtggggattgtagagagctatttcggcaatcgctagggctccgtgtgtgttctctctcgcccactttactctttttttttctatatcattattcccctttgccctccaaatcgaatcctctctcccctcctgcggcgccgcggggagggagcgatctggggagggggaagccgtcgattgactcgattctgtgtcgcgggggctccgattcggcctctgaattgcgccctggtatgtttgccccgcgtcgattcgtgggttcttgccgcggatttggttggatttatttaattttgtgtgatttgttcttgctgttgttgtagggttccatgagggcgtgaggtgaagttggggaagagagagagagagagagagaggggggtagggttgctgcggcggccatgtcgcaaatccagagcttctcgcggcagaactgcgtgctcctcgcggtgctgtgtgggaagcacgctgagaagcgtgcccaggcgaggtcggggctggaggcgaagcggctgcggccgtcgtacccgttcccggagctcagctcgtcggggagattggaggtgagctagcattctcggttggtgttgtggggggtggtgatttgttttgttgtgcgagctgaaaacgagggagattttcgagtgcaggtgcacacgctgttcaacccgacaccagagcagttcctcgaggcgcagcgcgtggttcagcccaacttcttgtacatccaggggcaacagcttgaggatgagaaggagattggctcgctcgtctggggggacaatgacgtatctgatccgcaggcgtttagttgtctcatcagcccgccatttccgaccatagtaagcacaaaccttttgtcgagcgtatgcaatatttgtactctttagttgaaagagcagtagagcaacctttcctttgtctactattagctgttaatggaaaaccaaaaaagaaggcctcacaactgcatcatttcctagttacatgatggtctctgatatgttctgggcaccacattgtagtgccataccatggtatgtgagaatttgaaaacttcctctgtccgggtggtgctaaccctgcttaacggttgtcaatacaggtttatctggaggttccaattggtgaaaaacttgctcaagcagttcattcaaaggtagaagtcttccattttcctttttcaatattccatcttgttaatcaaccaaaccttataacatcgttttgagactgtagttcgttcagaagtaccaaacgttttccttttttagtctgtctcatttagatcatatcttaaccctacgacatagtagtagtacagtgctagtagtttttcaacaaatgtctagactctgtaggacgaaatttttgctctatagattcttttatctataaacaagcactgaaatgttgaacaaccaagtatgcagtactattttacacatgacactatttggaatttagcagtggtgatgtttcatttcaggggattccatacgtaatatactggagaaattcattttcatcatatgcagcatcccattttcgccatgcattaatgtcagtggttcaaaggtaccagcatccttttccctctctaccatcatcatcatatggcaataacaactaataattttcttgtatatgtagttcggtgagccatacttgggatgcttttcagcttgctcatgcatcctttcgattatactgtgtaagaaacaaccatgtacaaagtgttaagcttgggcctcgtctactaggggatgctccaaagataaatataacccctcctgagaatgagatggttgaggaggaaggttcttcagatgtgtttccagctataaaaatttatgatgatgacatcaacatgaaatttcttctttgtggagttcctagcacaccggtaagctttggtattttatatccaaatttccttacatcttatttcctctattgtacgaattggtttaatggtgttgttaacctcttctcttctgcaggatccttgtttgttaggttcattagaagatggcctgaatgcacttctgaatattgaagtatggaataaagcattgcagctctactgtacattgattattttttatggaccatggagtaaattttacactatttcctgaagaaaagatggagtataatgattctatgagcaacctttgttttagataccttaactcaagtttgaagaaactaggatctcagtatgttagatactattgaaactgttctgtttttttaacattacaacattttgttttcttgttcaatatttagaaaagggatgtattttgcgtgttaattgttctgattaaggaaagagagggagggagcggaaatgttttgatgtactgatgtggctcacaacagcactatgcatgaaaccaccctaaataacaccacacaaataaaatctagatagacatcttagtttcagtctacaagatgctagcaataaaatggtggttcaattttttacttggcaccaccaaatctcagactatgttgtacacatgctggttctgaaaatctgaagttagcagtccatccttttcttgtattatttcttggtcgaaggatgcaaacacatagactagcatagtgatatttgatgcatcaggatttctttagttattatccaccaagcttttatgcaagttctttcttctgtttgtgtgttgtttttgcaacttattgctctatctaacggttgatcttgtttttggcagattcgggggtgcaaacttcagaatcgaatcaggtacgttgaattgttgtctgttctagctgtttacatacccgtacctttctgtagcatactaccatgtccatgactcctttagttttgtgccatctgtcaagtttgattgtcatgcataatgctgtcaagtttcttttaggggtggacaaactgtttcagaaaatgtgtactagtgatccttttttcctttatgttagagctactaataaactgtagcttatactgtatacaatttgccttatgcatgttggagttgtcccaatattgattttccatcatacttaaaataccacttaacaaattgttttctcttctgctgctgagtatagttgataagacttctttcatatgtggcagtgcttctccaccaccacttcatgctgcatccttaccacgtggaatggttacaatgcgttgcgacatcactacgtgcagttcttctcatgtgtcacttcttgtttctggtagcgcacaaacttgttttgatgaccaggtatgaatttctgcgaacctggatatataattcctgatcttacatgtacaaaattatatggcatctacctttctgcagcttttggaaagccacatcaaggatgagatcattgagaagagccaactagtccatgctctgccaaataatgatgataagttatcatcaagtgtgcctttcacttcaatgtccacagcttgtggggcttctacctttgaagtttggatgacccttcctaagtgggcagcacaggttggataactgtattgaacacacaagatatgctgtgattagaagtgcagggtgtgcttatttgctcatatttttattcattacttggcttctctttatcttttttttttccgatgcaccgactgaaagttcataatgttgtgtaattctattgtaaaaggctcttctcatgcttttgcttttgatctccaagaacagtgattagttatgaaagcaacaaaagtcttcaatctcattatctaatcctcacatgtaaaacattatttgttaatctttgactgaccatcaatatttttatctgaataattaggttctgaagcatttagcgccagacatctcatacaggagcttagtggcacttggaattggttgtataaatggcacgcctgttgcttcatttgataggcgagatgcaggccgccttttttttttttggtacaaatca

SEQ ID NO: 24704 - DNA, 2460 bp, Oryza sativa
aagttaaattgtctaaatgttcttttgctcaacatcaattgtcatatttaggtcatattatcagtgatcaaggagtcactactgatcctgctaagattgaggaagtggttaattaggcagttccaaaatctgtcaaaaagctcaggggatttttgggtttggcaggttattataggaagtttgtcaagcaatttgggatcctttgcaggcctttgaccaacctgttaaagaaggatgttccttttgtctggtctgtggaggctgatcaggctttcaaggctcttaagcaagctttggtatctgctcctgtgttatctcttcctgatttttctttgcctttcactgttgagactgatgctagtgatgaaggtattggtgttgtgttatctcagcatggtcatccgattgcctttcttagtaaggccttggggggttaaaactaagggtctttccacttatgaaaaggagtatttggctattttattagctgtggaccattggagatcttacctgcagcagcaagagtttgtcattttaactgatcaccatagtttaatgcacttgaatgaacaaaggctgcacaccccttggcaacacaaagcttttactaagttgttgggccttcagtttaagatttgctacaggaagggatccagtaatgctgcagctgatgcactttcttgaagagttatctgaactacatgtggtttccagttgcagtcctgtatggcttcaggaggtttctgatggttatcttcaagatgccttttctactcaacttttgactgacttgactcttaatgctgagtctcggcccaatttttctttgtgtaatggtgtccttcgctttaaaggcaaagtctggataggtaacaatccatctgtgcaggataagattatctctgcgttgcacagtagtcctttgggggggcactctggttttcctgttacttatagtaaaatcaagtctctttttgcttggcccaagatgaagaaacagattcatactactgtcaagacatgtggtatttgcatgcaggccaaaccagatcgctctaaataccctggtcttcttcagccccttcctgtccctgatggtgcatggcagattatcaccatggactttattgaaggtttgcctaagtctggtcaattcaactgtattttagtggtggttgacaagttttccaagtactctcatttccttccattgtcccatcctttttctgctattgatgtggctcaatcttttatggtcaatgtttacaagttacatgggttacctaagttcatcatttcagaccgcgacaagatttttactagccacttttgggagcagttgtttttgagatccagcacacaattgcaactaagcaccgcttatcacccctagacagacggacaaactgagcgtgtgaaccaatgtttggaaatatatctgcgatgttttgttcatgctgttcctcataaatggagttcttggttgtatttagcagaattttggtttaacacttcttaccattctgccattcttcagtctccatttgaagctctctatggctatcctcctggtcattttggtataagggatgatgcctgctcagtacctgatttgcatgagtggttaaatgaacgtaaggtgatgactcagttactgaaacaacacctgaatcgtgcccagcaacaaatgaagctgtatgcagacaaaaagcgcagtttcagagaattttctgatggagattgggtctacttgaaattgcaaccttatattcagtcctctgtggcaaaaagagcaaatcataaactatcattccgttattttggtccttttcaagttttacatcgggtgggcaaggtggcttataagttgtctcttcctgcagagagctccattcaccctgtttttcatgtttcacagcttaagcatgctgttgggttcaggcattctgttcaaccgtgtttgcctgcatgttctgaccttaaagtttcagtggttatcttggcttctcgtcagatcaggaaaggtaactctgtgaaagctcaagttttaattcggtggtctagaaatgttgcaggacaggaaacttgggaggatcaagttgagttgtgtcagcgttttcctaatgccttggcttggggtcaagccacttctcaaggagagggggttgtcagcagcacagctataccggatgagctacagaacactgtcaagaccaaggaggttaagcagactaaggaaggaagacctgttaggcaccgagtatgtaatcctagagtgagtgggccggaatgggccatatgagcaccatgtccaggctgtcgatagttgcgtgtgagagagagagcatcttaaaactaactctgtattcatttggatgagttgaggatgaactacgcggcgaaggcggcggcggcatcaaccctgtcgggttggtgaaatccatctgtgtgtgtgtatcg

SEQ ID NO: 24705 - DNA, 13444 bp, Oryza sativa
  unsure (1)..(13444): unsure at all n locations
atccatccctaatataatatcatagcaacccaaaggcaacaccttaaagtcagttttaaaaatttgaccctgagtccaccagtcacaaccagaaatatactgagagcatgatatcacaccaccatcagcaactttaactgaaacaacatgctgtaaacattggataccctgaagtttttgtgccacagtaatatcaatgaaggaatgagaactaccagaatcgactaacatgagtaattcatacccctgtacccagccatttaaccgaaaagaagtcaaggattcagtaccagtaacagcctgataagaaatagccataaaaactggtctacaggttcgaantacagtatcgacggactcatggtttaactgatcgtcctgcaacgcagctaaaagttcctgaacaacatgtaactgaaccgaggagccacacttatgctctctgctccaatgctcaccacacgtgaaacaaaggcctttagcacgcttgtaggatttcaaggcagaaaacttatcagagcgagactgtgagaattcagactgtttcctatcctccaacacagaaccttgaggatggttggacacaggagaaacaggtgcaggttggcgagcaaaatttttagacaacaaaatcggctcaggtttcctgtacacagcagggtgacttccttctagtatttcctcttgcaaaaaagccaacgaacacgctgtatccaaatcttgaggtttctgcatcaaaactccagatctaatgtctttcctcagtccttccacgaacttggtaacaaaataattcagaggcaaagaactatcataagccaacaactgatgcataataccatcgaatttctccacataatcagaaactgaagaatcctgaacaatgtgaaaccactgccgaatcaagaccttctgcctatccttagtgaaacgaagacaaacttgatcaaagaactcttgccaagtaaccccgaccagtttggaacgcaccgattgtaaccaaaaagcagcgttgccagtaaaattcagtccagccacacacacccaattcttaggatgaacaccataaacctcaaagtactcctcgcaattactcttccagagctgacgactatcaccattgaattgcggacaagacataggtggaacattacccccaattcccgaagcacccaaaagagcagaggcaaacgcagactgttccagagcagaggggagcgaagtaaattggggcggagtttgcataccatcgggcgaacccggagaagaaggggaaggacgaggtggctgctgcaccaaggactggagtttgtcgacttgatcttggagtcccaccaccgaaacgtgcaaatcatccacgcgcttctccaccaccggcattcgggattccaccgccactttgagagccaaaaactcagatcggctcttctcttccgacagctcccgatgcttctcactctcctcccgtttcttctccacctcctccatcttcctcaacaagagatcgagcttactttcctaatccatgatcttggccgcttgcttggtcacgtagcgaggcttgtcgtagcacgccgtgattgacgaactcgctcgagatctcgccgacctagttgagggagccgaagcttttgcggaatatagttgccgaagcaacaaattcccacctcacccaggaattacagcaaaatcaagaggaggaaaaaatttcggcaaggctctgataccaatttgttaactacccccaaggacagaggaagaatcgcccaaacagaacaacgatacacacacacagatggatttcaccaacccgacagggttgatgccgccgccgccttcgccgcctagttcatcctcaactcatccaaatgaatacagagttagttttaagatgctttctctctcacacgcaactatcgacagcctggacatggtgctcatatggcccattccggcccactcactctaggattacatactcggtgcctaacaggtcttccttccttagtctgcttaacctccttggtcttgacagtgttctgtagctcatccggtacaactgtgttgctgacaagcaggttcatcacgatggacaagtcttgttgctgtgtacatatatacaaggggtagagcatgtcaagaaacacaatgtaatttgttaccggtactaattgctgtagcacaagctgcatagaacaatgtcaggcaaattataaacctcaactttgagcaatgtcagtcaggtggagtgaatcacattagtactggttcagcgtcggaggagttgacggcgttcagcgtcgccgcgtcgacgcggctgtccatgttgaagctgatcggcaccacctcgtcgtcgacgtagtacgtgttccgcagtgacgcaagcagccgccgcagcgacttggcgcggttctgcgtgatggtgttcaccgagatccgcatcctgttccagtctgcgtgaaatccatagattggttagagctttgatgtagtttttggttgcaacaatggcggatgagagctttgaggtagaataagcttactgggcagcgaggtggggctgagggtggccatccagagaaccttggagatggagttgctgacttcgatgttggctcagcccaggaacactctcacactcacgaacacaaacgccggtgagggagacgatgaacaatggattttacagcgacgaacgccgcggagccgatcgctcctgtatcttggctttattcctcactgaaccttgcaaagaaacaacgaaggagtacaggggcctcttatagaccggtgacacaccgggagctagcctccatgccggccattgcgccacgttccgcagaacccgctcgacgtcgccgtgagccacacgctcgcccggacgacgcggcttcctccgcaagaaccgacgccacgcacaccacgcactcccacgactcgatcaacactgcaacggccatgcaaacaaccatgcagcagccatgcactcgcgatcacgactcaatcaaactaacagaacgcacacgacgcacacatgcagcagcacgacacacacacacactgactcaaccacgccaggaatacaccatgacgtgtttatttccaacattcgacaccaagctcaaggccaacggcgccgacctcccggactacttcgtcctcaccctcctcactgtcatccacgccatcctcccgcagccctccgactcctgcaaccctagctctgcgtcgcagcccgccgaagagtattgcgcagcggccagcggccagcggcagtctccgcccccctcgccggccaacgcctttttccctctccgtgcgcgctcgccggccagcaacgaaggatgccgggagggagagagaggaggcgccggtcgctccctctcccgtcgtccactcgtccgtggatagagaggatggtgggtcccactcttttttcttttgtctaactgacttgtgggccccacattttgtttttattttctatttttatatttttcttccaatgtcacgtcaccgccacgtaggacgaggaccaagtcaaaccagccacgtaggcgtcacatcagccaaaaccaccatcaaaaccgctgagggaccttttttgcaccggttttgatagttgaaggacccattatatctggttttacggttgaaggacgaaaatcggattcgttgacaagttaagggacctttagtgaacttattccagtcaactttgtatatgccattagcccattatactctaaccatgacggtacgtgggctgcttttttggtaggccgtaggcttaagaaaactttttggtgggcctagcagaactgtctaggccggacagcccaacacaatgtcatggcatgcgcgacccacaaaaagtgaaacaggaaacccaaactgtttcttttgccttgtagatacaattcccacctacaagaacagtgctgtcactccgttgaaatgaaaattttcactctacgtccctcgtctaagagccgaatttcaatctgatcattcaacagtaaaactaagtgcaacacatcattatgttgcaaaaccggtgtaagtgaggtttcaagccaatattgagtccaatttagactaacgtgatacctatatggcttatttgatttggttttcatcctacgtgttattgacgtgacacctacctatatcacttaaagcaaaaaaaaaataaagtaaataattaaaacaattatatagggcccattgacagcaaaaaattaaaataaataattaaaacaattatatagggcccactgacagcaaaaatttaaaataaataatgaaaacaatttatatagggcccacatgtcagtgggtgcctattaaaaatatacaagtaataaacctacatgtcactcacctggattataagttgtcgatcgaacactcgaactcaagaattttttttttcaagaaaagctgtatatagatgtgttacatgcgagtgcaattttgcgttccaaagtgcataaacaagtttggaggtttgactatcagtcagggactaccgccggcgtcgagcagctcgccgcagtccgggttgggacagctagcgcgcgaaggcgcctgagccgctgaccgacggcgagctcgcagagcgcgacgccaccacgcgtacgtcgaagccgccgatgtagaggtagagcaggttaattcttaaagtcctccggggtgcacgacggcgtcgcagtcgcagtggaagtccgggaaagggcagcgcagcgcacgggcacctctcctcctccgccgcgacgcggggcctcgctcgcgacgtggctgacgacgacgcaggcgatgcagagctcgcgtacgtgcgcgcacccgtcggacacgcggcggccgtcgtacagaagtacagcagcctcggctcgtcgcagatctctcgcagtggagccacccgatgtcgtcgtcgctgatcgagcggcggcacgtggcgggacgcctccctggccgatcgattacgccgacggcatgcaggcctcgaggaactcctggttgggctccagcgccgcctcggccgccatgtttctgtcgaatgcttgcttttgcttctgcgaggaatgaacacgtttcagctactttgttcatgggaaactgtttgatgctcacaactgacaaattgtttatgtaaccgttggcagatccagctaggacctgagaaggttccgtgacatcactaaagaaatgtgctgaaattattttgcatgtacatgtacatcttcaaaaatccatctttcccaagatattagtattttttgacttcaatacagtcttcgagatgctatacattaaccaataatatctataaaagtaagatgttttaaataaaaaaatattgcatactatgatagtttgttcaatgaaaatatagtaacatcaaatttacgtgatcgatcttttttatttttttcctattagcagtcaattttaaaaatgtttgacttagtactattctaaaaaatacttatatttttatattttaggacggatgaagtaaccaatagcaatattagaaatttaacaagcttagaaattaatgtaccctttaatataaaaaagaaatatactataggtatctaattaagactgcgttcgttcttgagctgaacatctgagatggaaattggagcaagcaattaacatatgattaattaattaattattactataaatttgaaaaataaatttatttgatttttagtaacttttatatgattcttttatgaaatatattgtttagcagttcgggaattatgctaattaagaatgagatattaccttaagcctagatgccggaacaaaaacaacctaagtgtgtgttaaaggcgtgcacttatatggatgcgcatgctaataatagtgcacacacatattttccatgtaataaaattaggattcacccaaaaaaacacattatattcgcagcctgcgctaacctgcagggagccatatataaaatttcgttttttttttatcaaaagtgggcaatctgtaagaaatcgttagctcagcctatcgtgggctgaagtactaacagagagtaacaggctactgggctcatccccttgtccttaaccaagtttctaccggttctctcgcccaaaagacaatatcaacgcgcctcagctttgtccaatcatactcactagtcgccatatacagatgaaaaaaaaatgttccaaatattggtcgatgagaaatcgcgacatatcattatcgtttccgtcaagaacaagaactccgcatatacaaatggagtaatggaaacaggttgaatcgaatgatcgccgactcgctacagaacattactagcaatgattccccagattaagcggacggtctgagcaagtaaggtcgatgaatccgtcttcctcctccgattgtgaagatttgcgaggagtacacttgcatgaatacattctcggattaaaggatgaaccgcagtcgtagcaaaacacagtgccacatctgcaaacaaaatttatcacatgaatgtaagaaatttcatgccgacttaggaagcaccagtgatgtggtggtaaagtcgtgggtgtatgactctacccaccagagttcaaattaatgctggtgctcacaaatattacgcatatatatgtgaactttctaaaaaactttagtgagatcatgtatgtgctcctggtttctatttcttagagcatgtgttaggagacgtattcgcggagatgtgagtgttgtgttgcgtgtgtagtgttgtgtgtgcgtgtaagtttgccgtgtaatcgtaaaaaaatcaaagcataattccataactacgggtctacggctctatttgaatagctgaaagtggtttgatggatcatttattttttttctacagttatttcaaagcataaacaaatgaattataactactgcaaaattgaaagtagctttataaaagcattcaagatgtcacaccccaatccggcaccgccgtacaacagcacctgacaggagcgtgtcgtaggaaaaacggcgtgaaccgcttcctacgaaaccgcgatctcagtaccagtcccaggacatagcgctggtacccacggtgacaaatatgaatcattgcaatccttataataaatagaggacttatttaccttaacttaggttgcattttagaacagcccgagaatgcaaccgacgacacgaacgaggaaacaccaacagcagcagcagcagcggaaccaacggactaacacccaacaccacaggcgacggctgggaactaggacgaaaccctattcttcatttcacttcatcttcatttcaaggtgtaggaactatatatatatttatatagagcaagggtgagtactttcgtactcagcaagtcacgagaatttaggtgtttgatgcaagcttggaagagaggcaaggttgttttgcaaatcctttgttttgaaatcattttgaaattactaagtggtttacttctttctaagtttgggccgaaaagagacttgtgtcttgattcgactttaagagatgtttttcaataactcaattggtaatgtaccgacccccgggtcagatcattacttctcggctcccagagccatttcacttgattaagcggctcccagagccttttcattttctcggactcccagagtccaactgcccagcagcacaacaatccgcttcaactcgggaagcctagtctatgatgcccgtagacatcccgaatcacacagattcgtttcttgaccactcaggtcatccatctgccacataggctgattctggtaacgattcccaaaccacaacaacttttcacaaagcacaggcaaacaaatctacgctacaggaaacacctcacatccgcccatgaccgtgggtacggctgttcgaacagttagttaacctctgcagagggggtacactttacccacacgacattactaacccggatcacccagtccgtgagatcagccatgtcgggagaccctaaggttttcatgacaaggcatttcgaaagccgacacagggttgccatatgccaacgagaggggtcccagaccgacaacaggttaggtcccagaccatattgtgccaggaagcccgagggttctacctgacaccagcccgttgaatccacatgtctcatggcatcatggctcctccgattagctaattactcagccaggggcgtcccattgcacccgtgtggtcgcacttattatatgctcggatgaatttcccacaggaatcggtccttatatgcgaatacaggacagtaccacataggcacaacccccgcatcgcgagttttcacaatctattttgttttcaaacacaccgatgccatatgtcgggttttcaaggctctcaaacacaccgatacaaacaatggtgtatgtggaatagttggtatatgtgctcagagagcacggataccgaagtaccacaaaggtggaacgacaaggaatcagggtagtacaacctacaaaaattagtgcgactactgggtaggtctgtcggtttggcacgcaaaccgaggccaagcaagttaagtgtgtgattctactaatgcaagttgcaaacaaaataataatgattttccaattataggagcaattggtcaaagggtgatttgtcttgctcaaggtcttcacgaagcttcacgtatcttcgagaaaacccacgatcgatgaaaatccggtgaccgcaactatacgcaaacaatcaaaaacctaaacaaaagaccaagaaaaaatatcctatttagactaaataatagtaccattagatagatcacaattttacagaattactggaagtggaacggggtcaatcggatgagcggttgagaagatatggattttcgaagtttattggattttctaatcaaaggaaaaacgatttaataatttattaaaccctttttggaaagaaattaaaggagggatatgatttagacttcctcgggtggctcgggtgcgactcgagaggacaggcacgactcggccgaactaatgggccggccggcccggagaggcggcccaagggggcgcggggagagtgagggagagggagggccggtgggccgagtccaccttgcggggtcccgagtggggcccgcttgtcagtggcgcggctcaccgtggaagcggtgcatgcggcgcgcgctagggttcgggtaggagtggcgcacggattggtgcaccgggtggaccgaaggatggcaggcccacgcgcagccgttaggctctccgtggaccgcgcgcactgagagagagaggagggagcggacccgccttgactcggtcttcaccgaggtggcgctgacgtggcgcctccgtggcatgccacgcaggccggcgagaggaggaagaaagaggccggccgagatggacggcgggcggcgggggtctcaccggagcatggcgcgacggtcttcggccaagggggagcacaccggagtgaagaggggcacgagaggaggcgagccagtggctcggattcgccggaggaagatcgacgacggcggattgcggcgacgcacgccggcggtgagaaaaaagggggaaacggcggaggggcgacaaggattcaactcaaggtggtgggagtatctctgggagtcggggattctgtttccggcgccggatagggtggaggagcaccgaggagggctagcgtcgacggcggcctctaggagctgacggtaatggcggcgaggccatgccaggcgacggcattgctatggaatggtttggggaggccctagggagttcaaggacggtgttggctagggtggtcgacgagctggggcccgacgacggcgcgcgactgtgtgccgcggctgaaaaagcgcaacggcgaggcgcgcggcgcattgtgcggcaggaggaggaatacggtggggagctcaccggtgagggaggagcggtgttggcgacgcggagggagtcgcggcgaggtggtcgcgacggcggggcggcgcggaaccgagagggcgcggccgagaaaaggagggaggcagcgaggccgaaaggatgatgagtgtgtgcacacgctcttggccacggcagtgcggcaccgagcttgacgaggccgacgccgaggctcacgcggccattggcacaacgcggcagcgaggaggcagtcgcggaggggcgggggcgagcagctggcggccggcaacaatggcgcgggtggttcgagcgaggtgaagacgaaacgagaggggagggcgcgggctttataggcgaggaggagaggtcggtttggaggagggaaaccgacattggcggtcaagggagctcggttggtgttcacgggcggcagcggcggtttcgttggcagtgcgaaagcggcgacggtgtggatgtgttgggcggcgaaggcggtggatcgagcggcggaaattgaaccgcgagcgcgggctggcgcggcttggcgtggtcaaagtgggggcggcgaactggcgcgcggcgtcagcggcgttctgcctccgcgcgcaatggcatgggcgtgagagagaggtcgagtctgagagggaaaaaggggaaaagagggagaaaaaggggaggcttgtccatgccgttctgggaggaagagtgagaggggagcgcgagcgctggctcccgtctttggagggtagcggcaatgggcatcgggagagaggagagagaacgagagagagaaaagagagctctctctctctcggccatggcgcacgcgcgagcggcgctcgagggaaggggagagcggctgggagagggaagtgggctgaggggaaaatggcccacaacacccgagggaggcaaaataaacttctgcatagagatttgagttgggaggatattgggattggaatttggattggagagaatttgagaaggattttggaatttaaccttgatacttggcctctaggaacataaggtggagtcaagggaaggattcgaggtgggatttgaataattttggattcgaagaagtatttggcgaggattcaaggaaggatttgaatttcgaagacttgaattggaatagaaatcttgaggtggacgattttgatggcgatgagagggaacaaggacggatttgaattgagatccatggcacgacttagactcgcacataaagaaaagaaatttttgcaatcaggattttgccgaattagtttttaacgtcttgctaaaagcgcggcgttacaatattttagtaagaaaacttttacacaaaatgcattggttagcagtttgagaaacaagcaaatatttctttaaaaaagattttattttctccataaataatggtcagttaccgctaagatatttctctcccttttcagcgtccacttcgcgagggaagttcagtacgtgttcggtcaagtcaacaacggttagtcaaaactaacgaatggaatacgtgtttcagatgagtggcgaaaatttcgccccgatttcgaagtttggaagcaaagtttagagatttgagtctagcgatcgaaattaaagattgaatcgaagaggaggatcggagtagtggtgaatcgatgagtttacctgcatgtcatgcgcttgcacccatcgatcttgtcgatcatggcgcggcagctggggcagcgccgccactcgcgccccttggcgagctgggtcagcgcgcaccgtgcgccgccgtcgccgccgccgccgccgccatggcggtcgtcccacggctcctcgcactgcaggcagaacgcgcgggaacaggtcgggcaggacgccttggacgccgcggcgcgcaggggcagggccgcggccgccgcctcgccctcgagcgccgccatctcgccgcagtcgcggtaggggcaccgcgcgcgcgcggggccgacggcgcgctcgcagagcgcgacgcaccaccggtcgaacacgtcgatgtcgagcagcttcttgcagcgctccgggtgcatgacgccgccgccggagcagccgcccccgcccgccaggaggcacggcacgggcacgctccccgccgcgacgcgggcctcgatgtggccgacgacgcaggcgacgcagaacgcgtgggggcagccgtcggagacgcggaaccggtcgaacaccagcttccactccatgcagacctcgcagtagaaccgcccgatctcgtcgtcggtgagcggccgcacgcggcccgcgcgggacgacgacgacgacggcgggtccagcatggagccccggatcagctcctgcaggtactgctcccggtcgagctcctgcgccgccgacgccgacgccgacgccgcggcgctcgccatgggagggggacgacgcgtacttggcgctaattcttcggcgagaaggaactaggaagtggatggagtggacttgggctagtgcgggtcgtcgtcgtcgttggtcgcgatccctttagcctttaggtgggtgtgtgcgctttttaaagttgggcaggtacagggtacgattggaacggttagagatgagctagatacacaacaatattatgcttaaaggcacaatatttgctaacattacgtatcatgctgtgagtatatttaggatatttaggttgtctataacttccatatacttaaatcaatcaagtgagatcattatttgtaagagttttgtaaaaaaaagtacgtgtagcaggactcttttttttaattattattattattatgcatgtgcacacactactatactcgtaatcccatacttacgcacccaccaattctcgatatcttggcaaattcattacaatccgcatcaaccataatgctaaatttcaacaaatcgtgaagaaaacaacaaattttggttgtgatcgtgatgaaagtcttgaattttctttgtaatagtttcctcagttaaagttatgatagtagtcataacccatgctttactcaattactgaggaatgactcgggcagtgacccatgccacggtgccactccactttcctccctcccacctcctcgccaccatcagagccatccgtcggaaatcttgcggtgacaaggatgttagtggtgtggggccttttctcccatgagctcccagaggttgcgagcacaaggtgatagatttggaggatggatctggccatgatagtgactgtgatggcggcaacgcggttgaagcgacgacaactatgaccaatggtgttgaagacagttccagtagtggatctagcgctggtgatgctagatccagtagcttcgaggctagatctacgtgaccaacgcgtggtagaggaatgctcgcaaggcatagcaatggcgacactgggcaatggtgagaccgcctgcgtggaggtacgggatgggtgtgagcagttgctgtggcaaccccctcgtgccgacaggatgcggtattggtagcagacacggcgataggaggaaggtgggggttgaccacctttgtgtagaggtgttggcgacaactctcct

SEQ ID NO: 24706 - DNA, 3088 bp, Oryza sativa
atagtgatccatgtgttcggtgctcatgggtcaccatccactaattaatctttcggtccgcacaaattactacttcctccgtttcatattataagactttctaacgttactcacattcatatatatgttaatgaatctagacatatatgtgtgcctagatttataaacatatatatgaatatgggcaatgttagaaagtcttataacctgaaacggagagagtactactagtctctccatttcaaaataaatgatatgcccatattattagtagagattaagatgtaagaagaaaataatatagcgtttcttattaaatatgatgtactaattgttggtgaaagggtggttaaagataatataatgataaatttaataacaagtaattgatgggaccaatactacttaaaatagcactatttttttaaaaaaattaaatcctaaataaacaccaattttggggctgaaagagtagacacagcatagaaaagaaaacgaacttttcaattgctaatcaatggttgaaccgaaggggaatttttttttaaaaaagttgtccgatctgtttcgttgcaacatccagaatttatcagctactaaagactaaagagtaaccaacattgttggtttcttatcgtaactcatcctaacttattgattaaatatggagaacacacattttttaaataaaaactactaacactatcagcctacacacaaacccctataacacattttttttccaagggactcctaaaatgttgagaacatatatactcccaccattctcttttatgtgacctccaactccaaactaaaaaaacataggtataaatcagcagctaagatagataaagcacacacacataacagaatccaacacatctaataaatgtctcaattcaaagatgatacaatccgaaaccatccaaccatctatgtctttctttccaacttttcccagcaacccgctggaagcgaaaagaagcaaattgcacagatccacacatcattcaaccacgatcgatgaattaaaccgctaagaaatccaggtaaattcgattaagtaatctagtcgaccgacggatcaaactttaaattaaggaaatagtttggtttagcgaccagtaaacgcatgcagaatctgctgggggcagcagctaatgttcgacattgtccatgcatgcatcagcctccagcttagctccttcttcctcggcgccggcgacggcgagatcgattctgcaggtgatcagggcaccagaacgacgccgagattgtcgaggcactggcatttctccttcccctccagcaccgctcctatctggagcccacaaaggtagcagaagaccatgcggcaccttcaaaataaaccgcttgttaattaaataaaaaatgtatgatatgtgtgttagccacactaatacacacacaaacatatacacaaatctgaattatgataacgcatatacataaaagtctattgctccatgtaatctggcaaaatcgtattcccattaaatatataaacatacacctctgtaaaaatcttcacagcaagtttttgaattcaatgtgcttccatatcttggttcatattcaaatctacgccattgaacccccactaaagccattgaacgccagtttacttactacaattaccactcaaaagttcatttaacctggagaaacatcctaatgtgtacgctaaaaccatatcaaaccaaaactatcaagtataatgaaacggattgagagttggagggagtaaatatatatacaccactgtacaaagatgtaattatcattaaacacgagttataccaaacttctaccatggtaaaaatgtttcccaagcatttaatggtgcaaacggaaaaacaaaggaaccaaatatggattagacacaaactaaagcatgtcctaccttgcaatgtaacccaatatatgttgttaacactttctccctacgaaaatgttggataacgaatctacagacaagttcaaacatgaaaaaacaaatgtcccccctataaaaagttagaggacgaatctacaaacacattcaaagatgatacaatcagatgctttgttttttaaaaaccagatgagtgatgtgcaccaaaccgtatacgctatatattactccctccgttttaaaatgtttgacaccgttgactttttagcacatgtttgaccgttcgtcttatattaaaaaaaattgtgaaatatgtaaaactatatgtgtacatgaaagtatatttaacaatgaatcaaattatatgaaaaaaataaataattacttaaattttttgaataagacaaatggtcaaatacgtactgaaaagtcaacggtgtcaaacattttgaaacggagggagtaacaaaacttctgccaacaacatactactttaaaaaaagcgccttgacaaccaaagaaaaacttgacgtcgaataattaagaagaataattaaaaccatatatttgtgctctctatgctatctagcacatagtactaaccacgtattttaactccctatgctatcgaacgcatctcaaactatatgtgggagatacattttctccaaattatgtactacattttcctcaaaaaaaattgtgtaactacatttgaaatgctcgtgatggattaaatagagtaatgaagcaaatgcaagaacctatgaaatgctcatgatggatcataataaatagtagaataatgaagcaaatgcaacaacacaagaagtgaaatgaagtagacagggaggtgagcacagtagtgaagtgagttgagtacctgcaactcatgaccctgcagccggctgtcctctcaaccagcatcctgcatttggggcacgccttccaccgccgctcgtcggcgagcttcttcaccatggcggcctcgggccccttggagcagtcccggtggtcggcgtcgtccgccgtgctccactccccgccgcacgtcgcgcacagcaggtgctggcacgccgggcacgccgccatggccggctccgcctcgccgctggtctccagcaggatcccgcaccggcggttggggcagtacgcccgccggtcgtgcgg

SEQ ID NO: 24707 - DNA, 3795 bp, Oryza sativa
tcctgcagcccgatgggcggaggccccacttcttgtagaagtttggcatggagaattcaccttcttcttcttcttcttctccggcgatggcggcggcggtggcgcggggtggtggttgcgccacgacgggcgattttgtgaggtattgcaccgggagaggcccatggagctctgggtcctcttgcagctcggcgatcacggcgtcgcggatgacggagtcgtaccagtcgttgtcgtggccgtcttccatgccggcgaagacggccggcgtgtccctgtcggcgagtagggcctgcctcttcgaggaaaccgagtcgttctcgttcgcgacgttgcggtgaacctcttcttcttcttccatgccgccggcggcgcctcctttgccggcggagatggccggggttctgtgttgcccacacttgccggcagagacggcaggggcggcgtggctcccttctcccgtggtggcggtgacggccgccggggtgtcggcggcggcggcggcggcggtgagctggcggtcggcggcggcaatgcgagtccatatccggccgaactgcgcgacgtttgggcgagggtttgcttgcaatgctgccatgaggttttctgccctagcccaacggccattgccggcgccacgggcatggccggtgccgggagcggcacgagccgccatacgggcggcaggacgtctcccgccggggcgggagcgggggccgcccgccagcgatgaggccgccggggcggagtgagagttcagtagacggcgccatggcagcaggtaggccctgtggtaaggtggcggtagagctcgtgccgatgtcggcggtggcggcgccgcccggcggccgcgggaggaaggccgtcgctgatcttgccggtgccggctgctgtctcgtcgccacggtgcggcgcccaccggatcgtaacggaggcggcacgtacagttggacggtccgcgccgccgccgccgccgccggcgcgtcatcatcatcatcgatgacgatgggttgggccctgctcccggcggcgccggcggcgagggaagacgtcgatcctacgcgatccatcggcggcgcgaagctgctccagtcgtcgtcgcccagctccatcagctgcgacacgtacaggtcacgcgcgaacgcctcgtcgacggcgacatcggcggcggcggcggcggcggcgtggtggctgctcgatgctcctcctccagtcgcagcagggtggggttttcctccttccatggcgaattggcgcgatcgatcgacttcgattctctcagagattttctagggtattagggagtcgatcgatcgatcgatcttgaatttcttgacctgcatgagaagaaagaagatgcgaattagggggggatttcttgtttctactcagaaaattaatgtacagatccgaggctgactgtactatctgaatttctatgtgttcagctcataaattgtactattggcgcctatatatatatgctgaataacaggaggtagatcaaagtttattcgggagtagaattgcatatatttccaaaaacacgtgtgcatgcgacttcatcggttaatattgatgaatatatactactcttgctttttgttcaaatattgttgtattttgttctcacttatattaagcaaaatcggcccttgtacaaatggtgtgcacataaataatctgataaaaatgataaacccacaaatacaatgaaatagatcgggatgtggatttagagtggttcctacatattatacacatagttttgcaaatatgtaaatatgcaaatagttgtcttgcgcaagcataaatacggtgaatgcaagtacataatacacatatattgaattgaaagtgtgattaatcagccatggtaagaaatgtcggttaggccaagaattcagtagagaatgatggagcagtggcaatggatctagtctgatctacgatgatgagaaaaaccgagaaaacatgaaggtaacttactagtgactatgaagaactaagggaggaggaagacacagttgccaccggtagacgagccacgccaaaagttgttgagagactagcggtcctcaccggtgtttgtggatggaccgatgggcctcgtcggcaatcacggagaagccgataggcttcaccggtgtttggcggcgataaaggggtagggcggcggatcgggattgggaggcgttagggtttgagggagaaatctataagcttcaatgggagtatatccgattgattgagatccgacagccacgatttatttggtttatgccaaaatctcttggatatatctattagtaccccataaattgtctcttccaacctcctattttaatatctcacccacctacttatttgacttttctcctactcattcactcctattcaacttttgatttctttgaagttaaaaagaaattaaaatctactaaaaaagctatcaacaattttctactcatctacccgtctattttcactcaaacatagaaacctatgcatcttgattcaatagaaagaataattgtttgaacaacgacgatcatttactaagaggttgtgaggaaaagatttagagacaatgaataatgctaggaggtggaagacaagtttccaaagggagaaactagcatgaggtttgtagtagcggtgaaggtcatgtacgccaagattttggtagagaatgatggggggagtggaagttagaagcaacatggaagtaagggcataggaattcacgatggatctaacttgatctacgattatgagaaaaaccgagtcgacgtgaggggaacttaccagtgattatgttgaacgcaagaggaggaagacggttgtcggaggctgtcgagagattggcggccttgccggtggttgcgaagggaccgacgggtcttgccggtggttgtggagagactggcacgcctcgccgatgttggcggagataccgaggcggcgggatgtgggaagacggcggcgggtcgggattggggaggtgttagggtttagggagggaggaatttatatgatcttcgatgggaggagatgcggttgattgagatccgacggccacgatttatttggtataaggaaacttctctagtgtatatccattaatgccccataaatgttctcttccaacctcctattttaattcctcatccacctacttttttaacttatcctactccttcagtcatattcaacttctattttttttatttttttgaaaataaaatcagctaaaaatttatcaacaattgtctactttttcacgaacacagagagcatttgcatgttgattcaataggcagaataattgattaacaactacgatcattggtcaggaggtggtgaggaaaatatttagagataacaattaacgttgggaggacaaagacaagttgccaaagggagaaactagcatgaggtttgtagtggttagcatcacttgctaatgttttggaggaggttagggggcctcagcaagagttggaggtgatgccaattcctaagtgagttggaaagggaaaacggcgggtggatcgctatggttttggcaactgcctctaaactagtagacatcgattaacaccaacataattccctttccaccttgtatgttaatttcttcccaacatacttgtttaacttctcatagtccttcattcttctacaacttctaaaatattcattattctaagaaatcaaaatcaactaagatgcaagctttgcatgtttaccatgtttggctactcttacatctttttattttttacaaacatg

SEQ ID NO: 24708 - DNA, 680 bp, Oryza sativa
ccctttcccgtctccggatactcatgagattgtggtcttctcgcatttcttctacggcggctttgctcttccgacctcaaaatttttccgcgggatcttgaatttctatggaatcagcttgcatcacctaaacccgaattccatagtgcatatcgccaatttcgtccatgcttgtgaagcctttttggggatcaaacctcactttgccctattccgccggatcttcttcctcaagccccaaccaaacaagaacaaaccgtgtgtagtcgggggggcaggattccaactaaggggaactctgagccaaaaatatttctcgatgcccttcaagacttcgaacaaaggatggcatgcaaactggttctacgttcagaatcccgagcctgctcttcccgggtactcttgtcttcctccagtgtaccaagatacttggaactctcttccaatcggagatgaagcagtacaagccttggagttgttggatcgtatgttaaatcttaaagaacaaggcttacagggagagcagatcactcggcacttcatcaaatgccgactggcgccaatcaaggaaagatcccgcccagcattcgagttcgacggcaaacatgatcccaatcgtgaagaaccagactccctggatttcaaaatcatgaaagagaggatgtataaaacttctcaaa

SEQ ID NO: 24709 - DNA, 792 bp, Oryza sativa
agatgctcatcataaatgtgttttgcagatcgcaagatcaaatctcaagctcagtttgacgtcctggttggtaagatcaagaggcttgaaggagcaagggataacgtcgccaatgccgctgcaccaattatccaagccatgttcctcaataatggtggtccgagtgcactcgacgcaaccgaaatatttgacaagctgagtgttgctccggaagtatatttcaagaatatcaagaaagctggaagtatgggagctagcatggccttggcgatgacaaaatccttgtacccgagaattgaagtcgacaccattgatggatttgcagacgggacaagtgaagaagctgcccttgatcttatcagcagtgcgcaaaatgcggctgacaaaattgcgagtgatgttgtagagcaatttcgcaacaacgacctccagccgagtaatgaagactctgatgatgaaaggactgattctgactgagtttgaatgtaatacatggaggctcaatttgtacaatactggtgtatttatgctgtgcttgatgattcttgcgaagtttttgatttcttaaaagtttttgctaagctttgttgagcctaaaacccaaagaagctattaaaaactttcagtcctcgcaaactaagtagaaaaaccaaacaaggcaatgataaaccaagtaagcaaactgaattgataaaaaatcacactccattattatgataatagcccccgactgacaacttaaaggagaaaacttgatgtttgacagtccaaatagggaaatacaatgataaa

SEQ ID NO: 24710 - DNA, 7639 bp, Oryza sativa
gcttgaagaagggcatcccccgctcgccaagtcttgaaacaaatcggctgagcgccgccatgcatccagtcagcttctgaacgtctttctgggtacttggcggtttcatgttgaggatagcagtaactttctccgggtggcttggatgcccctatgagacaccataaagccaagcagcttccttgacggtactccgaaggtgcacttttcagggtttaatttcatcctgaaaacgcggatgctcgcgaaggttttttctagatcggagatcaaatcatcttttgcttggtcttgacgactacatcatccacataggcttcaacgttgcggccgatctgtgttgagaagcatctctgaatcatgcgttgataagttgctcctgcgttttttagtccgaacggcatggtgacgtagcagtatgccccaaaaggcgtgatgaatgaagtcttcaagcagtcggattccttcagtcggatctgatgataccccgagtagcaatccagaaaactgagaagctcgcagccggcggttgagtcaactacctggtcaatgcgaggcaacccgaaaggatcttttgggcaagatttgttaaggtcagtgtaatcgacacacatgcgccattgccctgttttcttccgaactagaaccgggtttgccagccagtcgggatgaaggacttctttgatgaagcctgctgctaacagcttggtcaattcctccttgatcgcgtccttcctgtcttgtgcaaatcggcggagtcgttgtttaataggtttggcgtcttctttgacatgtaaggagtgctcaatcacctctctgggaataccgggcatatccgaaggtttccacgcaaagatatctttattattttgaagaaaggtgatgagcgcgctttcctatttacaatctaactcggcgcctattacagcagttttggtaggatcagaaggatctaagggaatctttttagtctcggcttcagtttccccactttttgaaatcttggcagcgggcacttctccttcgctcaccgtggttgcagccagtcggatttcctctcgggcagacgccatctcgcgggtttgggccatgtcgcaactctccttgtcgcatgtgacagcttgcttgatgtcgctccgtagggttaggactcctcggggaccaggcatcttcatcatcatgtacgtgtagtgcgggacggccatgaacttggctaacgccgggcgtccgagtatggcatggtatgctgtctcgaaatcggcaacttcaaagctgatattctctgtgcggaagttttcccgagtgccaaaagtgaccggaagggtgatctggccgagtggagtggcggataatcctggaattactccatgaaaaggcgcattgctcggtttcagctcggagcgagggatctgcatatcatccaaagtcttggcgaaaaggatattgagtgcactgccgccatcaatgagggttctgcgaagcttgacgttacggaccactgggtctagtaccagggggtaccgccccgggtggaccactcggtcaggatgatccgagcggtcaaacctgattgcgatctctgaccatcgaagatattggggcgtgtcgggctgaacagcattgatctcccgttcggtcagcttttgcttccttttagactcgtaagccatggggccgccgaaaatatggttgagctccttgcggtggtcttgaaatccagccggggtgtcgccgtcgtccttcttccttgacgtgctttgttcctcgtcggagttcttccgagtagacttggtgtactgctccgcgaactgcttgtagatgaagcactctttggccacgtggttggagtttggatgatgcgggcattgggagttcatgatcttgtcgaaggtgttgacgcgcgaacgctgtcgagaagagtgagcggcggttgcaacaagttcctcaggcttacgcttgcggtccttatgattgttacttccacctcctcccgtagccggcgtattcttcggcttccaactgggacccgactgcttcgatgcggtgacggcgtcttcggctttggcgtactcgttggctttttcaaacatgagcttgactgttctgggaggtttgcgcccaaatttgccgaccaattcttcgtggcgaatccctttggtgaatgcggcgatgatgacgtcgtcggtgatgtcggagatcttgttacgttgttcagaaaatcgtcggatatactctcgaagggattctccggatttctggataacgttgtaaagatcatattgtgtgccaggacgctcgaaggtgccttggaagttggcgatgaagtggtcgcgtaattcggcccaagatccgatcgtaccacggggcagtccatggagccaagatcgggcggaatctgccaaagccactggtaaataattcgccatggccttgttgtctcctcctgctgcgcggattgcgagaccgtagacggtgagccacgattctgggttagtggtaccgtcgtacttctctattccagtcggtttgaagccggctggccaatccactcgacgcaggtcgtcggtgaaggctgctaccccatcaaggtcgtcgtcgtagcggtctggcgagtggtgacggcctcgagctgctcggcgctgtatgattgtgtcgcgaagatcgatggggcggcgacgaggcggtgaacgtggccgttctactcggcgctccccacggtagtcgggaggcgagtgcacggaccgctcgtcgtgacccctgctcctgcgattggatcctgcaccggtgatgctgaggcttggatgacggtagtcctgagatcggaagtgggggactcggctgccagtcggcgtgtggacgctttcggagttaactgggaccgaagccgcgatcatggtcttcgtctggttcaagatgttgacgacgtggtcggaacgattgagctcgttttggttgaggagggtgtcgagaagggtgatcgcggcaaccgcattctgttgaggggtgcggaaaaccggtgtcccttcgacgtcttgttggccgatgagatcacgcgctcggcgccctgcttccaaagctcgctgacgtcgatcttcagcctccttggcgatccgctcacggtcctgctgctcacgccgtagccgttcctgttcttgtgcttgctgctcctcttccagtcggcgacgttcttcggtctcccgggcttggcgttgctcctccgtctcattattggccatgaaaacgccaaagtagagaggggtgtagttgtcatctaggcttccgtcgaagtcgtcgaagtcgtcgaagtcgtggtagcgagagctaaactcatcgtactccacgatgtcggtggggcgcgagtcgacggtgggagagctgtagtggtcatctagctgatccgtcgaaaccgtgccgagtggttggaggatgacgccgacttccctgaagctaggcgaaatcggtgttgagaccgacttccgcataggcctacgggatgaagacgctgtcgtggtggagacggccgctaaatcgtcggggagcttcatcaggactggtgggtaagccccatcatcttgatctggtgtcgttggagaagatgcgatctcagccgagtggtttgaagccgactcgattgagatggtcttgaagtaggtttcagccgcgtttggaatccaaacgggactgagatccggttctctcccgactggtccgattccaagtcaaggagagaaatcttgccgaaattgtcggtgacgaagtcgaggctgccgaaccgaaacgtctgcccgggtgggaagacgaggtcgtcgatgccggaggaaggacccattgcactgatcggcgaaaagcttgacgctacccctacctggcgcgccaactgtcgaaactagatttcggcaataataaaagggggtggctatcaagctggaaaagtgtatgggtttggagacaaaagatttatacaggttcaggccttcttataaaagaagtaataccctactcctgtccggggatgaatccgccgagtgtattattgattgtgtgattcgggaaaaaatcagcatatgcccctagaggcgcccggaccccccttatatatgggaaggagtccggattacaaaagataatctatattcctaacggaatatgaagatacaggtaaaatacagtcgtaaccgactaaatctcagggtgtttccttgatacacaagttaagaaacaaacccgagatacagataagatattctatctacattaagtatccggtacccaatccaaataccgtcgccgtgtagatatgggatacccataatctccacaagctgtagcacatttttatgatgttcaccggtatcctccacgaaatttgagtgttctctactaaaatttgcctatcgtcatttctaaattccagtaagtctgtatgtctttccaaatgtttgcagcaaatcaaattacaagaaaattttaatcaggttcatgcatgcatatatataaagtacatactactcgagggactaggtggcagaaggatactcgttaatttaatttgctttgcacgtgtgtgtgcatgtcactgctaaaaacggccgggttcatctgtacacacatgttcagttatggggtgagtaggacaaaattctccaagtctccaacatccgatccaagtagcggcgtcatcttttgagagctgacgtcaaacgacgtccgtgtgagctcactgtttcttagctgaacatatgcttaactggttgacaacttgccactatcaaaagggtaagtactcttcgtgccataattaatatagattaattaattattataccgttttcttgatgcgcgcgtgagaaaaagaatgagatgtgtgaaatggataactatacgatgaatttccctgtcatatgcattttaatttatgatagagatgaatgatcgaaacttaaatttatggaaataggttcaagcaattcacttattatagtgcttcacaatgttcttttcttagtattccagcactacagctcattgacaatgacccaacagtacattgaaaatatttcagtagcgtgtggatcgaacaaatcaataatatttctattgtatgttagcacaattaaaacaaattaaagcttatgcaagtggggtgatctagttttctgaaaattagcaagcatcggctagagattttattttttcatgagaatacaacttataagccgctggttaaacaacggttatgcacatttttatcaattatacagagagctttagcaatatgttactccttccatcccagattagggggcgtgtaattttttggctggttttccagcatacaaggcgtaatttctatttgattcacgtactgtctcccgagattaccttttcctgattcacgtgcatttgcagtggcaatttcctttgtgtgttacttaatttattgctgcgcacactgctacacgaaatattttcctcgacgctagacccatttatttccaggcgggacataattggcaccgcatgggataatcggaggaccgacaacatgctgtcgcccgcacgggaaaacacatttatcccgtacgggccactttactcaaccgcacgcaaaaataccgtgcgggcctctttactagccccgcacacaaaaataatcctcatcctcactccttaactctcccactcctctcctaccactccactccttctctactcccggcctctcctttcctcacagcagcgacagcagcggcgccgggcgacagcacgcggcggcccctccctccctctcccgttggctcccctcccctcccctcccctccccttgcagatccagcggaggggagggatgggggcggcggatccggcggtggtgggcgcaagcggaggtgacagcggtggcgggcgacgacggttgtacacggccactccctccccttgcagatccggcggaggggaggagtgtctttggccggcgacgggagcgggaggtggatccggcgtgggaagagggcgacgacgacggcggcagttagggttttggttttttcttttttttgttttgattttttattttaccgtgggggcggcttaagcgcccgaccgcgaaaatcgattttcgtgggcggtgcctcacccgtacgaaaaaatcgtgattttggcagacgatggattccagacgggcggaaccaccgcacacaaaaataagtttccactgcacgcaaaaatcgtgattatagtagtggccggaatattgatatttcccatatttagtacatacacaaatacgaaaaaaggtagataaagcaaaaggtttcgcctcttgcatgtgcatctgtgtcttctatgctttctaacctctcattaacgttataaagttcacttcccatagaaattaggaaagaaaattaaaggaattggaaacgttactctctccggtttcaattatattatcagcttttatttttagtaataaaataaatcctgacctttacttaaagaaagctacaactaattatttaaaaaatttgcaattcagcttttatatcgatcgagttaattaatttatatttttgacaggagaaagctacagcatttattttggatgttcattcctgggactatgaattcgtcttggccctttgatcattgagcagctatgcccacggcgagacagaattgatactatgtctttacaaaatatgcagcattaaccaacaaaaatgaacttacgatgctcattagtactgcatgcatgtagacactggaaataattgcagatagtagaaaatattctctttgccccaaaatataatgatctagctaggtatatatttgatacaatgtttacaatgaatttaaacaaactctatctctagatttgtagcactaacaatctaattaatctatacccacgttacaaatattttgggatggagataatataattctgaaaaccgtgtataaaaatcctggggtgaccggagacatatggcataaggatgtcattttcaactgtaagataaccacgtatacggaagtctaatagaactctaatgaagttaaaacggattatcgtccaaattcatgcatgcaagggtggccagcacgatacagagaaaaactggtttcattaaccacacgtgtgccactatatatcacaaaattaggccatgtactcatgtgcacatgtgtgtagttatggatggcacaaggacagtttaagacaaattatgtctgtgcgctatctgtcctttgcggccgcgtcgtggataggtgttgaatttaatttgagagtgctctcaaatggccacatgagctcactgttcatcactgcttgatcatctgctctgaaagttctgacttgtctgaatcgatttatttggcatcgatcaagtggctactacagtgtaatgttgttggtgtacataccgtatggtaccaacttgattgttggaaaatttctgccaccgtagtggacacaaggtgcttaattgccacttattatgtgtacgtatattacgtatgtgctagtgactgagtaaagtccttttgcacatttttaaacatcgacacagtctttgagatgctactttaacccacgatatctataaaagtaagatatctatcttttattata

SEQ ID NO: 24711 - DNA, 1529 bp, Oryza sativa
ccctatatccatccattgaacaagctctggatgaagaagaaatcggagaagacgttgatcaagccgcagccgaagtaagcgatactgacaacaccatcagcttcacctaagcagacccctccaactccttctgctccaactccctttacaagagtaagcacccttctttaactatttttgtaatcatctcactttatggccgattcctcacatactcggtaattgcagaaaaggaaggctgctgtaaagaagaaatcgactccaatgacatctaaaccagctccaccggtacaataatcttacttcttttattaattaatgtcagccgattttatataacacttgtttattttcagcctcattcccctcctattcaacaagcatcaagcgatcgaaccccatcagctgtagggagtcatcacatagaagaagaagttcaaccaattgctccggctattccagtaaattacttataactaacatatgcagatcggctatgcctgtttgatctctaaccctcttcaaatcattactgcaggtcttagccgatcttttctcctttgatatcagagattatcttgatgaggagatagaggatgacactactagcaaagctttagctcctttgtctgacgacgtgaagaaaattcttgaagatatttctcatcggctagagacatcatcactagacagcctagtagtcgactgtggatcaatcaggacttggcttcatgaagtccaggctcaaatctcagatgagttagccggtatccttactccagctgtttatcttgaacaacatcaatttaagctggaaaagtctaagctaagattagccgagcgtcgagagcgcaaagacattgaagcaacaatccaggccactcgacaacttgttcatgaagaaaaagccaagctcgatcaattatctgaaggcccgatcaaatccaatattgactggcttgaagctcgcaagattgaactcttagcacaacttcaagaatgcaatgccgaactggatttagagcacaagaagttagccgatctcccgcagtcgatcgaagaacaaaaagcaaagttaaaatcagctatcaagaatgttgctgattgtcacgcccagaaattcccgaataggattccaagcagaatgtgtattaaaacccccgtccaggaccagccggggtacacaaacgacaatgttgacatacagatccacgtcttacaaacatcataaaggtcttacagaaatgcagtggaaaacaaaagaaactggagctaagccttgacttgaactgcagcgggaacaccactccacaggcatcctcgacggcacggacgaagcctactcctcagggaaaccttcatctgacacatacccgtcctctggggttgggaaaagtagagcaagactgagtactacccactgtactcagcaagtcataccggaataggggtatgatgcagggaattaacaagaagagctagagtggttcatttgcataaaaactggcatttataaacaggaattgaat

SEQ ID NO: 24712 - DNA, 8071 bp, Oryza sativa
ccttctcctgatcattgcactgcaggagattcagcttcttctcttatcgcatggagccagtcatttgcctccatggggttggtagtgctggagaaggtgggtggcctgacacgtagaaactccggcaacttggactgagggggagggggaccaaactgctggtgctgctgttcggcgtgctgcatcatcctctgatgcatctgctggtgctgctgctgcatctgctgcatcatggcggccatcatctgagtctgatgtgccataacttgggcaagcgtcggattctcgggaagtggtggcggaccattgccagaatcaccgttggggtgcacaccatcagcgcgttcttcgccgttgctgccctcgcctgccgtgcggttgccagtcctggtgtagaccatctggagggaagagcagacggggaaaagaagaaaaacagatgctcaagaactaagctttattatataggaattaaaactgcaattgttctgatctgaattaaaacacttaaaaagagcaaacaaaaatccttattaagacagccatatcataggcacatgatatcgaccgtcgactgaccccaaacgagcaacctaaacacacaaactaacaaacaaaaactagacagtcgataaactaatgggaaaaacgagcctaatgctcggaacggctcctgcggtcggtggagtcgaaggcgtcctcctgctcgtcacccggtccctctgagcgactcctggagcctgacggatcagtctcgccgctgccactgggagtagcagacagccaacctccggtaccactggctgaacctctggcggctgatgctggagcgaaggagagagtgaacgcgggagctggaactggagctgcaggaactgcgggcggaaccggagctgctgcgggagctgctggtggaggtgggttcctgggcgcaagctggatgcgcacaggtgcagtcgtcctcttacggggcgtggtgcggatccggactcctcctggcgctggaagacccttcaactgagcattctccttcttcaggcgcgctacctcgtccttcagagcgacgatcctcatgagcttcccatcgttcaaggccttggtcgccttgtgcaggtccgagtgcatcctatccaatcccctcatcacagcacacatgtgaccgaaggtggtgtcgttctcgccagctgtcggacggaaggagctgacgccatcaccatgggctcgacgggggtggtagcggtacgccgtgtcgtggaagatgtagtcgtggcgctcccgtaacctggccatcatcaagtaggctgcctcctgacaggcatgatctgcggtgcctcctgacgcctcaaccgccatgttagcgaggcaagtccccacgtagccatggacctccaagcggacacggtgaggaagctcgccactgagcggtgggatggtcgtgtactccggcgcgtcggggtagcccaccaccagggtcatgcgtgccaactctgccacgaaatcaatcatgccttctccgcggtggttgggtgggtgaccggccatctagagaagacaaaggagtaggatcaatgcatgctcaaatccaaatttaaataaagcaataaagactcaaataaaggaatcaaataagagcaaaattttatgcatagatcattttacatgagtgcgaataaataagactcacataacgataaaataatgggaaattagatacataataataataacgaacaaagcataaataccttgcaacccatgataccgagctaggaccgaatgcatttcacccatcaaatcccaactgactgacgaataaatcccaataattttactaaaaccctagactgactcgttttgaaaaactcactttaaacgagcgaccaagatttttcccttgaaccacaagaacagatccccattttcccggaacaaaatccaattgcaaagaacatatgcaatgaagaggattcagagggctcttaggtctttccatttggcttgtcctacggtcaaggtcggctctgataccaacttgtcacgcccagaaattcccgaataggattccaagcagaatgtgtattaaaacccccgtccaggaccagccggggtacacaaacgacaatgttgacatacagatccacgtcttacaaacatcataaaggtcttacagaaatgcagcggaaaacaaaagaaactggagctaagccttgacttgaactgcagcgggaacaccactccacaggcatcctcgacggcacggacgaagcctactcctcagggaaaccttcatctgacacatacccgtcctctggggttgggaaaagtagagcaagactgagtactacccactgtactcagcaagtcataccggaataggggtatgatgcagggaattaacaaagaagagctagagtggttcatttgcataaaaactggcatttataaacaggaattgaatgcgaaaacggttgtaataattaagcagtattaaacatccgctgtccaacgctaacccacgttgcgacaggcccaaccatccacctaaactatccaattcaacagatttcactagggtgagactaatcacggtgaatctggttgaccgcccataaccgcgggcacggctattcgaatagttttactctgatcagaggtgtacaactgtacccacaagacacagccccacgacacgtttccgtgcgccgacatgccaccacgacataccggaaagaggccgtgacaggacccttcgcataaccccctctagccaagcacaccacacctcaggtttcacccccgtccccagcgggcgacgggcagtcccctctcgtgcctaggtgaatccggaagcgacagaggccgtcgcagggcccgccccgctccatcacgcccacccttgcctggatgcgtcgactagaggaaagctacactacaagcccagccgttgcccacgctggcttgtggtaagtacgataaattcttccagggcatcccgcgaaccggtccttaactgccatgggtgcgactagcaaaaccatgcacccacagcccaccatgtggttcattttatttaaccaacaccagagcggtggtattaaaccaacattatcatataaacctataatctaggttttaaatgagatccccaatgtgtgctagttgatctaagcatggctaagcaattcctagtccaaagtctaatcatgttataacccaagctaacaaaggagcatgatatccaaaagcatggctgtaacaataggtatcccacccatagtgatattataaaacaatgcaatatttgaaagaaaacaatagagcatttgcaaaatgggatcaacatgttcaagtgacaagcatgacttgccttgctctgctgctggagggacctcggcgactatctcgaagtacaccggagcgtcggagggatcggaatctagcgacatacaaagcaaacattgcaaacaggctataaggctactgaaacagagaacaaaaccatttttaatggattctacacatttttcttgatttactgagacttgaatgggattaaacggagctcggatgaattagttatgaattttagaagattcactgtgtttattactataaaagaaatccttaaataatttattgcgcaatatcaaccagggctgacgtcagcgagggggcgcggcgccgacatgcggggcccaccggtcagcgaccgggagagagagaaaggggggtggcggcgcgcgggcccactggtcagtggcacggggaaaggaggggcggcggcgccacgtggcggccgaaccgacggccccgatctacccaagggtagatcggacggcgacggggacctcgcggccgggggcgcgcgggcgcggcgcgagacagcggcgaccatggcgccggcggcgcggcgctcacacggcggcggcgcgcatgcggcagcggcgcaaggcggcgaccgaaggcgaccgaccggcggcggggagcggcggctagaggaggagcggcgggcggcgataaatgcggccgccggcgcggctcggcatcaaagccgaccggccggctgggttaaacggcgacggcacgcatgcgacgacggcggctaccggcggcacgggaaacggcggcggcagtcgaaggcgacggccgacgactcgaagcggcggctagcggctctaggaggagaggaagaggaaaagaagggaggggatgcctcaccgagggtggccggcgcggaggaaggcgatggcggacggcgacggcaagccacgggaggacggcgtcggctagcggacgagcttcggcgtgccctaaggaaggagaagagagggattagagagagagagatggaccatggcgatcgggatccatggccgaaggcggcggtagaggtggcgctcacccgtgcgcgtggagatgagggctccggcgacgaacctcgacggaggaggggtggacgaggtggacctcggccgcgcgaagctaacggcggcgacggcgtgagacggcggcgagcctagcggcggctagcggcggccggagtagcaaaagcggcggcggcgggtggttgcacggcgcggaggcgttggggagttcgggagaggtcggcgcaatggggaaaaagcgagagggggtgccggcgatgcttaaataggggatgggggaaccggacttggccgggagcggcgggattcgacggccgacgtgggggaagtggggaggagagagaggcgggattcggttttcgaatcccggccatctcgggcgcgggcgcgagcgggagagagaggggaacgggcgcggggaatgcggcgcacgcgcgggcgtggtcgacgtggcccgggagggacggaggcgtgggcgcggcggcggtttcggcgcggcggcgcgccgggatcggcgggaggtgggggaaggacccgacaggtgggccccacctgtcggcgaccccgagagaggaggcgggcggcggctgccaggctgggccctcggcctgcggccggcccagcaaggagggggggaaagaaggaggggaatgggccggcggcccatccgaaaaggaaaaaggagggaaaaagggagggaaaagaaaaagaaaaaggaaaaggattttccctggaattaaaaattgcactttagtgatttttaattggttgaaattatttctagagctctgaaaattccactaaaaatcctgttaatgaatttcgacatgtagaactcaagaaaaattccacatgtcaaatccgattattgtttgcattgttttcttagggttttatcctgatttcctctgcattttcttggggtcatttgtaaattacaattttggcttgggaggaaaacttcggggtgtgacactgatatgaccaaatctctgaaggtcattcctggaaccgatgctcaagatgcctaagccatagaagaagtagaacaaattaggcagagagccatatcggctatccagcaatacttgtcccaataattttgtaatcagcgaaaaaaaattttttgcactgtattgtgagatatatatatgtccccctagttttataatgtcaagagcattgataaaaatatgaaacaactaagggcgatataacaatatcggccattgtacatcggcaaactgcaaccgaatacatcagaacaactaagggcgatataacaatatcggccattgtacatcagcaaaaaccgcaaccgattacaataaaacaactaagggcgatataacaatatcggccatctcaaggcgatgcaaacgcaccggctatcatgtatcggcaatactagccgatcacgcgtcaacccaaacactcgggtgatatttcttcaaatacttgccattaagcgctcgcccaaaaacttctccatgaagtccttgcaacatgtatgctcctttagacacaaccttatggatttggaacggtccttcccaattcggcgaccacttgccaaacttactatcacgagtaccaatcggcaaaatcaatttccatacaagttcttcttctgaaaaatcttattataaggtaccactttcttattataatgccgagcaacacgttccttatccctagtaacttgtacaagtgctcgcaatcgcgactgaaccaagtcctctcgttcatcggccataagattatagtactcgtcggctattaaatcattttgcaactctgttcttcttgagccgattcgaatttcccatggtaaaacggcttcatgtccataaacaagcttataaggaggaacttggattgatccatgacaagccatccgataagaccacaatgcttcggctaaacgggtatgccactgccgaggataatcagaaattttccttttaatcaacctgatcaaactcttgttagatgcctcggcttgcccattagcttgtgcataatacggtgaagaattcaataatttgatacccatactatcagcaaattgaacaaactcatcggacacaaagattgaaccttgatcagttgtaatagtctgaggaataccaaatcggtagattatatgttcttggacatactgtattgcatctccagaatcagccttcttcaaaggaatcgcctctacccatttggtgaaataatcacttgccactaatataaacttatgtcctttactcgatggtggattaatcatgccgatcatatcaattccccatcctctgaatggccatggtttaatgataggattcatagccgacgctggcgctctctgaattgcaccaaatttctgacaatcttgacaacccttgtaatatctgaaacaatcttctaacattgtcggccaaaaataccccttacgccgaagtaaccacttcatcttatgagccgattgatgagtaccacaaatcccctcatgaacttcgccgattgcaattttagcctgatcagcgctcaaacacttaagtaatactccatcaatcgttcgataataaagctcatcatccaatagagcatacttcaacgccttatatcttaacttcctagaagccgattgagatggattttgtaaatgctgatgcacatcatatctccaatcatcggccgttacggcagcaacttcaacctgaacatctttgatcatcgacttatacctcgatgcccctgagctaaatcattggcctcaacattctgctctcgagacacatgcttcaaagtcactagccgaaacgtcttcatcagttattgccacttctcattataaaccatcaacgtatcattcttgcactcatattctcctgccaactgactgataactaacaaagaatctcccataatttcaatagcatcggcttcaacctccttgagcaattgcaaccctttaagaactgcctcatactcagcttgattattcgtcgcataaggtttaatagtataagcaaactcaaagcatgccccccgaggcgaaattataaccaagccgataccacaaccatgagcacaaaccgacccatcaaaaaataaagcccatggcacaatctcaaccgagccgattgaatcatcacgatagtcaactatgaaatcggctatagcttgccctttgactgccttcggcgattcataccgaagatcgaattcacttaatgaaaatatccattttccaacccttcctttcaaaattggaactgacaacatgtacttaaccacatcggccttacatatgacagtgcattcattggacaacagataatgccttaaccttgtacatgaaaaatataggcacagacataacttttctacagaagaatatctagtctctgcatccaagagtctacgacttaaataaaacacaaccctttcttttccttcaagctcttggatcaagactgagccaattgacttctcaccggccaacagatataaccaaaaaggtactcctttctgagtagaaatcaaaactggaggagaactcaaatattccttaatactatccaaagctttttgctgctctgccccccaagtaaattgctgattggccttcaatcgtaataatgacgtaaaaggctctaatctaccagacaaattagaaataaaccttctaacga

SEQ ID NO: 24713 - DNA, 3938 bp, Oryza sativa
atttcgacatgtagaactcaagaaaaattccacatgtcaatccgattattgtttgcattgtttcttagggttttatcatgatttcctctgcattttcttggggtcatttgtaaattacaattttggcttgggaggaaaacttcggggtgtgacaaacctaccccccttaaacggaatctcggccccgagattcggaggagctggtgaagaggtgcggatgggcggctttcaactcatcttccctttcccaggttgcttcctcttccgaatgatgactccactgaactcggcaaaaccgggtgaccttgtttctggttctcctttcactggtatcaagtatgcgaaccggcttctccacatatgtcaggtcctcctggatatcaatgtgttccgaatcagcctgttcttcgggtacccttaaacacttctttaattgggacacgtggaacacgtcatggatgccgatcatattggatggaagttctagctgataagcaacttctccccttcgttccaagattttgtatggtcccacgaagcgtggtgccaacttgccttttgtctgaaagcggtgtactccccggagcggggtgacacgaagatacacgtaatctcctgcctcaaaagtgagctcccttcggcggttatccgcgtagctcttctgtcgagactgagcaattctcaacctttccctgatgattctgactttctcttctgcttccgctaatacttccgttccgaacagttgacgttcgcctgtctgatcccagaaaagaggtgtgcggcacttccggccgtatagagcttcaaacggtgccatctgtagactggcctggtagctgttgttatacgagaattccgcatatggtaagcttttgtcccaagctccaccaaaatcaagagcgcaagctcttaacatatcttccaggatttgattgactcgctcggtctgaccatcagtttgcgggtgataggccgtgctgaaattcaaacgggtccccaattcttcctgcagcttctgccagaactttgaggtgaactgactacctcggtcggatactatcttcttgggtaccccatgcaaacacatgatccttgcgagatacaattctgccaatctctttcccgtataggtggtatgtactggtataaagtgagccaccttggtgagtcggtccacgactacccagattgaatcatgtcccgatgatgtccggggcagtcccgttataaagtccattccaatctcctcccatttccattccgggatttgaagaggttggagtaaacctgctggtctttggtgctctgctttcactcgctggcaaacatcgcagagtgcgacgaattcagctatttctctcctcatgctgacccaccaaaacttctctttgaggtcttgatacattttagtgctgcctggatgaatggagtactgggtctgatgagcttcggtgagtatcagatccttcaattccttgtcgtccggtacacacaatctttctcccatccagattgtgccatgctcatcctcaaggaaatcccgagcctttccgactctcatgttctttttcagttctgctatttccggatcatttacttgagcggctctaacttgatccacgagcgtaggccgtgcctccagagcggctacgaacccgtgttcaacaattcccatgttgagatgttcaagctcctgtcgcaattcctcacacatgtcctcgatgcatagagcagtgcagtaacttttccggcttaaagcgtctgccaccacattggctttacccgggtggtagtgaatactcatgtcatagtctttgattagttccaaccatcttcgttgtcgaaggtttaggtctggttgggtgaagatgtatttcagactcttatggtccgtatatacttcgcagcggttgccaatcagatagtgcctccagatcttcaaagcatgaaccactgctgccaattccaagtcatgagttggataatttccttcgtgtggacgcaactgccgcgaggcatatgcaaccactctgccctcttgcattaggacacatccaagtccgtgacgggatgcatcgcaatagacttggaagtctttcgtctggtcgggcaggatcaaaaccggtgcggatactaatttccttttgagctcctcaaagttcttgtcgcactcagctgtccatttaaacttctcgtctttcttaagcaactgagtcatgggtcgggcgattcttgagaagttttcgatgaaacgacggtaataaccagccagtcctagaaaacttcgaatctgcgacactgtcttcggtggggtccacttggtaaccgactccacgttcgatggatcaactgctacaccctggggctgtaatgacatggcccagaaatttgacttccgtcaaccagaagtcacacttgctgaacttggcgtatagctggtgctccttcaacttttcgagtaccaaacggagatgttgctcatgttcttcctcggattttgagtagataagtatgtcgtcgatgaacaccacaacaaacttgtccagaaattccatgaacactttgttcatcagattcatgaagaatgcgggtgcgttagtaagtccgaaggacataaccgtacactcatatagcccgtaccgagtggtgaaggccgtcttgggaatatcctcttcccggattctcaaatggtggtagcctgatcgcaggtctatcttatagaacactttagctcctttcagttgatcaaataaatcgtcgattcgcggcaaaggatatttattcttgattgtgacctcgttaagtgcgcgataatcgacgcacatcctctttgtcttatcctttttatccacaaaaatgaccggagcgccccaaggtgaagtgcttggtcgtatgtaccctttctgcagctgttcatcaacttgcttcttgacctccgctaattcgttgagccgccattctatacggtctcttatagattggagcggttcctggtgccaaatcaatccggaattcaatctccctcttgggtggcatggtggtgaggtcttcggggaacacctctggatactcgcagactatgggtatgtcctccaattttctcaagttcttctattcggtgtccactgggatttccgtctcaatctgattcaacgaggctcctttctttggcgagactagagatttgtacaccacggtttctcctttctcattggtcagggtgactgtgcgattcgcacaatcgatgactcccttaaacttggtcagccaatccatcccaagaatgacatctaggtctttggattcgagaaggatgaggttggctagaaacggtgacctttgaatttctattgttatagaagggctgaattgaaccgaagtggagctattccctggggtatgaacccgcatcggtgtgctaagttcctctcttattaacccatgcatcccgacaaatttcttggagatgaaagaatgcgttgcaccagaatcaaaaagtactgttgcagggattgagttaacaggaaacgtacccagtacgacctctggtgctgcttgtgcctcctccgcagatgcgtggttgacacgagcctggataaaccttggtccggcacgcctgggcttcgggcatttgtcagcgaagtggccaagctcgccacagttgaagcaggaccctggttttgctcccgtctccttcttggcttgtgcgggctggcctgactgtgccggtgccattggtgggcgtggagctgcaccgcggttgggctggcctccatggtggttctgactgccactagtgccctgatggaagttgctagggttgaacgggcggtgctggcggacgatcatggtggtaggtccaccctgctgtccgggagtgaagcgcggtcggtgctgactaccttggttggaccggaactgcgccgcctttcttt

SEQ ID NO: 24714 - DNA, 1829 bp, Oryza sativa
  unsure (1)..(1829): unsure at all n locations
gattgattgccccagccgccccatcaagttgaccaatgcaaaagaagaggtggtaaccttccagtctccagtgccgcggaagccagggattagtttaaaccaggctgctggtgaagaacaagaggtagcagtggagaaaaccactaagaagctggaggatattcccatagtcagagagtatccagaggtttttccggacgatctgacaacaatgccaccaaaaagggatatcgagttccggattgacttggtacctggaactgcaccgatccacaagaggccttacagaatgggagccaacgagttggcggaagtcaagaagcaagtgatgaacagttacagaagggatacatccgcccgagcacgtcgccttggggttctccggttatctttgtggagaagaaagacaaaaccaagaggatgtgnncgttgactaccgcgcanctcaatgaggtcanccatcaagaaacaagtatcctttgccaaggattgatgatctgtttgatcagttgataggagctactgtgttctctaagatagacctgcgatcaggctatcaccagttgaggatccgcgaagaggatattccaaagacagcattcatcactcggtacgggttgttcgaatgcacagttatgtctttcggactcactaatgcacctgccttcttcatgaatttgatgaacaaggtgtttatggaatttctagacaagtttgtcgtggttttcatcgatgacatactaatctactccaagtccgaggaagaacatgagcagcatcttcgactggtacttgaaaagttaaaagagcaccagctatatgccaagttcagcaagtgcgacttctggcttaaggaagttcagtttctcggtcacatcgtgaatgctcaaggagtagctgtggatccagcaaatgtggagtcagttaccaagtggaccccaccaaggacagtcactcaggttcggagtttcttaggacttgcgggctattaccgccggttcattgagaacttctctaaaattgctaagccaatgacacagctattgaagaaggaagaaaagtttatctggtctgctgaatgcaataggagttttgaagaactcaaacgacggttggtgtctgcaccagtcttaatcctgcctgatcagacgaaagatttccaggtctattgtgatgcatctcgccaggggctaggatgtgtgttgatgcaggatggcaaagtggtttcttatgcttcacggcagttgcgtcctcatgaaggcaactacccgacgcatgatctggaattggccgcagtcgttcatgctttaaagatttggtggcactatctcatcagtaaccgttgtgaggtatatacagatcaccaaagtctaaagtacatcttcacccaacctgatctgaattttcgacagcgaaaatgggtggagcttattaaaaaatatgatttgggaatacactatcatcccggcaaggcttatggggtagcaaatcccttgaccagaaaaagtaactgcaccgtccattggttaaaggaactatgctgtgaagttccacatgaattggaacatttgaaccttggtatagttgagcacggattcgtggctgccctagaggcacagcccacactggtggagcaggttcgcatagctcaagcaagtgatcctgaaatagcagagctcaaaaagaacatgagggtcggaaaagcccgaggttttgttgaggatgaaagaggaacaatctggatgggaaaaagattgtgtgtacccgaaaacaaggaattaaaagacctgatactaaaccgaggctcatcaaactcaatattccattca

SEQ ID NO: 24715 - DNA, 10392 bp, Oryza sativa
cagctcgacttgaatctccgacagcgaagatggctggagttgataaaagattatgacatggggatacaatatcatctaggcaaagcaaatgtggtggcagacgctttgagcagaaagagctattgcaatgcagtatgtaccgaaggcatgtgtgacaaattgcagcaagatcttgagcacctaaatttgggcatcgtggaacacgggtttgtagctgctctagaggcacggcctacgctcgtggatcaagtcagagcagctcaaataaatgatcctgaaatagctgagctgaagaagaatatgagggttggaaaagcccgagattctcatgatattgagcatggcacaatctggttgggaaaaagattgtgtgtacctgaagacaaagaactgaaggatctgatactcatagaagctcatcaaactcagtattcaattcatcccggcagaactaaaatgtaccaggaccgcaaagagaaattctggtgggccagcatgagaagggaaatatcagagttcgtcgcgctctgtgatgtttgtcagcgagttaaggcagaacatcagtgacctgcaggattgcttcaaccccttcagatcctggaatggaaatgggaagaaatcggaatggatttcatcactagtttgcccaggacatcatcagggcatgattcaatttgggtagtcgtggatcgcctcacgaaggtcgctcatttcattccagtgcacactacctatactgggaaaaggttggcagagctctaccttttaagaatcatgtgtttgcatggggtacctaagaagatagtatttgatcgagggagtcaattcacttcaaagttctacaagaagaattggggactcgtttgaatttcagcacggcttatcgtccgcaaactgatggtctgaccgagcgagtcaatcaaatattggaagatatgttgtgagcctgtgcacttgattttggcggagcttgggataaaagtctaccgtatgcggaattctcttacaacaacagttatcaggccagtttgcaaatggcaccgtttgaagcattgtacggacggaagtgccgcactccgctcttctgggaccaaactggagaacaccaactgtttgggacagaagtgctaaccgaggcagaggagaaagtcagaaccgtcagggaaagattaagaatcgcccagtctcggcagaagagttatgctgataaccgccgaagagagctcactttttaggcaggggactatgtgtaccttcatgtcaccccgctccggggagtacaccgtttccaaaccaaaggaaagttggcaccacgctttgtgggaccatacaggatcttggaacgcagaggtgaagttgcttaccagcttgagcttccatctaatatggctggtattcacgatgtgtttcatatgtctcaactgaagaagtgtttgagggtacccgaggaacaagctagtccaggaagatctgacagatgtggagaagccgatacgtatcctcgaaaccagtgagagaaggaccagaaacaaggtgatcaggttttgcaaagttcagtggagccaccactcagaggaagaggccacctgggaaagagaagatgaactgaaggccgcccatccgcacctcttcgccagctcttccgaatctcggggtcgagattacgtttaaggggggtaggtttgtcacgccctgaagttcccctttttgctttaaaattcataaaataaattgtccgaagaaatgatttaatttaacctagaggtgaatccctaaattaataaatgcaaataataatcggaatcgacatgtggaatttttcttggattctacatgtcaaaatatgctaataggatttttagtggaattttcagagccttggaaataattttacctaattaaaataagcaaagtgcaatatttaaatcccaggaaaatctttttttcctattcccctcttttctttttcctcttttcctcatttgggtcgtcggcccactcctcccgcgccgccctcctccttgctgggccggcccacatgtccctccctcctctctccgggtcaccgataggtggggcccacctgtcggcctcgtctttctcctccagccggcagcaacagccgccgaaaccgccgcccacgccgccgcttcgtccgcatccgcaccccactccgtgcccacacgcccccccacgtcgccgcccacgttgcccgcccccttcgtcgccttcccgcccgcgcgcgcgtgcccgcatagaggcgggtttaattttgaatcccgtctctatcgctctctctctctctccccaaattccccacgtcgtcaccggccaaatagagcccattcccggccacaaccgccccacccgagcccctataaagcttccccgcaaccccctctctcgtttccctcactcgccggctgctcccgagctctccaccgctcccgcaccgtgcaccatccatcgctgccatctccactcctccggccaccgctcgccgccgagctaagccgccgccgccaaagctaccccggccgccgcatcctcatccaatcccgccgccggaacgctgctctctccgtgcgccggtgagtttcgccgcccttccaatctccgaccggccacgctagccgccgtgggcttcctcccaacccctaagtcctctccattttcctccgtaggagcaacctccgcccgcctacccctccgcttgtcaggtcatcgccgccgccttcatccttcatgccggccgccgtgcctgctggtgagaactccctctcctccctctttccctctctcccgtgtgcgccgccgtcctccgcgcgcgcggcgtcgccttcggccgccgccactgcttttcgcgccgcccaccgccgcttctcgcgctggtagccgtcgccggcaacgacccgccgccgccgcatcgccatcatagtcatccggcttgaagccgagccgagcaaagccggtgccacctcctcactcatgagccactgcccagtgggccctgtctaccagtacccactacctcacccttgtgcctctgacccgtgggtcccgcacgtcggcgccgcccccctccttgatgatgtcagccttgggatgagttattgcgctataaattgattaagggtttttcttttatagtaaaaacacagataatcttctaaaattcatatctcattcatccaagctccgattaagtccattcaagtctcagtaaattcataaaaatgcatagaatctagtaaaaatggttttgtttcctatttcagtagacgtatagcatgttttgcttgtttgctttgtttgtcgcgtagatttcggccgtttcgtcgatccgcggttccgcgaagatgttgctgtggtctcatcaacacgagagcaaggcaagtcatgcattataattgatcatgttgtacccaatttacaaatgtcccacatttctatcaaatgttgcattattttacaatatcatgtgggatgggtcctactactcagccatatattgtttaccttatgccattgataacttgagttttaaaatgactagatgttggtttaggaaatgcttagccatgcttagttcaactagcacacaaagaaggaatcacattaaagcatagactttgattaatggcatagctttggaatagagccaccgcaatggtgttagttaattaaaatacactacacggtgggccgtgggtgaatggttttgctagtcgtgcccacggcgattatggatcagttcgcgggatgccttggaagaacttatcgtacttaccacaagccagcgtgggcaatgtcctgtcacggcctcttttcggtatgccgtggtggcatgtcgacgcacggaaatgtgtcgtggggctgtgtcttgtgggtacagttgtacacctctgatcagagtaaaactattcgaatagccatgcccgcagttatgggcggtcgaccagattcaacgtgattagtctcacccctagttagcttttgaactggtgtagttcaggtggttggttgggcctgttgcaacgtggtgtagcattcgacagtgattggttaatattgattaattactgcaactgttttactgctttcaactactgcttttaaatgctagctttatgcaaaagaacctttttgcctcccttggatatatcctgcatcatacctcctcttccggtatgacttactaagtacagggggtagtactcagtcttgctctcttttcccccactccagagttgaagtccttctcaattggatatgtctcgaagaagttggttttgtcgctgccgtcaaggatgcctgtggaaaggaatcgcccgctacaggagtcaagtcttcaagcttagctcgcttttatcttttccgctggatttgtaatcttttatattttttgtaagacgtggatctgtaggtcaagaattgtcgtgtgtgtaccctggctggtccaggataggggtttaatgcacattcagcttagaaattctggctcgtgaatttctgggcgtgacatctacctcctcaaatcgagctgtagatgtgccaccaggaaaaagaaatggaagtaagtgcgatctccctatcatcaacttggacatcttggacgctggtgaattggcaaagctgtgccatgaagacgtcatgcgtgcagcattggagtagtagggcttcttacaagtaaccaaccacggcattgttggcggctcttaaatgccgattctataccgccaacatctgcataaagatcagacaataaaacatccaacatagtgataggtgcttaatctcacgtatttcacaagtgttgatatatatttatatgcagatgataaactctgatgttgggaggaaatctagactaaagtgaggagaattctgtatccatacaaggatgggctgtgaacttcatcgaaacatcagtaaattagcccaaaataccaagaaatggataaaggagaaccaggggaggacatgggccaaaggccaggccagatggatgtcacgccctgaagttttcccccctttgcttgctttaaaaattggctaaataaatcgtccgaagaaattatcttaattaacctagagctaattccctaattaataaatgcaaataataatcggaatcggcatgtggaatttttttttggattctacatgtcacaatatattaacaggatttttagtggaattttcagagccttggaaataattttaaccaattaaaatggagcaagtgcaattttaaattccagggaaattcctttttctttttctttttctttttcccctctttttcctcctttttgcgaaatgggccgtcggcccatttcccttttcctcccccccctcctccttgctgggccggccgcaggccgaggcccagcccagtagccggccgcccgcctccctcctctcggggtcgccgacaggtggggcccacctgtcgggcccgtctcccacctcccgccgaccccggcgcgccgccgcgcccgcaacggctgccgcgcccacgcctccgcccctcccgggccacgtcggccacgtccgcgcgtgcgccgcgttccccgcgcccgctcccctctctctcccgctcgcgcccgcgcccgagatggccgggattcgaatttcgaatcccgcctctctctccgccccactcccccacgtcggccggcgaatcccgccgctcccggccacgtccgaccccctctccccctatttaagcatcgccagcgccccctctctctttttccccatttcgccgacccctctcgagctccccatcgtccccgcgccgtgcaaccacccaccgccgcttctttccgctctccggccgccgctagccgccgctagactcgccgccgtcttgcgccgtcgccgccgttagcttcgcgcggccgaggtccacctcgtccgcccctcctccgtcgaggttcgtcgccggaaccccctccccacgtgcacgggtgagcgccatccctaccgccgccttcggccatggaatccgaccgccggggtctacctccctctctctaatccctctctcctccttccttagggcacgccggagctcgtccgccggtcgccgtcgcctcccgtggcttgccgccgccgctcgccatcgccttcctccgcgccggccaccctcggtgaggcatctcctctcctctccttccccgtttccccgtgcgtcgccgtcgcccgcgctcgccgtcgttttgggtcgttgccgccgtccgctgccgccgctttcgcgtcgcctccgctgccggatgctgtcgccggcgacgcgacgcgcccgcaccgccgccgctagctcgggtcggccgatcggctttgacgccgatccgagcccggggttgccgccgccgtcgtccgtccgatcggcctgagggcgatccgggccgtcggttcggccgccacgtggcgccgccgccccatcctttttcccgtgccgctgaccggtgggcccgcgagccgccgccccctttctctctctcccgtgccgctgaccggtgggtcccacatgtcggcgccgcgccgccccgcgctgacgtcagccctggaatttattgcgtaataatttatttaaggatttcttttatagtaataaacacagtgaatcttctaaaattcataagtaattcatccgagctccgtttaagtccattcaagtctcagtaaatcaagaaaaatgcaaagaatccattaaaaatggttttgtttcctgtttctgtagtcttatagcatgttttgcttgtgtgctttgtttgtcgcgtaggtttcggccgtttcgtcgatccacggtttctcgaagacgttgctgaggtctcgtcagtgcgagagcaaggcaagtcatgcaatacgtttgatcatattgtacccaatatacaaatatcccgcatttctattaaatgttgcattcttttacaatatcatgtggaatgggtcctattactcagccatttattgtaccatatgccattgataacctgggtatcaaaatgactagatgttggtttaggaaatgcttagccatgcttagttcaactagcacacaaatggggatcaccttattacatagactttgtctattggcatagctttagattggtgccaccgcaatggtgttagttaattaaaatacattgaatggtgggttgtgggtgcatggttttgctggtcgcacccatggcagttaaggaccggttcacgggaaaccctgggagacttaccgtgcttaccacaagcgggagtgggtaactgcttgatctgaagtatagctcgaccctttcctaggcaccggtggcgagggtgggcgtgatggagttgggtcggccggggtgtccggttgtccagctgccggattcaccgcggtgcaagaggggaccgcccactgccttttgaggggtgggggtgaaaccttagcgtggtgtggatggttaggggagggttatgtggagggtcttgtcacgatccccccctttgcagtatcatggtgatacttcggggcatggcgacatgtgtggaatcgtgtcttgtgggtacagttgtacacctctggccagagtaaaactattcgaatagccgtgcccgcggttatgggcgatcaaccagattcaccgtgattagtctcacccctagtttagcttaatgaactggtgtagttcaggtggttggttgggcctgttgcaacgtggtgtagcgttggacagtgtttggttaatattgattaattactacaactgttttcctgctttcaactactgcttttaaatgctagctttatgcaaaagaacctctagcctcctttggttatatcctgcatcatacctcctcttccggtatgacttgctgagtacagtgggtagtactcagtcttgctctcttttcccccacaccagagctgaagatcttcctagttggagctgttttgtcaaagttggtttcgtcgctgccgtcaaggattgcctgtggagtggagccgcccgctgctgaagtcaagcttcccggtttagctcgcttttatcttttccgctgcatttgtaatcttttctatttctgtaagacgtggatctgtatgtcaacaattgtcgtttgtgtaccctggctggtcctggacagggatttaatgcacattcagcttagaaattctggttcgagaatttctgggcgtgacaatggacctagcccaagttcggccaaaccaccaggttcggcggaaccactatctccaccattggatgtggggtttggcgtggacgttccagatgcatccctgatggcggttggagggcacttcggacatttcctcttcgccaaccgtcatacctacctctatataaaggcttcactccctcacttcacacacacacttccaaggttgagctgaattataagaggctctattgtactatattgtataatagaataggaagagagtagagtagaaggagtcggaagaattccggagttgtcggtaatcttctcctatttcttttaatctatttattactctgaattcaatataatattcttcttgagtaattagatttatcttgcgagaattacctcttggttagttcctaattagcatacgggattattgttcactataatcaactaaaatatagtgattgctttggtgagttataaacaccaaagtagatagtaattgctttgacgtggtgtttaggtaattgttatccagtaattgttgcgtatcccacagtacgttgaggtgggtgtagaggtggtgacagccctcgagatcaatgaagtcctccctgtccgggtacgtagtagagcgacatctgggaacagcgggttgccagtgcctgaagtattgcgttaggattaaaattaagcattccctagacactgtttctcactagtgaatcctctctatcctggactatcatttgcttggtgtccttggatgaaccagaggaacctctcatcacacacgttcccttggattcgatacccttggaatactccgtaggggaagtgctacatcggtatatccatgcgcttgcggattttatctgtaactgtatcaaatactaacaggcatggtgcacgcgctgctgcatgagcatcatgatgcttgggtgaccagccatttgcctgaaccgtgcggcgaagacataatgcacacaacatcaaagaagctgctcaacttctcgctagagagtaactgatgggcacgacgatgaccacatgtcaagagcagtcctcatgatcaacctagtggacaccattctcccccccaaattaaagaacatgccgccaactctgatccctagaatagtgactttatcatcatgctagacctcgagctatggcgaaaggatgcaacgtcaccttagttatctgcttcctcatgccccttcacatgtagatctggtagatgcataggggcatatctaggctaactctggcaacggtgaagaacatcctcaagtcgttgtccagggagagggatggtgggtgagatgaggtaaggcaagcgcatctactggagtgccggggtgggcccagcacctcccattgggccacagaaccctccccccaaccacgtggtgtgtaagatcaagtgcataattaagcatcaacttgtccattagcatcatatcaaaagaccagcgatggctcgccttctttgtgaagcttctttgcttgggttactcatgcagccacgggtaggcgatgcactgggctcgtctctctgacttttcgtcctcggtctaattgcctgaatggccatcgtagcgtcacctagtttcaccggtgagcatgtgtcgggacccggttttataacacagggatccacatgtcttcacaataccaactacctagatcggtaggttggcatacacatatataaacatatctgtgttgatggaaaacacgtggcctgggggatctgcttaactccagtgcaggtccaaaactcgccttcggatgtatgagcgtgctagttgatttgatcctgcaatcaacaagaaacaaagacaaagaaaccgtgattaaatccataaatgatagtcgatcggctagatgccgatgacatatcatttatctttgagccgatgtcatatgtgaatcgatcggcaattgttaaggaaacaagtcggaactatatctacccgatcggctgtagatatcaatgatatataatccttataccgacatatacttaaaccaagtgattgggatagatcggtcaccttgccgaagcagtataaatcacttaggttgaaatatatgttaataataagattatacatattcatagcatagccgatcaaatagatctagcatgtatcggctaatactccgatactactttatattaagatattaaagcaaatagaatat

SEQ ID NO: 24716 - DNA, 1361 bp, Oryza sativa
gttccattttaatcggttaaaattatttccaaggttttgaaaattccactaaaaatcctgttaatatattgtgacatgtagaatccaaaaaaaaattccacatgccgattgtgattattatttgcatttattaattagggaattagctctaggttaattaagataatttcttcggacgatttatttagccaatttttaaagcaagcaaaggggggaaaacttcagggcgtgacaaacctaccccccttaaacggaatctcgaccccgagattcggaagagctggcgaaaaggtgcgggtgggtggccttcaactcatcttctctttcccaagtggcctcttcctctgagtggtggctccactgaaccttgcagaatcttattactttgtttctggtctttctctcgctggtttcgaggatacgagttggcttctccacatacgtcaagtcttcctggatttcgatttgatccggacttgcctgttcctcaggaactctcaaacatttcttcaactgggagacgtggaacacattatggatgccaagcatgttggagggaagctcgagctggtaagcaacttcacctctacgttccaaaatccgatatggtcccacaaagcgtggtgccaactttcctttggtttggaagcgatgtactcccctgagcggagtgacacggagatacacataatcccctacttggaaaacgagctcccttcggcggttgtctgcatagcttttctgccgagactgcgcgattctcaatctttccctaacagctctgactttctcttctgcctcatttaaaacttctgtaccaaacaactggcgttcccctgtctgatcccagaagagcggagtacgacaccttcgtccatacagtgcttcaaatggtgccatctgcagactagcttggtaactgttgttgtacgagaactcagcatacggtaagcttttgtcccatgctccaccaaagtcaagcgcacaggctctcaacatatcctctagtatttggttgacccgctcggtctggccgtctgtttgtggatggtaagcagtgctgaaattcaaccgggttcccaattcttcttgtaatttctgccagaactttgaagtgaattggcttcctcgatcagacacgatcttcttaggtacaccatgtaaacacatgattcttgctagatagagttctgctaatttctttcctgagtaggtagtgtgcaccggaatgaagtgagccactttggtgagtcggtcaacgactacccaaatagaatcatgccccgatgacgtcctgggcaaccggtgatgaaatccattccgatttcttcccacttccattgtggaatatgaagtggctg

SEQ ID NO: 24717 - DNA, 1788 bp, Oryza sativa
gcagatactaaccttttcttgagttcttcaaaactttggttgcactcagctgaccacttgaatttttcatctttctttagcaactgtgtcatgggtctggcaatctttgagaaatcttcgatgaacgacgtttaataacccgcaagtccaagaaaactctggatctgagaaactgtctttggtggggtccacttagtaactgactccacatttgatggatccactaccatgccttgagcagaaatgacgtgacccagaaatttgacttccgataactagaagtcacacttactgaacttggcatataattggtgctccttcaatttctcgagtaccagacggagatgttgctgatgttcttcttttgactttgaatagatgagtatgtcgtcaatgaacaccacgacaaacttgtccaaaaattccataaacactttgttcatcaagttcatgaagaaggccggtgcgttggtgagtctgaatgacataactgtgcattcaaacaacctataccgagtggtgaaagctgtcttggcaatatcctcttcccgaattctcaactggtgatagcctgatcgcaggtctatcttggaaaacactttagcttcttttaactgatcaaacaggtcatcaattcttggcaatggatatttgttcttgattgtgacctcattacgggcgcgataatcaacgcacatcctcttggtcttgtctttcttctccacaaagataaccggagcaccccaaggtgaagtacttgatcggatgtaccctttctgcagctgttcatcaacctgcttcttgacctttgctagctcattagctgccattctgtacggactcttgtagatcagagcagttccgggtgccaaatcaatccggaactcgatttctctctttagtggcattgtagagaggtcttcaggaaacacctcagtatactcttgtactataggaatatcctccaattcctttagacttttcttcactatttctgtctgatcctcaattgcagcctgattcagacttgctacagactcctgcgacactggagaaaggaaggtgatcttttcccctttgtcgttggttagggtgatggtgcgacttgcatagtcaatcacccccttgtgtctggtcaaccaatccattccgagaatgacatctaggtctttggattcgagaaggatgagattggatagaaattgtgaccttttgatctctatagacattgaggggcagtagtgtgcggtgttcatgtcatctccaggggtatgaacccgcattggtattttaagttccactacggataatccatgtgtcccagcaaacttcttggaaatgaaagaatacgaggcacccgaatcaaaaagaactgttgccgggtgtgagttgacaggaaatgtgcccagcatgacctctggtgctgcctgtgcctcctctgcagacgcatgattgacccgggcctgaacgaacctaggtctagcgcgcttcagcttcggacacttgccagcaaagtggtcatacttgccatagttgaagtagggtcctggctttcttgcagactccttcttgagctgttttggctgagctgacacagctggcagttctgactgagccggtgccattaatgggtggggagttgagttgtcgttgccctgctcacttctgtaatgactgccaccattgtagtcgttgttgaagttactcgggtagtagggacggtgctgtcagacgatcagggtggaaggcccaccctgttgtcccatcatgaagcgaggcttctgatcg

SEQ ID NO: 24718 - DNA, 11551 bp, Oryza sativa
ccatcaggagggggataggtagaaataagagaaaggaagaaaacagatggctcggaaactaatctttcttataaatttaagtgcatttatctgacttgaattaaaacactgaaaaggtagcaaacaactcctaattaaggcagtcataccactgacacatgatattgaccatcgactaacccacaagcacaaacctaaacacagaaactagcaagcaaacaaaactaagaaaatgataaggctaaaggtggcgactctgaagcttggagcggcgcttgcgatcgcagaataggtctgacatctaaagtagacaagggataggaaccaatacatgctcaaatccaaattaaacaaagcaacaaatgactcaagtaactcgccgagcatgatgatttttgtgcatggaacatttttcatgaacccagacaaaagatactaatgtaactgactaaacgataaattaatgcacaaaaatacatgaatagctataatgatacgcataaaatgtccccatcgaacctagacacggcttagtgcatatcacccaacaattcccgaccgactatcgaataaattccgaataaacttttactaaaaccctagactgtccctagtcgagaaatccaattaaataagtgaccaagattttcccacaaatgaaaagaacaaaccccaaaattttcccgaaacaaattcaagtgcaaagagcatatgcagatgaaaaggtttcagagggctctttgggttttccagttggcttgtcctacggacaaggtcggctctaataccaacttgtcacgcccagaaatacacgaaccagaatttctaagctgaatgtgcattaaacccctgtccaggaccagccagggtacacacacgacaattgttgacatacagattcacgtcttacaaaacaatataaaagattacaaatgcagcgggaaagataaaagcgaactaagcctgaagacttgactcctgcagcgggtgattccattccacaggcatccttgacggcagtgacgaatccaacttcttcgagacatctccaactgagaaggacatcaactctggagtgggggaaaagagagcaagactgagtactactcactgtactcagcaagtcataccggaaaaggaggtatgatgtaggatatatccaagggaggcaaaaaggttcttttgcataaagctagcatttaaaaagcagtagttgaaagcagtaaaacggttgcagtaattaatcaatattaacaaatcaatgtccaacgctacaccacgttgcaacaggcccaagcaaccacctgaactacaccagttcaaaagctaactagggatgagactaatcacggtgaatctggtcgaccgcccataactgcgggcacggctattcgaatagttttactctgatcagaggtgtacaattgtacccacaagacacagccccacgacacgtttccgtgcgccgacatgccaccacggcataccgaaaagaggccatgacaggacccttcgcataaccccctctaatcgatcgcaccacacctcaggattcgcccccgtccccagcaggcaatgggcagcccccctctcatgccgcggtgaatccggaagccaatcaaccagacaccccggccgacccaactccatcacgcccaccctcgcctgggtacatcggctagaggaaagctacactacaagcccagccgttgcccacgctggcttgtggtaagtacgataagttcttccagggaatctcgcgaaccggtccttaatcgccatgggcaggggtagcaaaaccatgcacccacggcccaccatgtagtgtattttaattaactaacaccattgcggtggctctattccaaagctatgccattaatcaaagtctatgcattaatgtgtttccccctttgtgtactagttgaactaagcatggctaagcatttcctaaaccaacatctagtcattttaaaactcaagttatcaatggcataaggtaaacaatatatggctgagtagtaggacccatcccacatgatattgtaaaataatgcaacatttgatagaaatgcgggacatttgtaaattaggtacaacatgatcaattataatgcatgacttgccttgctctcgcattgatgagaccacagcaacgtcttcacggaaccgcggatcgacgaaacggccgaaatctacgcgacaaacaaagcacacaagaaaaacatgctataagtctactgaaacaggaaacaaaaccatttttactatattctattcatttttatgaatttactgaatggacttaatcggagctcggatgaattagatatgaattttagaagattatctgtgtttttactataaaagaaaaacccttaatcaatttattgtgcaataactcatcccagggctgacgtcatcaaggagggggcggcgccgacatgcgggacccatgggtcagaggcacaagggagagggagggggtactggcaggcggggcccaccgggcggcggttcatgggggaggaggtggcaccggccaggctcggctcggcttcaagtcggccgcccgatgatggcgatgcggtggtggcgggtggttgccggcgacggcaaccggcgcgagaagcggcggtgggtggtgcgaaaagcagcggtggcgccgaaggcgacgccacgcatgcggaggacagcggcgcacacaggagagagggaaagagggaggagaaggagttttcaccggcgggcacggcggccggcgcgaaggatgaaggcggcggcgacgacccgacgagcggaggggcagacgggcggcggttgcacctacggaggaaaatagagaggagttagtggttgggaggaagcccacggcggctagcgtggccggccagagataggaagggcagcgaaactcattggcgcacggagagagaggcgttccggcggcgggattggatggggatgcggcggccggggtagctttggcggcggcgaagctaaccgcggcggcagcttgattctgcggcggctctagcggcgacgagcggtggccggagaagtggagatggcggcgatggatgggtgcacggtgcgggagcggtggagagctcgggagcggcctgcgagtgagggaaacgagagatggcgttgcggggaagctttatagggcctcgggagaggcggttgtggccaggaatgggctctatttggccggcgacgacatggggaaggtggggagagaaagagggagagagacggaattcaaattgaatcctgcctctatgcgggcacgcgcgcgcgggctggaaggcggtgaagggggcgggcgacgtgggcggcgacttgggggggcgtgtgggcacggatgcggaggaagtggcagcgtgggcggcggttgctgccggctggaggaggaagacggggtcgacaggtgggccccacctgtcggtgacccggagagaggagggagggagacgtgggccggcccagcaaggaggagggtggcgcgggaggagtgggccgatggcgcaaaggaggaaaagaggaaaaagaaaagaggggaaaagaaaaaaagattttcctgggatttaagtattgcatttttcttattttaattgtgtaaaattatttccaaggctctgaaaattccactaaaaattctgttagcatattttgacatgtagaatccaagaaaattccacatgtcgattccgattattatttgcatttattaatttagggattcacctctaggttaaattaaatcatttctgcggacgatttattttatgaattttaaagcaaagaggggaactttagggcgtgacagtagacaaacctgtcgggtgggctccttaaggtgtgctgtgctggcatgcctacgtgtctttccacgtagtcaaaagtggcaaatagttaagaaactcccctctcttcgatgacaattttgttgggatgaatacataaagtggtatttggaaagtggtattttgtaagagtggcaaattgtttaattcgtaggagaatgaatgaattgagaaatggatcagttatggtgtggtaaaagggaataaacaggtgagacatgattgatgttagtgaaaacttaccgtatcctcagggttaaaggatgcggggtgggagaggcgcagtggacctaacaataatagcgtgtatgtagctcatagttctaattatttaaacttattctcgattataatacacaatggaattatgcatgtgtagtttattttgtttgtttgaatgtattatatttttctctagtaccaattatgtataagagggatattatttccgatagttgatccaaagtttatcaattcttcatcttctatagaaaaataaaaagatggcttgactaagctggatcaatgagagcaacgtattttgcttagtttcacccagacaacatatcaactgtcctcttgtaatatgtatgtcggcttggatcggaggcaaccagcctaaagatgggacacagttgttacaactaacaacattgtagtctagaatatggtatagtaatacagtaacatgaagctcttaaatatttctcgatatttagaacatggaacaaataatgttgttatagtataccaaccttacatgagtatagagaaagtatgtggacttccaacatggaaggacatatacatataagaggcacattatttattctgtaagtaacacaacatggagttcttgctccttgcatctcaagtattacttgctcattgccttcattcctttcatgtcaagttaatgacaaatgaagttgcctatgttagcaaagccacaaacacgaagtatcgtttggatggagaaaccattagggataacaccaccactgaacttgaaggaatcacataggcaactggcggcatcagtgctagatagactggtgatcggtggacaacaatcctgcttaaccaaactcggggagatgagcagagttgacggatcaagttttgcgcacacgttgagcgctaataccttttcttttgggcactgaccacctctggatggaggtggcggctgtgatatcggtggttgtgatggagttgctggaggtggaggtggcatggtttgtgttggtggcggcggaacactgtgcggtggtggcacccgcggcggtgtacgtgatggtgttggagctggagcgggcattggagttggttcctcgctaacaggagttggcggtggaaccctttgtggtggtggtgcatgtggaggtgcacgtgatggtgtcggagtaaggttaataggtgttggtgctggagcgggtgccggtgttggttgttcattaaccggaggtggtgatggaatcctttgtggtggtggtgcgcgtggaggtgcacgtgatggtgtcggagtaacagtaacaggggttggtgctggagcgggtgccggtgttggttcttcactaaccggagatggcggtggaaccctttgtggtggtggtgcacggggaggtgcacgtgatggtgtcggagtaaggttaacaggtgtaggtgcaggagagggttccgcagttggttcttcgttaaccggaggtggtggtggaaccctttgtggtgccggtgcacgtgatggtgttggtgtcacattggtcggtgttggtgcttggccgggtgccgatgttggctcttcgctaaccgaaggtggcggtggaaccctttgcggtggtgatgcacgaggaggtgcacgtgatggtgttggagaaacatttataggggttggcgctggagcaggtgccggtgttggttcttcactaaccggagatggcggtggaaccctttgcggtggtggcgcacgcggaggtgcgcctggtggggttggttctggtggtggtgtggcacttactggtggtggcggtggtattgtttgtggtggtggtggtagcggcggcgggggtgcacgtggcgggttccttctgggaggtgttgcaggttgctgggccttggcaaaagaagagagcgtgagaatcacgacggcgaacaggatggcattggggactgccatggctactcgccgtggtgctcggctctttcctgcctttgaactgatgaagtatatgaagctatttataggctaccgctagccgctttgcaatgttggtggtggcttggtacagcttatggtcacaactggattggaattttgcctcacacaactcggagacttgtagcaattgctaattaatcgtagcacgtgtacacaaagcgtactgaccaattagatagcatcaatcatgcttaccttcaactatcgaacagtgagctcaaggacattttgggtcactctcgaatttattcaacatttatgggcaacatggcaggaaatgcttagatgctggaggagggaatttgtcctattggtcctatggctcccttagctgtgcatatgtacatataaatcgttcctagcagggacacagctccaaagcaaataaaatcgacgcctgttctctcacctattctccattgcatatgcatggacctgatacaaactttgttctaatttgatttacaagaaacagttcaaatcttgtaagaacctaaaatcaataggtgttccgaaagaggtggaggcatatctttacccaggtggaactccattaagttgtttgctgggtataaatctgcatgcaaatcaatataaaagatataatatttttttgaccattaattacaaagacacatctattgttagtagtgatactgctaggttgagaaccactagataaaacatttactctcccgtttcagattacttaccgttctaagttaacaagtgaagtgaattatatagtgtgaacatgtttctcatggtgattctaaaagtataaatctaacgatgtttaaagataaagatataagtttatagaatttgatggtgaaagattaaacttgtttgatatcaatgacaactaatttagaatggagggagtagtgtcttactcctttcgtccaaccattaatatatataagcatttaaattctgtaaaaatataagcatttatacactactacatgttatgttaatcacctctcatttaaatttcttctgatcttttgtctaatcatcctttcactcccaaccatatatgttattataggggggcactaacaatatttctccgcaacctaaacttttggtaaattactaaaaaaaagctttggaaaacaactgaaaatgcattatatgttggatggaaggaccttattgagggatgcaaagaatcattccataaagagattttgcgccactaaaataaaatgcacaccttatatatcattcactctagggctagttttggtataggccatatatagttgccgagaatctggtccatatcatttcgttgacacgctctaagggtcattagatactatatccatggcttaatttttggtgagtcacttctatccatgtttcttggctagtagggagtcaaatcatagacgtttccgttgcacgtcaccacacagttagccactggctcctctgacgggtggggaaaatatgtataaaaagtccatttcacaatataagttattctataacttttcacatttagattaatgttaataaatctagacatatatatctatttagattcattaacatcaatatgaatgtggaaaatgttagaatgacttacattgtgaaacggagaaagtatgaaggactgactccaattctatagaaaaatttattaggtagtgttgacttttttcataaccaacacaaaatcacccaacgatgatttacggtgtaaccaatggagtcgacaaaatcgatagataaaaccagctagctgagccaattttgaatttaatttactttcgcgtaatcaaacaactattttatgagcaaattaacaaagaagataaatattgtacttttctaacgaaagaacaactagcgtctgagcaacctccgcgctttagtggataagcatgacccttttttagtgcaaaacggcaaaaaattaaccaaattttagaattgctataagtcagccatgcaaacaaaataaaaattaacataaaaataaaagtaaagaacagaaaaattatagattgataaattgtttggggtcccttcccaataggtcatcaatggtatatataccagctgggccttaatatttgggaaatctagtcagttccacacaaaatatatctaacttcaaccgaaaacgaaataaactgatcgttatctctaactcatcaactcctatgcctaagataatcacatactcccttcatcaaaaaaaaaaaatctaggagggtatgtgacccctccttatacacatcaaaaaaaaaatctaggagggtatgtgacccctccttatacaacgaatctaagacaatcctctctgtctagattcattgtactaggaggggacacatcctttcttaggttaggaggggtcatatcctatcttaggttaccttttttttttatggagggagtacaccatttgtaattcagccaagcaacgcaggataaggtaactatacggactcccacaaaacgcgacttatttcgaaaacgcttcgtatcttatgtccgatatggacgaaactctggacggtgggacccatagccgaaacctttccccaactttatcctcattcttcggttcttcctcatccccaaccacactagcgaagttaactctcgcggcgaagggcagtgggacctgatccaggacggtgcggaggctgctgagtcggcggcacgcgccggaggcaaagagggagagtcaggtgacgagcggggtgccgaggaggacgaggccaacgagcaccatccacagctacttgcgcatgcgccgggtggaacaccaccgcccaccacaccagcacggccgcgcccaccactcccgttgccaccacgcgcgccgccatggccaggcacgaccacgtcaaccacatcctctcccccgctgccgccgctgctcgctgctgtcctcctcctcctctcgcctccacgtccaccttgttgactggctccctctcgtggtgcgccattgcgagcacactgctggtgaatatactattttctggaggggggacctaaggaaggagtcgccggcagccatgtaggtggcggcggccgacggagaagcacgaagcgaagagggaggagggctctgaggtcggcaatgaaggtgaagaggcttgtggcaacgtcgaactagctaacgaggattgttgcacactacatgtttttttgttacatatagtgtgttcgtgatgttggaattcgttttttatgtttcttaaatcagtactagatgttgcatttggtttctttgatgttccacatattgggttttactgagtgttacatttaattgaaacatcttcaataaagcggtgaaacattcttctgtgaaagatgaaacatcgagaaacaattaatgttgaaacattttttttcgagctatgaaacattacagcatttatttaacatacagtgtaacatcgtttggagatttcatgttgaaacattttttttgagcgatggaacattgcaacattcatttaacatacactgcaatatcatccgaagatttgcaaatatctggacgaccgatgcgtagcactatccgaataatttttgtacacagttccatgcatgtagcgtgttcgtcctcctgcacagcgggtcccacgtgaagaaaatgtggagccaaggaaaagatcacgcacagtccaacaaaagccatcctgcatcctgcatccagcaaatttggatggctgcatttcatctgcttcctttgcatgcatataatcaactcaagcacagttatatcagctgcatcggtacatatccaatataagccaaatgcttcagtagctagcaccaaaaaccaatacatccactactaaaaaatatttttttcctaacgctatgatttatttttctaggtggactataaaatcactgttgttaaaatagctaaaggtaccatgaaagtagtcccacctgcgaaaatcgattttttttagtcagaccacttaagagatctgcctacaaaatacaagaccttaagatgtctacatgcgacaaggttatactatataaaaatcatcacctatatctagccccatttccaccaagtcctctaacctctccttccctctctctcaccaaaaccggtctatcctcccacctctccttccctctcccacctcacactccacctccgaacaggcggcgcacgtggccccctcccctcccctccctttccctcccaaatccgacagtaagaggctagggcggcgatggcgtggaagcagcggggaggaggcactcacctctccccgctcctaaatccggctggagtaggggagagcggcagcggcggcgtggaagcagcgtggaggcagcgctcccctcccttacctccctcctcactcctacatccaaccggaggagggcgagcggcggcggcggcgcttccctcccctcgctcccttcctccctctccgtgctagattcggccagaggagggcgagcggtggtgtagaggcggtgacggtggcagctccactccctccctctctattcctagatccggctagacgagggggagcgatagcaacgttggcaacgctaccctccccttgctccctccctccctctcagatctggcacacggtgttggctctcccctcccctcccacccagattaggccggggggtgggtggggggggggagggcggtggcggtggctggcggctccccaccctctccctcccaaattatttttgtgttcgcttaaaatatttaagcaagcggatggatctagcgcctgcgaagatggagaagccgcctaccaaaatcatttttgcagactgaaggccacctgtgaaaatgacgtgttttcataggccttgaagtacaggcggggtgaatgtctgcctggaaaatttcatattgacctcttgttaaaatatgtattctagtagggattactccacatatttaaatggctcctaaaccaaccactcaacaaatttcctaaatcctaaagttagagctcactaaatcctaaaacttattatgcaaagatactccatcatcatccactaacaattaataaatttaaacatcatacaagcattttatattatctataattttataatttattaaattttatagcttttcaaattcaagcacgttaagtcatcatttcacataattcacataatatttcaatatgtctttccatcttttttatagtatcttatatagtccaacttaactcctaatttagtaaatgtgctctctctctctctcttctctcattaagccagatcacataaatatttgtgtccttaaatgattatacatggtccaaattctccgttcttttattctcttattaaggcccttcttttattctttagtcagcttaggattatgataatctagattattagaagtaagctgaaacaaacagatagcttattatgatatattattataatctataagctagat

SEQ ID NO: 24719 - DNA, 3869 bp, Oryza sativa
acaaacacaatagcctaggagatttgcttagctccagtgcatgtctaagggtttatgagatgcgggcgtgcctatcagtttgatcatgcaactgacaagatatagaaatagtagattaatgagccgatcggctggcaagccgatgaagtaagtccagccgatgccgatactagacgatagtgaaaggattttgagctatcggctatatgattgatgtagaatctgacacttgatgtaaatagagacaatcgactgatgatgatataatagaataagcaatgatccgaaggttaaagcatacatcggctggaggaccgacgtcatgaaatccaaacgattagataaacagtaaaatctttgttgcgactggctaaatccaatttgtatgtaatccttataagtcgatgcaacatccatataacttattggctgaaacccgatgaaacccttattggcaatcaaaaagcaggctagggattatggttctaaacatgacttagtagatcaaacttaactgatgcagcactaagtaagaaaatatacatctagacatgacttagtaaatcaagccctttgactgattttcagggtggtagataccttagctaatctaatctggtaaagcgatttagccgataccggcattaaccctaaagcgaatctcagccaatataagtaaatcgaactatcaaactagattaactaagatatatgatagataggtgcttatatggacaagatcagagtgttgaagccccagccccactgatgcaaacagccgtgacaagtataaaactcgttgaaaaagtagaaaagtaaaaagggtggcgatgcaccgaatttgtattgattgtggagatggtttacaatgaccctgggtggtgtacatatttatacccatgggtagatactggtccttattggacatgaaagaaactttcctaaagataaaaagaaaacataaagtccttatcggatactaaacacacttccctaaaggaaaaaggaaactaccagactattcctaattaatagataaattgccatgccgcatcctccttgaacttggtaacttctagacaaacttcttttagtagattaattttctaaaccgaatatagcaagaatctgactattggcgacttgataattctcatcggccgattccaggactccgttgacgagactgactctaggctgatgatgacttcggagcttaccaaatttcactgttaatagatcggcttcaaaatgttggttaaattagcaagatgtctagccggcgctttcagttgggccctttgttcttcaattgtccacggcaaatcggcaaacttttgcttttctgctatcatatcttgctgagtttgttccagctgagctaggaggtcatcttctttttgttcaagttcttgaatcttctgttgggttgatcttggaccagcaagcagttcatcaagtttggctttgtcttcaaggatttgttgtcgaatggcttcaacaattgtggatgttgtggttgtgatgttgcagtgttgtgatttggataatgacgtctaaacctaaaatccaccctataagtatatatattatgtaacctctgatctcaggagcgccaggactcccctcgctgctggctcgaggtagggttggtgtgcttgggtgcaatggaggttcgtagtccttctagcaggagtcgcaatgcgagagtgactgaaaagccgggctgtgacaaagcccatgtgttgggtgcgttacggagtgcgagattgaaagcatattccactgcagtgtgagtaaactaatctattcgaatagtcgtgctagcagttaatgagcaccgggaattgtagtattcttgactagactcatagatctttaatattgcttagattaggaaaggacgtgtgtgagatcttgcccgatgggtggagagatcattatgattttggaaatatggacaatttggatgcgagggtaacacgtaccaagcgagacttgggccacattggtaagccctcgatgtttaatgataattcaacacaactttgtttttattcaaaactgctaggtcatacgtttatgcaaccagaccaagccaacaatgtgcccctataattattatatgcgttaccatagtggtgacgtgctgagtatggttggtactcacccttgcaaattttacactcttttagacttagtcgatgtggagataccacatgagaacattcccgaggagggagaacccgaggagatgccttatgaactgatccccagtcgatacctgtggagtatagttggaccgtcgcagcttcgctttcgctaccatatcacgtcctttagttttcatattgtatcggactagacttggtctatttgggacccactcgggcttcccatgtaataatacgtatcgtaagactatgtgatgcagactatgttgtaccagattgttaacgaccaaatttggtaatatcagtatcggagataaagatgggatcgaagcggaatcgaagatgaggattgttgcagaaacagagtaaggatcggctggagtccggatcggctacgactgagatcggctcagcctgagttggactggttaagtgatacagccgattccagcaatacgacccgtgtacgacattgggttgagttgatgtgcttcaagataattgccacacaaggatagagtcctgggaaggcaattgtatctattaattaggatattttatgtaaattccttagagataaatatgggcaaaagtctgccgcaaagacttatggtatcttagagtttgttagagataagagtcgtgtccaatatggacatatcttgtaattctcgagtataaatagaccccgagccctatgtaatggttaacacacatgttcaatacaatttcggcgcatcaccaccttttttgttttagttttatttcgacgagttcttgctatcgggttgagctgcatcggtttcgatcttcaacaagaggtaaaacttgttatggcggcttgtgttctctcgagattagtgcttccatctttatgatactctaactttgtttatgtaatccatcaagttatcatatatcttgcataatgttcgacaatatcgtcatctaacttacaatcagctaacatctgctaccagaagacagccgattaggttaaataacgacgttggcttagactatatgagatatccaccaccctatgaaacatccagcggcttgatcgtctagatattgttcttcttttcatacttaatgttgaatcagttgagtttgatctattaagtcgtgcttagaatttcaatctctagcctgcttactggttgccgattagggtagtgtcggagtttcagccgatcttatctgatctaattgctctcgctctatatgctcaaataatatgctagatctgcccttcatgttaagatcttgtggcatttaagtatattagatctctgtttatgtcgcgaccgggaaaattgccttttcccgaacgctagtgtattaatccccgtcccaggaaaagccggggtacaccacacaaacatgatataaaagacacatctttattacatcgatagtatttacattattacaaaggcgctccaggcctgacaatcaaaaataaacagcagcggactagcgggcctacggctccatcttcacaggcgctcaactggggtataagccaggactccacctaagacatcttctccaaagcttctcttactgaagaggggaaggattgagcaagaatgagtacaaccacagtactcaacaggccacaccggagatgcataattaatgcaagggaggtgcaacggaataataatatagggattaagttttgcagta

SEQ ID NO: 24720 - DNA, 4812 bp, Oryza sativa
caactattatctgtgctctgaaaattccactaaaatttgagggctccttttagaccaaggagaatttaacaaaaattctccgggccacatttgaatttttcttgtacgtattttaaggtttgccaatttcttttcgaattttaattaattctattattccttttagaagatgatttttattttgggatgaatttatcagggcgtgacaaatccaccccccttacaagaatctcgtccccgagattcgaggaggctagcaagaggataggttgggcggtcttctcttcttgtctgacttcttccgttgcgtcttgacaaacttccagcaaaactttaccactcggaactgcttggcttgacctcctgttgcggatggaatcttctcttcacctgacttggaccagggtgcaccttttggctgactcagactaggttgcggtagttcagtgatgcttccgttccagaacttctcatgattcatatcttcggagtcaacctcggacaagttatcaacttcatgtcatgcgtcaacactagcttgtcattactaggatactatgtttgtcatcataagaatatcatgcttgttattcacttctaacttgccatcaactgtctcatattagctttcctggtctccggtgctaggtacttcggctattcgatgcaagggtcaaccactctaactataagttatgcttcccaagagaaccaatttatcccacttgacatacttcgacgtcttctccaatggctttattgctggatttgttattgtctaatcattatcctgccaaatctgaggcttcgctgttacatgtgattttaaactgacctctgcagactatcttcgaacatatcacttggttcataactgggaatagctcccacgaacaagcaactcagattcactttctttatgttcagtttactttccgctattctcttcatgttgtcatcagttagcactcaacgtattcctttacacctttaaccttgatgagttctttcccgttggatcatctcccaggacgtggcgtcgcctggtaaccggtgcttgcatttttcactccgtgtagcatctgataccgagtggaagatttcactctttgccttcatagaaacacttttacctaggtcatcttgctgacttaatgacaaggtgactgttgcggggcaattacaatcaggggtcttccttgagcgatgcagagcatgtttctgtttatcaatcacctttcggcctacttctttcatgctagagaacatctttgccaatctctttttatcaatcatctttcggcttatctctaacaggtggtattctttaatgtggattgcggacgcttctggggacgatgaggtcctttggcttgctgcctttcagtgaaaccttgatgtggttcgtcaaaaagctgcactgactaccttcagggaaatacattgcttgctatctgtatctatgccactagggtttagtgcttcctcgagatggggagcatccatattgttcttctgccatatcacctttgaccgttttctgatacctgatcgactaattaccaaccatcgactattatgttctagaatattgatgtcttcctggatcttcttaactgtttgcaggtatatccgaacctttcaatgtagaggcatggcgggtacacttatgggtttcattcaacaatccttatcttgatctgtaacaggcgtatccaaactcctgttccccaactactgtctcattggctttttaacccaacacagtttaattggttttcttttccatcaacaggttggttattaactcgaggttagaacatagttcctttgaaatgagaccctaggtctcctttatcagtaagcaattatacacataatcacatattcgcatcttccaaaagaatcctcatggaacttgtctgtattacacatttctccctcattacatgaatatgaggcactgccttaaacaaaaagggacggtgcttaacatcggtacattgtatcctcaacatgaatcatccataagcatagcaagctcactgtttatagacatgaatatatttatgtattgcattattgctgcaaactttcgattacaccatgataagtagcgaactgaaaaccacaaacatggctgctcattttgattccggagagatatagctggcattgttctagtgactgcatccttgattggttctgtgatgatgtgataggactgcataatgctatcattcacaggagaagcttccttctgattgctggttgaagcggatgacggtcttctgctgggtatcgccctccggaggttgattgcccttggctcggcctggagtaggtcggggagagacacaacttcttccatctacgacaattctttgctgaggctgtcgatgcagagaatggttgctatgatttattgccgagtcaggtgcagcaggaggagcattggtgcattgtttctgctatgggttctgattatcacgaggccttacgggtacggcgtttgctccagtgaccacaatacgattggaatgtctgcttcgtgtaaattggcggtaatgtggaggtcgattttgccttggttggggacagttttcggagtaatgcccttcttcactgcagttgtaacaaacaataactttcttacactcgggttcttcatcttgtacttgatttctcagctgctgtattggaacttccaaaggtacaacgcagatactggcctctgtcttgtcagctggtggctggggctgaaattgagcattgacaccttgtggtagtgcattcattggaattggagctgttgcaacgcgggctataggactgcttcgggatgcatggatgacaattcgttgaggagcaagcttctgattgcagggagttgcgtggactgtcgtgccggcagctatgtttctcggttttgggcacttgtcggcgaaatgacccattccttgacaattgaagcaacagatgtcttcccggactcggcattttcttttctcatttcgattcctctgtcctggcactggagttaggctggaactgtaatcttggcgaggattggtgttgccttgatgcttctctccgttggaactggcgggttggttagccatcttcttcgtcagcagaaaactgaattgacaatcttttggtacatgatcagttccttcacaaaagaaacaagtgatcctgctcgttggacacctgtcgggtggatggtcttcctcgcaatgaacgcatatagtggcacatgagctggcgacatgaccgatttctccacaacgagagcatgccttacgttccatttcatcttcatcatctgaggagacttgatctgaatcttcactatcagacactctacctccattagctaaaagatgttctgtcaactgtggtgcacctcggaaggtatttcttctctgacgtctggtcattcctggtggaggccattctgtgctggtaatgatcatcttacggacttcatcttcggttcgcattggtgcttttcttttctgctgaggacagttccttgcgtagtgcccttgctcatcacacataaaacagatgatacttgcttcttttgggtcaacatgtggcatggcatgaggggccttctgggatgttggcggtgcgctgacttgtggtgtgagtgcttggactgcctccaactgtacttgaggttgcatccgactcgggttcaaaattggcatccgatgctgctgtagtatctctataagcaatttgttctggttaatcaggtgttggaccactgctacacaactggtgtctggtgcttcattcactcgggagcttgaggtaccaatgtcctgacttctgaccttattgcccttctcattgtcagccatctgttgcaaaggtttggagagggagagagggaaaacaaaggggagagacagattagaaactaaggataggaccttaaaggaactaactcttcttgctgatgtgttgtttgtttcacttattctgcaagttgattaagcaaacaacctagcatggttacatcacaccccactgatgcaaaccacgcgctacacacacaaacaaggaaacacacgactaacgactctaccctagagggcggcttaggttctgcgacgggttctccaagatcttcactcctgcttctcagctggcttcactgcttcctccacttcgctagcggatcctgcagtcttctggagcttcggcaaacaattgacgacatcttcttcttcgcaaacctgaccatctagtactagttgaaatctgaagaaggaagaagggagtaaaccttttgcaaatagcattaggggaaggagaaaaagaggagctttcgcaaatagtttcatttataaaatatgtccttaggttttatccacttggcttatcctacagtcgagatggctctgataccagcttgtcgcgaccgggaaaattgccttttcccgaacgctagtgtattaatccccgtcccaggaaaagccggggtacaccacacaaacatgatataaaagacacatctttattacatcgatagtatttacattattacaaaggcgctccaggcctgacaatcaaaaataaacagcagcggactagcgggcctacggctccatcttcacaggcgctcaactggggtataagccaggactccacctaagacatcttctccaaagcttctcttactgaaaaggggaaggattgagcaagaatgagtacaaccacagtactcagcaagccacaccggagatgcataattaatgccaaggaggtacaagggaataataatatagggattaa
